United States Patent Application Publication US 2011/0183924 A1 - sequence listing, part 80

SEQ ID NO: 282381 - DNA, 2975 bp, Homo sapiens
tatcgtcgacccacggcgctcggaaaccgcccgccgcgcgtcattggtctcggcgccggagccgttggctcccagacccgcctctccgcctcctctcacttttcccagggcggatgcgcctgcgctcagctgcctgggcgggctgggaggcgcgggttgaaaagtctcgttccaagtttggagagagagagaagagcgcctcagacctcggtacccgcgagcggggaggaggcaggaaagaaggacgcggcgtctggggagcacccaggcagcaagacggggcccgggctttcgacagtggggagtgtgacgcgcttgggaaaggcaggagcgccagcggtcgggctgctcttggctaacgagaggagtccgaggcggcggcgaggggcgaacgacccgacgcaagatggcgagtaaagagaccacttaatcgtgtgggctttctccaaatttcagtgtttgaagatactgtggaggagcgtgtcatcaatgaagaatataaaatctggaagaagaatacaccgtttctatatgacctggttatgacccatgctcttcagtggcccagtcttaccgttcagtggcttcctgaagtgactaaacctgaaggaaaagattatgcccttcattggctagtgctggggactcatacgtctgatgagcagaatcatctggtggttgctcgagtacatattcccaatgatgatgcacagtttgatgcttcccattgtgacagtgacaagggtgaatttggtggctttggttctgtaacaggaaaaattgaatgtgaaattaaaatcaatcacgaaggagaagtaaaccgtgctcgttacatgccgcagaatcctcacatcattgctacaaaaacaccatcttctgatgtgttggtttttgactatacaaaacaccctgctaaaccagacccaagtggagaatgtaatcctgatctcagattaagaggtcaccagaaggaaggctatggtctctcctggaattcaaatttgagtggacatctcctaagtgcatctgatgaccatactgtttgtctgtgggatataaacgcaggaccaaaagaaggcaaaattgtggatgctaaagccatctttactggccactcagctgttgtagaggatgtggcctggcacctgctgcacgagtcattgtttggatctgttgctgatgatcagaaacttatgatatgggacaccaggtccaataccacctccaagccgagtcacttggtggatgcgcacactgccgaagtcaactgcctctcattcaatccctacagcgaatttattctagccaccggctctgcggataagaccgtagctttatgggatctgcgtaacttaaaattaaaactccataccttcgaatctcataaagatgaaattttccaggtccactggtctccacataatgaaactattctggcttcaagtggtactgaccgccgcctgaatgtgtgggatttaagtaaaattggggaagaacaatcagcagaagatgcagaagatgggcctccagaactcctgtttattcatggaggacacactgctaagatttcagattttagctggaaccccaatgagccttgggtcatttgctcagtgtctgaggataacatcatgcagatatggcaaatggctgaaaatatttacaatgatgaagagtcagatgtcacgacatccgaactggagggacaaggatcttaaacccaaagtacgagaaatgtttctgttgaatgtaatgctacatgaatgcttgatttatcaagcgccaaaaaggcattgtatagtaggaaatgtaagtggggtggcttatggcttctttatcctctgattctagcactttcaagtgagctgttgcgtactgtatcatattgtagctattagggaagagaagaatgttgcttaagaaagaacatcaccattgattttaaatacaagtagcagggtattgcctttgattcaactgttttaagtcctcattttctcaaactaagtgcttgctgttcccaaatatgcaagaataacttttacactttttccttccaacacttcttgattggctttgcagaaataaagttttaaaataaaacttgtgtttttttaaaagcttagtgggggggggcgggggagtctactttttgagtagaaatgggtaaaatggtacctttggactcctacagttaaggtcacatggataatgaaagaatacacagaagctgttaagtttatcatacatatttacttaatctatacagaatcaagtagataaaatcagattcacattagtgaaaaatctctacaaaatgtctttgaaaagcaaaacgagactgcctcttaacaattcgtatcctcatgaaagacgtgggctgtaaaaataaagcagtgtgtttagcacaaactagaagatatctgcatcatttttttcacagttatttccatctacagtctgaaagaggtagatttttctgcaacacctgagaattgaattgtgataaccaggtgtaataaaggcagttgcatacataactgaaaaatactggtctcaagaccaagaaatgtactcctaacaagtctgaggatgaaatggtccatattacccaagacccaagttttctctacaccttggagtccaccgccaatataaataatacacatcacgattccatgatggtgcaacaattgcaatttaagtgaattcaacatttaaacctttctgggccagcctagtagcattacagtgttctagaatatggtagatacggggtgcgctacaaagccacaacactgggctggtgaggtgatcactgtaggaagatgtccttctcagggggtcccatttgtttttattcacagggtaatgggaggaagggttctgaaaggacaacaaatgcatcccagacagaatccatatcctttcaacactataatagcatctagctaaaaatacaaagttggcggcca

SEQ ID NO: 282382 - DNA, 2447 bp, Homo sapiens
cccggagctcccgggaaaattatcccaggagaaattattatcgtacagaatcccaaacggacggcttccggagacctgaaggaaaagattatgcccttcattggctagtgctggggactcatacgtctgatgagcagaatcatctggtggttgctcgagtacatattcccaatgatgatgcacagtttgatgcttcccattgtgacagtgacaagggtgaatttggtggctttggttctgtaacaggaaaaattgaatgtgaaattaaaatcaatcacgaaggagaagtaaaccgtgctcgttacatgccgcagaatcctcacatcattgctacaaaaacaccatcttctgatgtgttggtttttgactatacaaaacaccctgctaaaccagacccaagtggagaatgtaatcctgatctcagattaagaggtcaccagaaggaaggctatggtctctcctggaattcaaatttgagtggacatctcctaagtgcatctgatgaccatactgtttgtctgtgggatataaacgcaggaccaaaagaaggcaaaattgtggatgctaaagccatctttactggccactcagctgttgtagaggatgtggcctggcacctgctgcacgagtcattgtttggatctgttgctgatgatcagaaacttatgatatgggacaccaggtccaataccacctccaagccgagtcacttggtggatgcgcacactgccgaagtcaactgcctctcattcaatccctacagcgaatttattctagccaccggctctgcggataagaccgtagctttatgggatctgcgtaacttaaaattaaaactccataccttcgaatctcataaagatgaaattttccaggtccactggtctccacataatgaaactattctggcttcaagtggtactgaccgccgcctgaatgtgtgggatttaagtaaaattggggaagaacaatcagcagaagatgcagaagatgggcctccagaactcctgtttattcatggaggacacactgctaagatttcagattttagctggaaccccaatgagccttgggtcatttgctcagtgtctgaggataacatcatgcagatatggcaaatggctgaaaatatttacaatgatgaagagtcagatgtcacgacatccgaactggagggacaaggatcttaaacccaaagtacgagaaatgtttctgttgaatgtaatgctacatgaatgcttgatttatcaagcgccaaaaaggcattgtatagtaggaaatgtaagtggggtggcttatggcttctttatcctctgattctagcactttcaagtgagctgttgcgtactgtatcatattgtagctattagggaagagaagaatgttgcttaagaaagaacatcaccattgattttaaatacaagtagcagggtattgcctttgattcaactgttttaagtcctcattttctcaaactaagtgcttgctgttcccaaatatgcaagaataacttttacactttttccttccaacacttcttgattggctttgcagaaataaagttttaaaataaaacttgtgtttttttaaaagcttagtgggggggggcgggggagtctactttttgagtagaaatgggtaaaatggtacctttggactcctacagttaaggtcacatggataatgaaagaatacacagaagctgttaagtttatcatacatatttacttaatctatacagaatcaagtagataaaatcagattcacattagtgaaaaatctctacaaaatgtctttgaaaagcaaaacgagactgcctcttaacaattcgtatcctcatgaaagacgtgggctgtaaaaataaagcagtgtgtttagcacaaactagaagatatctgcatcatttttttcacagttatttccatctacagtctgaaagaggtagatttttctgcaacacctgagaattgaattgtgataaccaggtgtaataaaggcagttgcatacataactgaaaaatactggtctcaagaccaagaaatgtactcctaacaagtctgaggatgaaatggtccatattacccaagacccaagttttctctacaccttggagtccaccgccaatataaataatacacatcacgattccatgatggtgcaacaattgcaatttaagtgaattcaacatttaaacctttctgggccagcctagtagcattacagtgttctagaatatggtagatacggggtgcgctacaaagccacaacactgggctggtgaggtgatcactgtaggaagatgtccttctcagggggtcccatttgtttttattcacagggtaatgggaggaagggttctgaaaggacaacaaatgcatcccagacagaatccatatcctttcaacactataatagcatctagctaaaaatacaaagttggcggcca

SEQ ID NO: 282383 - DNA, 2914 bp, Homo sapiens
tatcgtcgacccacggcgctcggaaaccgcccgccgcgcgtcattggtctcggcgccggagccgttggctcccagacccgcctctccgcctcctctcacttttcccagggcggatgcgcctgcgctcagctgcctgggcgggctgggaggcgcgggttgaaaagtctcgttccaagtttggagagagagagaagagcgcctcagacctcggtacccgcgagcggggaggaggcaggaaagaaggacgcggcgtctggggagcacccaggcagcaagacggggcccgggctttcgacagtggggagtgtgacgcgcttgggaaaggcaggagcgccagcggtcgggctgctcttggctaacgagaggagtccgaggcggcggcgaggggcgaacgacccgacgcaagatggcgagtaaagagatgtttgaagatactgtggaggagcgtgtcatcaatgaagaatataaaatctggaagaagaatacaccgtttctatatgacctggttatgacccatgctcttcagtggcccagtcttaccgttcagtggcttcctgaagtgactaaacctgaaggaaaagattatgcccttcattggctagtgctggggactcatacgtctgatgagcagaatcatctggtggttgctcgagtacatattcccaatgatgatgcacagtttgatgcttcccattgtgacagtgacaagggtggaaaaattgaatgtgaaattaaaatcaatcacgaaggagaagtaaaccgtgctcgttacatgccgcagaatcctcacatcattgctacaaaaacaccatcttctgatgtgttggtttttgactatacaaaacaccctgctaaaccagacccaagtggagaatgtaatcctgatctcagattaagaggtcaccagaaggaaggctatggtctctcctggaattcaaatttgagtggacatctcctaagtgcatctgatgaccatactgtttgtctgtgggatataaacgcaggaccaaaagaaggcaaaattgtggatgctaaagccatctttactggccactcagctgttgtagaggatgtggcctggcacctgctgcacgagtcattgtttggatctgttgctgatgatcagaaacttatgatatgggacaccaggtccaataccacctccaagccgagtcacttggtggatgcgcacactgccgaagtcaactgcctctcattcaatccctacagcgaatttattctagccaccggctctgcggataagaccgtagctttatgggatctgcgtaacttaaaattaaaactccataccttcgaatctcataaagatgaaattttccaggtccactggtctccacataatgaaactattctggcttcaagtggtactgaccgccgcctgaatgtgtgggatttaagtaaaattggggaagaacaatcagcagaagatgcagaagatgggcctccagaactcctgtttattcatggaggacacactgctaagatttcagattttagctggaaccccaatgagccttgggtcatttgctcagtgtctgaggataacatcatgcagatatggcaaatggctgaaaatatttacaatgatgaagagtcagatgtcacgacatccgaactggagggacaaggatcttaaacccaaagtacgagaaatgtttctgttgaatgtaatgctacatgaatgcttgatttatcaagcgccaaaaaggcattgtatagtaggaaatgtaagtggggtggcttatggcttctttatcctctgattctagcactttcaagtgagctgttgcgtactgtatcatattgtagctattagggaagagaagaatgttgcttaagaaagaacatcaccattgattttaaatacaagtagcagggtattgcctttgattcaactgttttaagtcctcattttctcaaactaagtgcttgctgttcccaaatatgcaagaataacttttacactttttccttccaacacttcttgattggctttgcagaaataaagttttaaaataaaacttgtgtttttttaaaagcttagtgggggggggcgggggagtctactttttgagtagaaatgggtaaaatggtacctttggactcctacagttaaggtcacatggataatgaaagaatacacagaagctgttaagtttatcatacatatttacttaatctatacagaatcaagtagataaaatcagattcacattagtgaaaaatctctacaaaatgtctttgaaaagcaaaacgagactgcctcttaacaattcgtatcctcatgaaagacgtgggctgtaaaaataaagcagtgtgtttagcacaaactagaagatatctgcatcatttttttcacagttatttccatctacagtctgaaagaggtagatttttctgcaacacctgagaattgaattgtgataaccaggtgtaataaaggcagttgcatacataactgaaaaatactggtctcaagaccaagaaatgtactcctaacaagtctgaggatgaaatggtccatattacccaagacccaagttttctctacaccttggagtccaccgccaatataaataatacacatcacgattccatgatggtgcaacaattgcaatttaagtgaattcaacatttaaacctttctgggccagcctagtagcattacagtgttctagaatatggtagatacggggtgcgctacaaagccacaacactgggctggtgaggtgatcactgtaggaagatgtccttctcagggggtcccatttgtttttattcacagggtaatgggaggaagggttctgaaaggacaacaaatgcatcccagacagaatccatatcctttcaacactataatagcatctagctaaaaatacaaagttggcggcca

SEQ ID NO: 282384 - DNA, 1618 bp, Homo sapiens
tatcgtcgacccacggcgctcggaaaccgcccgccgcgcgtcattggtctcggcgccggagccgttggctcccagacccgcctctccgcctcctctcacttttcccagggcggatgcgcctgcgctcagctgcctgggcgggctgggaggcgcgggttgaaaagtctcgttccaagtttggagagagagagaagagcgcctcagacctcggtacccgcgagcggggaggaggcaggaaagaaggacgcggcgtctggggagcacccaggcagcaagacggggcccgggctttcgacagtggggagtgtgacgcgcttgggaaaggcaggagcgccagcggtcgggctgctcttggctaacgagaggagtccgaggcggcggcgaggggcgaacgacccgacgcaagatggcgagtaaagagatgtttgaagatactgtggaggagcgtgtcatcaatgaagaatataaaatctggaagaagaatacaccgtttctatatgacctggttatgacccatgctcttcagtggcccagtcttaccgttcagtggcttcctgaagtgactaaacctgaaggaaaagattatgcccttcattggctagtgctggggactcatacgtctgatgagcagaatcatctggtggttgctcgagtacatattcccaatgatgatgcacagtttgatgcttcccattgtgacagtgacaagggtgaatttggtggctttggttctgtaacaggaaaaattgaatgtgaaattaaaatcaatcacgaaggagaagtaaaccgtgctcgttacatgccgcagaatcctcacatcattgctacaaaaacaccatcttctgatgtgttggtttttgactatacaaaacaccctgctaaaccagacccaagtggagaatgtaatcctgatctcagattaagaggtcaccagaaggaaggctatggtctctcctggaattcaaatttgagtggacatctcctaagtgcatctgatgaccatactgtttgtctgtgggatataaacgcaggaccaaaagaaggcaaaattgtggatgctaaagccatctttactggccactcagctgttgtagaggatgtggcctggcacctgctgcacgagtcattgtttggatctgttgctgatgatcagaaacttatgatatgggacaccaggtccaataccacctccaagccgagtcacttggtggatgcgcacactgccgaagtcaactgcctctcattcaatccctacagcgaatttattctagccaccggctctgcggataagaccgtagctttatgggatctgcgtaacttaaaattaaaactccataccttcgaatctcataaagatgaaattttccaggtccactggtctccacataatgaaactattctggcttcaagtggtactgaccgccgcctgaatgtgtgggatttaagtaaaattggggaaaaacatcaccaaaaatgcccatgggcctccgaacttctggttatttatggggacacactgctaagattttttagctggaccccacgagcctgggtatttgctagggctggggaacaacatcaatatggcgagggcggtatttcatgtggagggcgtgtg

SEQ ID NO: 282385 - DNA, 1535 bp, Homo sapiens
tatcgtcgacccacggcgctcggaaaccgcccgccgcgcgtcattggtctcggcgccggagccgttggctcccagacccgcctctccgcctcctctcacttttcccagggcggatgcgcctgcgctcagctgcctgggcgggctgggaggcgcgggttgaaaagtctcgttccaagtttggagagagagagaagagcgcctcagacctcggtacccgcgagcggggaggaggcaggaaagaaggacgcggcgtctggggagcacccaggcagcaagacggggcccgggctttcgacagtggggagtgtgacgcgcttgggaaaggcaggagcgccagcggtcgggctgctcttggctaacgagaggagtccgaggcggcggcgaggggcgaacgacccgacgcaagatggcgagtaaagagatgtttgaagatactgtggaggagcgtgtcatcaatgaagaatataaaatctggaagaagaatacaccgtttctatatgacctggttatgacccatgctcttcagtggcccagtcttaccgttcagtggcttcctgaagtgactaaacctgaaggaaaagattatgcccttcattggctagtgctggggactcatacgtctgatgagcagaatcatctggtggttgctcgagtacatattcccaatgatgatgcacagtttgatgcttcccattgtgacagtgacaagggtgaatttggtggctttggttctgtaacaggaaaaattgaatgtgaaattaaaatcaatcacgaaggagaagtaaaccgtgctcgttacatgccgcagaatcctcacatcattgctacaaaaacaccatcttctgatgtgttggtttttgactatacaaaacaccctgctaaaccagacccaagtggagaatgtaatcctgatctcagattaagaggtcaccagaaggaaggctatggtctctcctggaattcaaatttgagtggacatctcctaagtgcatctgatgaccatactgtttgtctgtgggatataaacgcaggaccaaaagaaggcaaaattgtggatgctaaagccatctttactggccactcagctgttgtagaggatgtggcctggcacctgctgcacgagtcattgtttggatctgttgctgatgatcagaaacttatgatatgggacaccaggtccaataccacctccaagccgagtcacttggtggatgcgcacactgccgaagtcaactgcctctcattcaatccctacagcgaatttattctagccaccggctctgcggataagaccgtagttatgggatctggtacgttaaattatatgcatacttcgatttataagatgaatttagtcactggtttcaatatgaatatctggtaagtggtagaccgcgccgattgggattagtaaatgggggaaaagaaaatgaaatggccgaaacgttttgagaccagtatatttgaccaagtggtagggcggaaatgaagaggataagacaggtacaggatacaagttgtgataacaaaaaatc

SEQ ID NO: 282386 - DNA, 1807 bp, Homo sapiens
tatcgtcgacccacggcgctcggaaaccgcccgccgcgcgtcattggtctcggcgccggagccgttggctcccagacccgcctctccgcctcctctcacttttcccagggcggatgcgcctgcgctcagctgcctgggcgggctgggaggcgcgggttgaaaagtctcgttccaagtttggagagagagagaagagcgcctcagacctcggtacccgcgagcggggaggaggcaggaaagaaggacgcggcgtctggggagcacccaggcagcaagacggggcccgggctttcgacagtggggagtgtgacgcgcttgggaaaggcaggagcgccagcggtcgggctgctcttggctaacgagaggagtccgaggcggcggcgaggggcgaacgacccgacgcaagatggcgagtaaagagatgtttgaagatactgtggaggagcgtgtcatcaatgaagaatataaaatctggaagaagaatacaccgtttctatatgacctggttatgacccatgctcttcagtggcccagtcttaccgttcagtggcttcctgaagtgactaaacctgaaggaaaagattatgcccttcattggctagtgctggggactcatacgtctgatgagcagaatcatctggtggttgctcgagtacatattcccaatgatgatgcacagtttgatgcttcccattgtgacagtgacaagggtgaatttggtggctttggttctgtaacaggaaaaattgaatgtgaaattaaaatcaatcacgaaggagaagtaaaccgtgctcgttacatgccgcagaatcctcacatcattgctacaaaaacaccatcttctgatgtgttggtttttgactatacaaaacaccctgctaaaccagacccaagtggagaatgtaatcctgatctcagattaagaggtcaccagaaggaaggctatggtctctcctggaattcaaatttgagtggacatctcctaagtgcatctgatgaccatactgtttgtctgtgggatataaacgcaggaccaaaagaaggcaaaattgtggatgctaaagccatctttactggccactcagctgttgtagaggatgtggcctggcacctgctgcacgagtcattgtttggatctgttgctgatgatcagaaacttatgatgtaaggtggaaaattcagtgggatcttgttaaatgggtgacctgaatgaccatcagtgattgctgcaggctgtagtttgatttttttttttttaagttatggctttaaaaaacagctttaggtagcttactcctgtaatctcaataccttgggaagctgaggcaggaggattgcttgagaccaggagtgtgagactctacacaaaatttaaaaacaaaaaattagttgggtatggtggtgtgcacctgtagtcctagctactcaggaggctgaagtgggaggatcacttattatttagaaaaaaagaaaactaggtatggacatgtgaaggaacatacttggtgtggtggtaaatatcaaaattgagatccagagtgatgccagttggaggtcgaggaggaaaatgatttcatcaaggtgtggccacagggcttcattcacttataatcttataaagaaatacctgaggcaaatgtgacaaaatactgggcatttgtcaaaactagttttaggtatcagattgtgacattattctctacatagtctgtattttgtgtacacttgaaatagttggtaattaaaataggaatctaatttaaaatggtcgaggtctgaatcaccagctgtgtggttggtttcttca

SEQ ID NO: 282387 - DNA, 1084 bp, Homo sapiens
  misc_feature (1009)..(1009): n is a, c, g, or t
tatcgtcgacccacggcgctcggaaaccgcccgccgcgcgtcattggtctcggcgccggagccgttggctcccagacccgcctctccgcctcctctcacttttcccagggcggatgcgcctgcgctcagctgcctgggcgggctgggaggcgcgggttgaaaagtctcgttccaagtttggagagagagagaagagcgcctcagacctcggtacccgcgagcggggaggaggcaggaaagaaggacgcggcgtctggggagcacccaggcagcaagacggggcccgggctttcgacagtggggagtgtgacgcgcttgggaaaggcaggagcgccagcggtcgggctgctcttggctaacgagaggagtccgaggcggcggcgaggggcgaacgacccgacgcaagatggcgagtaaagagatgtttgaagatactgtggaggagcgtgtcatcaatgaagaatataaaatctggaagaagaatacaccgtttctatatgacctggttatgacccatgctcttcagtggcccagtcttaccgttcagtggcttcctgaagtgactaaacctgaaggaaaagattatgcccttcattggctagtgctggggactcatacgtctgatgagcagaatcatctggtggttgctcgagtacatattcccaatgatgatgcacagtttgatgcttcccattgtgacagtgacaagggtgaatttggtggctttggttctgtaacaggaaaaattgaatgtgaaattaaaatcaatcacgaaggagaagtaaaccgtgctcgttacatgccgcagaatcctcacatcattgctacaaaaacaccatcttctgatgtgttggtttttgactatacaaaacaccctgctaaaccagacccaagtggagaatgtaatcctgatctcagattaagaggtcaccagaaggaaggctatggtctctcctggaattcaaatttgagtggacatctcctaagtgcatctgatgaccatgggggntgggggagtaagacggccaagaggagatgggtgtaagccttttggccacatgttaggatggcgcctccgaaattg

SEQ ID NO: 282388 - DNA, 930 bp, Homo sapiens
tatcgtcgacccacggcgctcggaaaccgcccgccgcgcgtcattggtctcggcgccggagccgttggctcccagacccgcctctccgcctcctctcacttttcccagggcggatgcgcctgcgctcagctgcctgggcgggctgggaggcgcgggttgaaaagtctcgttccaagtttggagagagagagaagagcgcctcagacctcggtacccgcgagcggggaggaggcaggaaagaaggacgcggcgtctggggagcacccaggcagcaagacggggcccgggctttcgacagtggggagtgtgacgcgcttgggaaaggcaggagcgccagcggtcgggctgctcttggctaacgagaggagtccgaggcggcggcgaggggcgaacgacccgacgcaagatggcgagtaaagagatgtttgaagatactgtggaggagcgtgtcatcaatgaagaatataaaatctggaagaagaatacaccgtttctatatgacctggttatgacccatgctcttcagtggcccagtcttaccgttcagtggcttcctgaagtgactaaacctgaaggaaaagattatgcccttcattggctagtgctggggactcatacgtctgatgagcagaatcatctggtggttgctcgagtacatattcccaatgatgatgcacagtttgatgcttcccattgtgacagtgacaagggtgaatttggtggctttggttctgtaacaggaaaaattgaatgtgaaattaaaatcaatcacgaaggagaagtaaaccgtgctcgttacatgccgcagaatcctcacatcattgctacaaaaacaccatcttctgatgtgttggtttttgactatacaaaacaccctgctaaaccagccagaagtaaggtttggcttttccggaatcacaattgagggcg

SEQ ID NO: 282389 - DNA, 1148 bp, Homo sapiens
cagcatggttccactggagttctcctgcatcatgccttctgaataaatgccgatttatccaatggaaaaaaaaaaaagaagaatgttgcttaagaaagaacatcaccattgattttaaatacaagtagcagggtattgcctttgattcaactgttttaagtcctcattttctcaaactaagtgcttgctgttcccaaatatgcaagaataacttttacactttttccttccaacacttcttgattggctttgcagaaataaagttttaaaataaaacttgtgtttttttaaaagcttagtgggggggggcgggggagtctactttttgagtagaaatgggtaaaatggtacctttggactcctacagttaaggtcacatggataatgaaagaatacacagaagctgttaagtttatcatacatatttacttaatctatacagaatcaagtagataaaatcagattcacattagtgaaaaatctctacaaaatgtctttgaaaagcaaaacgagactgcctcttaacaattcgtatcctcatgaaagacgtgggctgtaaaaataaagcagtgtgtttagcacaaactagaagatatctgcatcatttttttcacagttatttccatctacagtctgaaagaggtagatttttctgcaacacctgagaattgaattgtgataaccaggtgtaataaaggcagttgcatacataactgaaaaatactggtctcaagaccaagaaatgtactcctaacaagtctgaggatgaaatggtccatattacccaagacccaagttttctctacaccttggagtccaccgccaatataaataatacacatcacgattccatgatggtgcaacaattgcaatttaagtgaattcaacatttaaacctttctgggccagcctagtagcattacagtgttctagaatatggtagatacggggtgcgctacaaagccacaacactgggctggtgaggtgatcactgtaggaagatgtccttctcagggggtcccatttgtttttattcacagggtaatgggaggaagggttctgaaaggacaacaaatgcatcccagacagaatccatatcctttcaacactataatagcatctagctaaaaatacaaagttggcggcca

SEQ ID NO: 282390 - DNA, 309 bp, Homo sapiens
ttgttctctgtaggtttcgaatgtatcatttagtggtcgaggtctgaatcaccagctgtgtggttggtttcttcatgaaggggagcacatagtggagctagttgtggagtgcagtgacagtgatgtgaggccgaatgtgagtgtgtcatccctgggtgccgtgtgcctttacctttgtgttttagatgggacaccaggtccaataccacctccaagccgagtcacttggtggatgcgcacactgccgaagtcaactgcctctcattcaatccctacagcgaatttattctagccaccggctctgcggat

SEQ ID NO: 282391 - DNA, 577 bp, Homo sapiens
gattgaaataagtagtgcatcgatgggtggctaagtatacatacggaattacacactggcaaagaatttttcaaaatactggctagcctaccatttccttattgaagtttttaagagagaaatgtaaaaatgaaactattaagttctaaatagattaaattgtttttacatgaccatgtgaaaaccatagggagtttttacctgtgaatttatttggttatctccaggctgaaaatatttacaatgatgaagagtcagatgtcacgacatccgaactggagggacaaggatcttaaacccaaagtacgagaaatgtttctgttgaatgtaatgctacatgaatgcttgatttatcaagcgccaaaaaggcattgtatagtaggaaatgtaagtggggtggcttatggcttctttatcctctgattctagcactttcaagtgagctgttgcgtactgtatcatattgtagctattagggaagagaagaatgttgcttaagaaagaacatcaccattgattttaaatacaagtagcagggtattgcctttgattcaactgttttaagtcctcattttct

SEQ ID NO: 282392 - DNA, 307 bp, Homo sapiens
caagcgccaaaaaggcattgtatagtaggaaatgtaagtggggtggcttatggcttctttatcctctgattctagcactttcaagtgagctgttgcgtactgtatcatattgtagctattagggaagagaagaatgttgcttaagaaagaacatcaccattgattttaaatacaagtagcagggtattgcctttgattcaactgttttaagtcctcattttctcaaactaagtgcttgctgttcccaaatatgcaagaataacttttacactttttccttccaacacttcttgattggctttgcaga

SEQ ID NO: 282393 - DNA, 281 bp, Homo sapiens
cttatggcttctttatcctctgattctagcactttcaagtgagctgttgcgtactgtatcatattgtagctattagggaagagaagaatgttgcttaagaaagaacatcaccattgattttaaatacaagtagcagggtattgcctttgattcaactgttttaagtcctcattttctcaaactaagtgcttgctgttcccaaatatgcaagaataacttttacactttttccttccaacacttcttgattggctttgcagaaataaagttttaaaataaaa

SEQ ID NO: 282394 - DNA, 2860 bp, Homo sapiens
gcctcgtgccgaatcggcacgaggcagggcggatgcgcctgcgctcagctgcctgggcgggctgggaggcgcgggttgaaaagtctcgttccaagtttggagagagagagaagagcgcctcagacctcggtacccgcgagcggggaggaggcaggaaagaaggacgcggcgtctggggagcacccaggcagcaagacggggcccgggctttcgacagtggggagtgtgacgcgcttgggaaaggcaggagcgccagcggtcgggctgctcttggctaacgagaggagtccgaggcggcggcgaggggcgaacgacccgacgcaagatggcgagtaaagagatgtttgaagatactgtggaggagcgtgtcatcaatgaagaatataaaatctggaagaagaatacaccgtttctatatgacctggttatgacccatgctcttcagtggcccagtcttaccgttcagtggcttcctgaagtgactaaacctgaaggaaaagattatgcccttcattggctagtgctggggactcatacgtctgatgagcagaatcatctggtggttgctcgagtacatattcccaatgatgatgcacagtttgatgcttcccattgtgacagtgacaagggtgaatttggtggctttggttctgtaacaggaaaaattgaatgtgaaattaaaatcaatcacgaaggagaagtaaaccgtgctcgttacatgccgcagaatcctcacatcattgctacaaaaacaccatcttctgatgtgttggtttttgactatacaaaacaccctgctaaaccagacccaagtggagaatgtaatcctgatctcagattaagaggtcaccagaaggaaggctatggtctctcctggaattcaaatttgagtggacatctcctaagtgcatctgatgaccatactgtttgtctgtgggatataaacgcaggaccaaaagaaggcaaaattgtggatgctaaagccatctttactggccactcagctgttgtagaggatgtggcctggcacctgctgcacgagtcattgtttggatctgttgctgatgatcagaaacttatgatatgggacaccaggtccaataccacctccaagccgagtcacttggtggatgcgcacactgccgaagtcaactgcctctcattcaatccctacagcgaatttattctagccaccggctctgcggataagaccgtagctttatgggatctgcgtaacttaaaattaaaactccataccttcgaatctcataaagatgaaattttccaggtccactggtctccacataatgaaactattctggcttcaagtggtactgaccgccgcctgaatgtgtgggatttaagtaaaattggggaagaacaatcagcagaagatgcagaagatgggcctccagaactcctgtttattcatggaggacacactgctaagatttcagattttagctggaaccccaatgagccttgggtcatttgctcagtgtctgaggataacatcatgcagatatggcaaatggctgaaaatatttacaatgatgaagagtcagatgtcacgacatccgaactggagggacaaggatcttaaacccaaagtacgagaaatgtttctgttgaatgtaatgctacatgaatgcttgatttatcaagcgccaaaaaggcattgtatagtaggaaatgtaagtggggtggcttatggcttctttatcctctgattctagcactttcaagtgagctgttgcgtactgtatcatattgtagctattagggaagagaagaatgttgcttaagaaagaacatcaccattgattttaaatacaagtagcagggtattgcctttgattcaactgttttaagtcctcattttctcaaactaagtgcttgctgttcccaaatatgcaagaataacttttacactttttccttccaacacttcttgattggctttgcagaaataaagttttaaaataaaacttgtgtttttttaaaagcttagtgggggggggcgggggagtctactttttgagtagaaatgggtaaaatggtacctttggactcctacagttaaggtcacatggataatgaaagaatacacagaagctgttaagtttatcatacatatttacttaatctatacagaatcaagtagataaaatcagattcacattagtgaaaaatctctacaaaatgtctttgaaaagcaaaacgagactgcctcttaacaattcgtatcctcatgaaagacgtgggctgtaaaaataaagcagtgtgtttagcacaaactagaagatatctgcatcatttttttcacagttatttccatctacagtctgaaagaggtagatttttctgcaacacctgagaattgaattgtgataaccaggtgtaataaaggcagttgcatacataactgaaaaatactggtctcaagaccaagaaatgtactcctaacaagtctgaggatgaaatggtccatattacccaagacccaagttttctctacaccttggagtccaccgccaatataaataatacacatcacgattccatgatggtgcaacaattgcaatttaagtgaattcaacatttaaacctttctgggccagcctagtagcattacagtgttctagaatatggtagatacggggtgcgctacaaagccacaacactgggctggtgaggtgatcactgtaggaagatgtccttctcagggggtcccatttgtttttattcacagggtaatgggaggaagggttctgaaaggacaacaaatgcatcccagacagaatccatatcctttcaacactataatagcatctagctaaaaatacaaagttggcggcca

SEQ ID NO: 282395 - DNA, 2998 bp, Homo sapiens
tatcgtcgacccacggcgctcggaaaccgcccgccgcgcgtcattggtctcggcgccggagccgttggctcccagacccgcctctccgcctcctctcacttttcccagggcggatgcgcctgcgctcagctgcctgggcgggctgggaggcgcgggttgaaaagtctcgttccaagtttggagagagagagaagagcgcctcagacctcggtacccgcgagcggggaggaggcaggaaagaaggacgcggcgtctggggagcacccaggcagcaagacggggcccgggctttcgacagtggggagtgtgacgcgcttgggaaaggcaggagcgccagcggtcgggctgctcttggctaacgagaggagtccgaggcggcggcgaggggcgaacgacccgacgcaagatggcgagtaaagagatgtttgaagatactgtggaggagcgtgtcatcaatgaagaatataaaatctggaagaagaatacaccgtttctatatgacctggttatgacccatgctcttcagtggcccagtcttaccgttcagtggcttcctgaagtgactaaacctgaaggaaaagattatgcccttcattggctagtgctggggactcatacgtctgatgagcagaatcatctggtggttgctcgagtacatattcccaatgatgatgcacagtttgatgcttcccattgtgacagtgacaagggtgaatttggtggctttggttctgtaacaggaaaaattgaatgtgaaattaaaatcaatcacgaaggagaagtaaaccgtgctcgttacatgccgcagaatcctcacatcattgctacaaaaacaccatcttctgatgtgttggtttttgactatacaaaacaccctgctaaaccagacccaagtggagaatgtaatcctgatctcagattaagaggtcaccagaaggaaggctatggtctctcctggaattcaaatttgagtggacatctcctaagtgcatctgatgaccatactgtttgtctgtgggatataaacgcaggaccaaaagaaggcaaaattgtggatgctaaagccatctttactggccactcagctgttgtagaggatgtggcctggcacctgctgcacgagtcattgtttggatctgttgctgatgatcagaaacttatgatatgggacaccaggtccaataccacctccaagccgagtcacttggtggatgcgcacactgccgaagtcaactgcctctcattcaatccctacagcgaatttattctagccaccggctctgcggataaggtatgtgacagttttctggtgtctgtatgtcaggaaatgaaatccagggattcatcagttaagctataccagactcgtgggtccactattgaaaaaaatgtcttgtacgtggtgttacatggagatgctcatagggtccactggtctccacataatgaaactattctggcttcaagtggtactgaccgccgcctgaatgtgtgggatttaagtaaaattggggaagaacaatcagcagaagatgcagaagatgggcctccagaactcctgtttattcatggaggacacactgctaagatttcagattttagctggaaccccaatgagccttgggtcatttgctcagtgtctgaggataacatcatgcagatatggcaaatggctgaaaatatttacaatgatgaagagtcagatgtcacgacatccgaactggagggacaaggatcttaaacccaaagtacgagaaatgtttctgttgaatgtaatgctacatgaatgcttgatttatcaagcgccaaaaaggcattgtatagtaggaaatgtaagtggggtggcttatggcttctttatcctctgattctagcactttcaagtgagctgttgcgtactgtatcatattgtagctattagggaagagaagaatgttgcttaagaaagaacatcaccattgattttaaatacaagtagcagggtattgcctttgattcaactgttttaagtcctcattttctcaaactaagtgcttgctgttcccaaatatgcaagaataacttttacactttttccttccaacacttcttgattggctttgcagaaataaagttttaaaataaaacttgtgtttttttaaaagcttagtgggggggggcgggggagtctactttttgagtagaaatgggtaaaatggtacctttggactcctacagttaaggtcacatggataatgaaagaatacacagaagctgttaagtttatcatacatatttacttaatctatacagaatcaagtagataaaatcagattcacattagtgaaaaatctctacaaaatgtctttgaaaagcaaaacgagactgcctcttaacaattcgtatcctcatgaaagacgtgggctgtaaaaataaagcagtgtgtttagcacaaactagaagatatctgcatcatttttttcacagttatttccatctacagtctgaaagaggtagatttttctgcaacacctgagaattgaattgtgataaccaggtgtaataaaggcagttgcatacataactgaaaaatactggtctcaagaccaagaaatgtactcctaacaagtctgaggatgaaatggtccatattacccaagacccaagttttctctacaccttggagtccaccgccaatataaataatacacatcacgattccatgatggtgcaacaattgcaatttaagtgaattcaacatttaaacctttctgggccagcctagtagcattacagtgttctagaatatggtagatacggggtgcgctacaaagccacaacactgggctggtgaggtgatcactgtaggaagatgtccttctcagggggtcccatttgtttttattcacagggtaatgggaggaagggttctgaaaggacaacaaatgcatcccagacagaatccatatcctttcaacactataatagcatctagctaaaaatacaaagttggcggcca

SEQ ID NO: 282396 - DNA, 2888 bp, Homo sapiens
tatcgtcgacccacggcgctcggaaaccgcccgccgcgcgtcattggtctcggcgccggagccgttggctcccagacccgcctctccgcctcctctcacttttcccagggcggatgcgcctgcgctcagctgcctgggcgggctgggaggcgcgggttgaaaagtctcgttccaagtttggagagagagagaagagcgcctcagacctcggtacccgcgagcggggaggaggcaggaaagaaggacgcggcgtctggggagcacccaggcagcaagacggggcccgggctttcgacagtggggagtgtgacgcgcttgggaaaggcaggagcgccagcggtcgggctgctcttggctaacgagaggagtccgaggcggcggcgaggggcgaacgacccgacgcaagatggcgagtaaagagatgtttgaagatactgtggaggagcgtgtcatcaatgaagaatataaaatctggaagaagaatacaccgtttctatatgacctggttatgacccatgctcttcagtggcccagtcttaccgttcagtggcttcctgaagtgactaaacctgaaggaaaagattatgcccttcattggctagtgctggggactcatacgtctgatgagcagaatcatctggtggttgctcgagtacatattcccaatgatgatgcacagtttgatgcttcccattgtgacagtgacaagggtgaatttggtggctttggttctgtaacaggaaaaattgaatgtgaaattaaaatcaatcacgaaggagaagtaaaccgtgctcgttacatgccgcagaatcctcacatcattgctacaaaaacaccatcttctgatgtgttggtttttgactatacaaaacaccctgctaaaccagacccaagtggagaatgtaatcctgatctcagattaagaggtcaccagaaggaaggctatggtctctcctggaattcaaatttgagtggacatctcctaagtgcatctgatgaccatactgtttgtctgtgggatataaacgcaggaccaaaagaaggatgtggcctggcacctgctgcacgagtcattgtttggatctgttgctgatgatcagaaacttatgatatgggacaccaggtccaataccacctccaagccgagtcacttggtggatgcgcacactgccgaagtcaactgcctctcattcaatccctacagcgaatttattctagccaccggctctgcggataagaccgtagctttatgggatctgcgtaacttaaaattaaaactccataccttcgaatctcataaagatgaaattttccaggtccactggtctccacataatgaaactattctggcttcaagtggtactgaccgccgcctgaatgtgtgggatttaagtaaaattggggaagaacaatcagcagaagatgcagaagatgggcctccagaactcctgtttattcatggaggacacactgctaagatttcagattttagctggaaccccaatgagccttgggtcatttgctcagtgtctgaggataacatcatgcagatatggcaaatggctgaaaatatttacaatgatgaagagtcagatgtcacgacatccgaactggagggacaaggatcttaaacccaaagtacgagaaatgtttctgttgaatgtaatgctacatgaatgcttgatttatcaagcgccaaaaaggcattgtatagtaggaaatgtaagtggggtggcttatggcttctttatcctctgattctagcactttcaagtgagctgttgcgtactgtatcatattgtagctattagggaagagaagaatgttgcttaagaaagaacatcaccattgattttaaatacaagtagcagggtattgcctttgattcaactgttttaagtcctcattttctcaaactaagtgcttgctgttcccaaatatgcaagaataacttttacactttttccttccaacacttcttgattggctttgcagaaataaagttttaaaataaaacttgtgtttttttaaaagcttagtgggggggggcgggggagtctactttttgagtagaaatgggtaaaatggtacctttggactcctacagttaaggtcacatggataatgaaagaatacacagaagctgttaagtttatcatacatatttacttaatctatacagaatcaagtagataaaatcagattcacattagtgaaaaatctctacaaaatgtctttgaaaagcaaaacgagactgcctcttaacaattcgtatcctcatgaaagacgtgggctgtaaaaataaagcagtgtgtttagcacaaactagaagatatctgcatcatttttttcacagttatttccatctacagtctgaaagaggtagatttttctgcaacacctgagaattgaattgtgataaccaggtgtaataaaggcagttgcatacataactgaaaaatactggtctcaagaccaagaaatgtactcctaacaagtctgaggatgaaatggtccatattacccaagacccaagttttctctacaccttggagtccaccgccaatataaataatacacatcacgattccatgatggtgcaacaattgcaatttaagtgaattcaacatttaaacctttctgggccagcctagtagcattacagtgttctagaatatggtagatacggggtgcgctacaaagccacaacactgggctggtgaggtgatcactgtaggaagatgtccttctcagggggtcccatttgtttttattcacagggtaatgggaggaagggttctgaaaggacaacaaatgcatcccagacagaatccatatcctttcaacactataatagcatctagctaaaaatacaaagttggcggcca

SEQ ID NO: 282397 - DNA, 2892 bp, Homo sapiens
tatcgtcgacccacggcgctcggaaaccgcccgccgcgcgtcattggtctcggcgccggagccgttggctcccagacccgcctctccgcctcctctcacttttcccagggcggatgcgcctgcgctcagctgcctgggcgggctgggaggcgcgggttgaaaagtctcgttccaagtttggagagagagagaagagcgcctcagacctcggtacccgcgagcggggaggaggcaggaaagaaggacgcggcgtctggggagcacccaggcagcaagacggggcccgggctttcgacagtggggagtgtgacgcgcttgggaaaggcaggagcgccagcggtcgggctgctcttggctaacgagaggagtccgaggcggcggcgaggggcgaacgacccgacgcaagatggcgagtaaagagatgtttgaagatactgtggaggagcgtgtcatcaatgaagaatataaaatctggaagaagaatacaccgtttctatatgacctggttatgacccatgctcttcagtggcccagtcttaccgttcagtggcttcctgaagtgactaaacctgaaggaaaagattatgcccttcattggctagtgctggggactcatacgtctgatgagcagaatcatctggtggttgctcgagtacatattcccaatgatgatgcacagtttgatgcttcccattgtgacagtgacaagggtgaatttggtggctttggttctgtaacaggaaaaattgaatgtgaaattaaaatcaatcacgaaggagaagtaaaccgtgctcgttacatgccgcagaatcctcacatcattgctacaaaaacaccaacccaagtggagaatgtaatcctgatctcagattaagaggtcaccagaaggaaggctatggtctctcctggaattcaaatttgagtggacatctcctaagtgcatctgatgaccatactgtttgtctgtgggatataaacgcaggaccaaaagaaggcaaaattgtggatgctaaagccatctttactggccactcagctgttgtagaggatgtggcctggcacctgctgcacgagtcattgtttggatctgttgctgatgatcagaaacttatgatatgggacaccaggtccaataccacctccaagccgagtcacttggtggatgcgcacactgccgaagtcaactgcctctcattcaatccctacagcgaatttattctagccaccggctctgcggataagaccgtagctttatgggatctgcgtaacttaaaattaaaactccataccttcgaatctcataaagatgaaattttccaggtccactggtctccacataatgaaactattctggcttcaagtggtactgaccgccgcctgaatgtgtgggatttaagtaaaattggggaagaacaatcagcagaagatgcagaagatgggcctccagaactcctgtttattcatggaggacacactgctaagatttcagattttagctggaaccccaatgagccttgggtcatttgctcagtgtctgaggataacatcatgcagatatggcaaatggctgaaaatatttacaatgatgaagagtcagatgtcacgacatccgaactggagggacaaggatcttaaacccaaagtacgagaaatgtttctgttgaatgtaatgctacatgaatgcttgatttatcaagcgccaaaaaggcattgtatagtaggaaatgtaagtggggtggcttatggcttctttatcctctgattctagcactttcaagtgagctgttgcgtactgtatcatattgtagctattagggaagagaagaatgttgcttaagaaagaacatcaccattgattttaaatacaagtagcagggtattgcctttgattcaactgttttaagtcctcattttctcaaactaagtgcttgctgttcccaaatatgcaagaataacttttacactttttccttccaacacttcttgattggctttgcagaaataaagttttaaaataaaacttgtgtttttttaaaagcttagtgggggggggcgggggagtctactttttgagtagaaatgggtaaaatggtacctttggactcctacagttaaggtcacatggataatgaaagaatacacagaagctgttaagtttatcatacatatttacttaatctatacagaatcaagtagataaaatcagattcacattagtgaaaaatctctacaaaatgtctttgaaaagcaaaacgagactgcctcttaacaattcgtatcctcatgaaagacgtgggctgtaaaaataaagcagtgtgtttagcacaaactagaagatatctgcatcatttttttcacagttatttccatctacagtctgaaagaggtagatttttctgcaacacctgagaattgaattgtgataaccaggtgtaataaaggcagttgcatacataactgaaaaatactggtctcaagaccaagaaatgtactcctaacaagtctgaggatgaaatggtccatattacccaagacccaagttttctctacaccttggagtccaccgccaatataaataatacacatcacgattccatgatggtgcaacaattgcaatttaagtgaattcaacatttaaacctttctgggccagcctagtagcattacagtgttctagaatatggtagatacggggtgcgctacaaagccacaacactgggctggtgaggtgatcactgtaggaagatgtccttctcagggggtcccatttgtttttattcacagggtaatgggaggaagggttctgaaaggacaacaaatgcatcccagacagaatccatatcctttcaacactataatagcatctagctaaaaatacaaagttggcggcca

SEQ ID NO: 282398 - DNA, 3010 bp, Homo sapiens
tatcgtcgacccacggcgctcggaaaccgcccgccgcgcgtcattggtctcggcgccggagccgttggctcccagacccgcctctccgcctcctctcacttttcccagggcggatgcgcctgcgctcagctgcctgggcgggctgggaggcgcgggttgaaaagtctcgttccaagtttggagagagagagaagagcgcctcagacctcggtacccgcgagcggggaggaggcaggaaagaaggacgcggcgtctggggagcacccaggcagcaagacggggcccgggctttcgacagtggtgggcagtgtgtaccgctgctgtggtgcagatacggccaggcagtccgcccaatgcgcgtctggagcgtgcatcattgtgcttataacgacgtaagcgacgttccgcatgcgctgcgcaggctggatggtggccgcagaacctgaaccctggacgtcgatagggattgggccggagttacacaatggagatgtttgaagatactgtggaggagcgtgtcatcaatgaagaatataaaatctggaagaagaatacaccgtttctatatgacctggttatgacccatgctcttcagtggcccagtcttaccgttcagtggcttcctgaagtgactaaacctgaaggaaaagattatgcccttcattggctagtgctggggactcatacgtctgatgagcagaatcatctggtggttgctcgagtacatattcccaatgatgatgcacagtttgatgcttcccattgtgacagtgacaagggtgaatttggtggctttggttctgtaacaggaaaaattgaatgtgaaattaaaatcaatcacgaaggagaagtaaaccgtgctcgttacatgccgcagaatcctcacatcattgctacaaaaacaccatcttctgatgtgttggtttttgactatacaaaacaccctgctaaaccagacccaagtggagaatgtaatcctgatctcagattaagaggtcaccagaaggaaggctatggtctctcctggaattcaaatttgagtggacatctcctaagtgcatctgatgaccatactgtttgtctgtgggatataaacgcaggaccaaaagaaggcaaaattgtggatgctaaagccatctttactggccactcagctgttgtagaggatgtggcctggcacctgctgcacgagtcattgtttggatctgttgctgatgatcagaaacttatgatatgggacaccaggtccaataccacctccaagccgagtcacttggtggatgcgcacactgccgaagtcaactgcctctcattcaatccctacagcgaatttattctagccaccggctctgcggataagaccgtagctttatgggatctgcgtaacttaaaattaaaactccataccttcgaatctcataaagatgaaattttccaggtccactggtctccacataatgaaactattctggcttcaagtggtactgaccgccgcctgaatgtgtgggatttaagtaaaattggggaagaacaatcagcagaagatgcagaagatgggcctccagaactcctgtttattcatggaggacacactgctaagatttcagattttagctggaaccccaatgagccttgggtcatttgctcagtgtctgaggataacatcatgcagatatggcaaatggctgaaaatatttacaatgatgaagagtcagatgtcacgacatccgaactggagggacaaggatcttaaacccaaagtacgagaaatgtttctgttgaatgtaatgctacatgaatgcttgatttatcaagcgccaaaaaggcattgtatagtaggaaatgtaagtggggtggcttatggcttctttatcctctgattctagcactttcaagtgagctgttgcgtactgtatcatattgtagctattagggaagagaagaatgttgcttaagaaagaacatcaccattgattttaaatacaagtagcagggtattgcctttgattcaactgttttaagtcctcattttctcaaactaagtgcttgctgttcccaaatatgcaagaataacttttacactttttccttccaacacttcttgattggctttgcagaaataaagttttaaaataaaacttgtgtttttttaaaagcttagtgggggggggcgggggagtctactttttgagtagaaatgggtaaaatggtacctttggactcctacagttaaggtcacatggataatgaaagaatacacagaagctgttaagtttatcatacatatttacttaatctatacagaatcaagtagataaaatcagattcacattagtgaaaaatctctacaaaatgtctttgaaaagcaaaacgagactgcctcttaacaattcgtatcctcatgaaagacgtgggctgtaaaaataaagcagtgtgtttagcacaaactagaagatatctgcatcatttttttcacagttatttccatctacagtctgaaagaggtagatttttctgcaacacctgagaattgaattgtgataaccaggtgtaataaaggcagttgcatacataactgaaaaatactggtctcaagaccaagaaatgtactcctaacaagtctgaggatgaaatggtccatattacccaagacccaagttttctctacaccttggagtccaccgccaatataaataatacacatcacgattccatgatggtgcaacaattgcaatttaagtgaattcaacatttaaacctttctgggccagcctagtagcattacagtgttctagaatatggtagatacggggtgcgctacaaagccacaacactgggctggtgaggtgatcactgtaggaagatgtccttctcagggggtcccatttgtttttattcacagggtaatgggaggaagggttctgaaaggacaacaaatgcatcccagacagaatccatatcctttcaacactataatagcatctagctaaaaatacaaagttggcggcca

SEQ ID NO: 282399 - DNA, 1801 bp, Homo sapiens
tatcgtcgacccacggcgctcggaaaccgcccgccgcgcgtcattggtctcggcgccggagccgttggctcccagacccgcctctccgcctcctctcacttttcccagggcggatgcgcctgcgctcagctgcctgggcgggctgggaggcgcgggttgaaaagtctcgttccaagtttggagagagagagaagagcgcctcagacctcggtacccgcgagcggggaggaggcaggaaagaaggacgcggcgtctggggagcacccaggcagcaagacggggcccgggctttcgacagtggggagtgtgacgcgcttgggaaaggcaggagcgccagcggtcgggctgctcttggctaacgagaggagtccgaggcggcggcgaggggcgaacgacccgacgcaagatggcgagtaaagagatgtttgaagatactgtggaggagcgtgtcatcaatgaagaatataaaatctggaagaagaatacaccgtttctatatgacctggttatgacccatgctcttcagtggcccagtcttaccgttcagtggcttcctgaagtgactaaacctgaaggaaaagattatgcccttcattggctagtgctggggactcatacgtctgatgagcagaatcatctggtggttgctcgagtacatattcccaatgatgatgcacagtttgatgcttcccattgtgacagtgacaagggtgaatttggtggctttggttctgtaacaggaaaaattgaatgtgaaattaaaatcaatcacgaaggagaagtaaaccgtgctcgttacatgccgcagaatcctcacatcattgctacaaaaacaccatcttctgatgtgttggtttttgactatacaaaacaccctgctaaaccagacccaagtggagaatgtaatcctgatctcagattaagaggtcaccagaaggaaggctatggtctctcctggaattcaaatttgagtggacatctcctaagtgcatctgatgaccatactgtttgtctgtgggatataaacgcaggaccaaaagaaggcaaaattgtggatgctaaagccatctttactggccactcagctgttgtagaggatgtggcctggcacctgctgcacgagtcattgtttggatctgttgctgatgatcagaaacttatgatatgggacaccaggtccaataccacctccaagccgagtcacttggtggatgcgcacactgccgaagtcaactgcctctcattcaatccctacagcgaatttattctagccaccggctctgcggataagaccgtagctttatgggatctgcgtaacttaaaattaaaactccataccttcgaatctcataaagatgaaattttccaggtccactggtctccacataatgaaactattctggcttcaagtggtactgaccgccgcctgaatgtgtgggatttaagtaaaattggggaagaacaatcagcagaagatgcagaagatgggcctccagaactcctgtttattcatggaggacacactgctaagatttcagattttagctggaaccccaatgagccttgggtcatttgctcagtgtctgaggataacatcatgcagatatggcaaatggctgaaaatatttacaatgatgaagagtcagatgtcacgacatccgaactggagggacaaggatcttaaacccaaaattcttgggaggacagcgatcttcagccccacaagacattaagaactgacactccaccacaacctccaagaacacatcagtttcagaactcaaggcagcatgattcaggt

SEQ ID NO: 282400 - DNA, 2877 bp, Homo sapiens
tatcgtcgacccacggcgctcggaaaccgcccgccgcgcgtcattggtctcggcgccggagccgttggctcccagacccgcctctccgcctcctctcacttttcccagggcggatgcgcctgcgctcagctgcctgggcgggctgggaggcgcgggttgaaaagtctcgttccaagtttggagagagagagaagagcgcctcagacctcggtacccgcgagcggggaggaggcaggaaagaaggacgcggcgtctggggagcacccaggcagcaagacggggcccgggctttcgacagtggggagtgtgacgcgcttgggaaaggcaggagcgccagcggtcgggctgctcttggctaacgagaggagtccgaggcggcggcgaggggcgaacgacccgacgcaagatggcgagtaaagagatgtttgaagatactgtggaggagcgtgtcatcaatgaagaatataaaatctggaagaagaatacaccgtttctatatgacctggttatgacccatgctcttcagtggcccagtcttaccgttcagtggcttcctgaagtgactaaaatcatctggtggttgctcgagtacatattcccaatgatgatgcacagtttgatgcttcccattgtgacagtgacaagggtgaatttggtggctttggttctgtaacaggaaaaattgaatgtgaaattaaaatcaatcacgaaggagaagtaaaccgtgctcgttacatgccgcagaatcctcacatcattgctacaaaaacaccatcttctgatgtgttggtttttgactatacaaaacaccctgctaaaccagacccaagtggagaatgtaatcctgatctcagattaagaggtcaccagaaggaaggctatggtctctcctggaattcaaatttgagtggacatctcctaagtgcatctgatgaccatactgtttgtctgtgggatataaacgcaggaccaaaagaaggcaaaattgtggatgctaaagccatctttactggccactcagctgttgtagaggatgtggcctggcacctgctgcacgagtcattgtttggatctgttgctgatgatcagaaacttatgatatgggacaccaggtccaataccacctccaagccgagtcacttggtggatgcgcacactgccgaagtcaactgcctctcattcaatccctacagcgaatttattctagccaccggctctgcggataagaccgtagctttatgggatctgcgtaacttaaaattaaaactccataccttcgaatctcataaagatgaaattttccaggtccactggtctccacataatgaaactattctggcttcaagtggtactgaccgccgcctgaatgtgtgggatttaagtaaaattggggaagaacaatcagcagaagatgcagaagatgggcctccagaactcctgtttattcatggaggacacactgctaagatttcagattttagctggaaccccaatgagccttgggtcatttgctcagtgtctgaggataacatcatgcagatatggcaaatggctgaaaatatttacaatgatgaagagtcagatgtcacgacatccgaactggagggacaaggatcttaaacccaaagtacgagaaatgtttctgttgaatgtaatgctacatgaatgcttgatttatcaagcgccaaaaaggcattgtatagtaggaaatgtaagtggggtggcttatggcttctttatcctctgattctagcactttcaagtgagctgttgcgtactgtatcatattgtagctattagggaagagaagaatgttgcttaagaaagaacatcaccattgattttaaatacaagtagcagggtattgcctttgattcaactgttttaagtcctcattttctcaaactaagtgcttgctgttcccaaatatgcaagaataacttttacactttttccttccaacacttcttgattggctttgcagaaataaagttttaaaataaaacttgtgtttttttaaaagcttagtgggggggggcgggggagtctactttttgagtagaaatgggtaaaatggtacctttggactcctacagttaaggtcacatggataatgaaagaatacacagaagctgttaagtttatcatacatatttacttaatctatacagaatcaagtagataaaatcagattcacattagtgaaaaatctctacaaaatgtctttgaaaagcaaaacgagactgcctcttaacaattcgtatcctcatgaaagacgtgggctgtaaaaataaagcagtgtgtttagcacaaactagaagatatctgcatcatttttttcacagttatttccatctacagtctgaaagaggtagatttttctgcaacacctgagaattgaattgtgataaccaggtgtaataaaggcagttgcatacataactgaaaaatactggtctcaagaccaagaaatgtactcctaacaagtctgaggatgaaatggtccatattacccaagacccaagttttctctacaccttggagtccaccgccaatataaataatacacatcacgattccatgatggtgcaacaattgcaatttaagtgaattcaacatttaaacctttctgggccagcctagtagcattacagtgttctagaatatggtagatacggggtgcgctacaaagccacaacactgggctggtgaggtgatcactgtaggaagatgtccttctcagggggtcccatttgtttttattcacagggtaatgggaggaagggttctgaaaggacaacaaatgcatcccagacagaatccatatcctttcaacactataatagcatctagctaaaaatacaaagttggcggcca

SEQ ID NO: 282401 - DNA, 2865 bp, Homo sapiens
tatcgtcgacccacggcgctcggaaaccgcccgccgcgcgtcattggtctcggcgccggagccgttggctcccagacccgcctctccgcctcctctcacttttcccagggcggatgcgcctgcgctcagctgcctgggcgggctgggaggcgcgggttgaaaagtctcgttccaagtttggagagagagagaagagcgcctcagacctcggtacccgcgagcggggaggaggcaggaaagaaggacgcggcgtctggggagcacccaggcagcaagacggggcccgggctttcgacagtggggagtgtgacgcgcttgggaaaggcaggagcgccagcggtcgggctgctcttggctaacgagaggagtccgaggcggcggcgaggggcgaacgacccgacgcaagatggcgagtaaagagatgtttgaagatactgtggaggagcgtgtcatcaatgaagaatataaaatctggaagaagaatacaccgtttctatatgacctggttatgacccatgctcttcagtggcccagtcttaccgttcagtggcttcctgaagtgactaaacctgaaggaaaagattatgcccttcattggctagtgctggggactcatacgtctgatgagcagaatcatctggtggttgctcgagtacatattcccaatgatgatgcacagtttgatgcttcccattgtgacagtgacaagggtggaaaaattgaatgtgaaattaaaatcaatcacgaaggagaagtaaaccgtgctcgttacatgccgcagaatcctcacatcattgctacaaaaacaccaacccaagtggagaatgtaatcctgatctcagattaagaggtcaccagaaggaaggctatggtctctcctggaattcaaatttgagtggacatctcctaagtgcatctgatgaccatactgtttgtctgtgggatataaacgcaggaccaaaagaaggcaaaattgtggatgctaaagccatctttactggccactcagctgttgtagaggatgtggcctggcacctgctgcacgagtcattgtttggatctgttgctgatgatcagaaacttatgatatgggacaccaggtccaataccacctccaagccgagtcacttggtggatgcgcacactgccgaagtcaactgcctctcattcaatccctacagcgaatttattctagccaccggctctgcggataagaccgtagctttatgggatctgcgtaacttaaaattaaaactccataccttcgaatctcataaagatgaaattttccaggtccactggtctccacataatgaaactattctggcttcaagtggtactgaccgccgcctgaatgtgtgggatttaagtaaaattggggaagaacaatcagcagaagatgcagaagatgggcctccagaactcctgtttattcatggaggacacactgctaagatttcagattttagctggaaccccaatgagccttgggtcatttgctcagtgtctgaggataacatcatgcagatatggcaaatggctgaaaatatttacaatgatgaagagtcagatgtcacgacatccgaactggagggacaaggatcttaaacccaaagtacgagaaatgtttctgttgaatgtaatgctacatgaatgcttgatttatcaagcgccaaaaaggcattgtatagtaggaaatgtaagtggggtggcttatggcttctttatcctctgattctagcactttcaagtgagctgttgcgtactgtatcatattgtagctattagggaagagaagaatgttgcttaagaaagaacatcaccattgattttaaatacaagtagcagggtattgcctttgattcaactgttttaagtcctcattttctcaaactaagtgcttgctgttcccaaatatgcaagaataacttttacactttttccttccaacacttcttgattggctttgcagaaataaagttttaaaataaaacttgtgtttttttaaaagcttagtgggggggggcgggggagtctactttttgagtagaaatgggtaaaatggtacctttggactcctacagttaaggtcacatggataatgaaagaatacacagaagctgttaagtttatcatacatatttacttaatctatacagaatcaagtagataaaatcagattcacattagtgaaaaatctctacaaaatgtctttgaaaagcaaaacgagactgcctcttaacaattcgtatcctcatgaaagacgtgggctgtaaaaataaagcagtgtgtttagcacaaactagaagatatctgcatcatttttttcacagttatttccatctacagtctgaaagaggtagatttttctgcaacacctgagaattgaattgtgataaccaggtgtaataaaggcagttgcatacataactgaaaaatactggtctcaagaccaagaaatgtactcctaacaagtctgaggatgaaatggtccatattacccaagacccaagttttctctacaccttggagtccaccgccaatataaataatacacatcacgattccatgatggtgcaacaattgcaatttaagtgaattcaacatttaaacctttctgggccagcctagtagcattacagtgttctagaatatggtagatacggggtgcgctacaaagccacaacactgggctggtgaggtgatcactgtaggaagatgtccttctcagggggtcccatttgtttttattcacagggtaatgggaggaagggttctgaaaggacaacaaatgcatcccagacagaatccatatcctttcaacactataatagcatctagctaaaaatacaaagttggcggcca

SEQ ID NO: 282402 - DNA, 2450 bp, Homo sapiens
tgaggaccctgcgagctgcaggaattcgtcacgacgtttctatatgacctggttatgacccatgctcttcagtggcccagtcttaccgttcagtggcttcctgaagtgactaaacctgaaggaaaagattatgcccttcattggctagtgctggggactcatacgtctgatgagcagaatcatctggtggttgctcgagtacatattcccaatgatgatgcacagtttgatgcttcccattgtgacagtgacaagggtgaatttggtggctttggttctgtaacaggaaaaattgaatgtgaaattaaaatcaatcacgaaggagaagtaaaccgtgctcgttacatgccgcagaatcctcacatcattgctacaaaaacaccatcttctgatgtgttggtttttgactatacaaaacaccctgctaaaccagaggtcaccagaaggaaggctatggtctctcctggaattcaaatttgagtggacatctcctaagtgcatctgatgaccatactgtttgtctgtgggatataaacgcaggaccaaaagaaggcaaaattgtggatgctaaagccatctttactggccactcagctgttgtagaggatgtggcctggcacctgctgcacgagtcattgtttggatctgttgctgatgatcagaaacttatgatatgggacaccaggtccaataccacctccaagccgagtcacttggtggatgcgcacactgccgaagtcaactgcctctcattcaatccctacagcgaatttattctagccaccggctctgcggataagaccgtagctttatgggatctgcgtaacttaaaattaaaactccataccttcgaatctcataaagatgaaattttccaggtccactggtctccacataatgaaactattctggcttcaagtggtactgaccgccgcctgaatgtgtgggatttaagtaaaattggggaagaacaatcagcagaagatgcagaagatgggcctccagaactcctgtttattcatggaggacacactgctaagatttcagattttagctggaaccccaatgagccttgggtcatttgctcagtgtctgaggataacatcatgcagatatggcaaatggctgaaaatatttacaatgatgaagagtcagatgtcacgacatccgaactggagggacaaggatcttaaacccaaagtacgagaaatgtttctgttgaatgtaatgctacatgaatgcttgatttatcaagcgccaaaaaggcattgtatagtaggaaatgtaagtggggtggcttatggcttctttatcctctgattctagcactttcaagtgagctgttgcgtactgtatcatattgtagctattagggaagagaagaatgttgcttaagaaagaacatcaccattgattttaaatacaagtagcagggtattgcctttgattcaactgttttaagtcctcattttctcaaactaagtgcttgctgttcccaaatatgcaagaataacttttacactttttccttccaacacttcttgattggctttgcagaaataaagttttaaaataaaacttgtgtttttttaaaagcttagtgggggggggcgggggagtctactttttgagtagaaatgggtaaaatggtacctttggactcctacagttaaggtcacatggataatgaaagaatacacagaagctgttaagtttatcatacatatttacttaatctatacagaatcaagtagataaaatcagattcacattagtgaaaaatctctacaaaatgtctttgaaaagcaaaacgagactgcctcttaacaattcgtatcctcatgaaagacgtgggctgtaaaaataaagcagtgtgtttagcacaaactagaagatatctgcatcatttttttcacagttatttccatctacagtctgaaagaggtagatttttctgcaacacctgagaattgaattgtgataaccaggtgtaataaaggcagttgcatacataactgaaaaatactggtctcaagaccaagaaatgtactcctaacaagtctgaggatgaaatggtccatattacccaagacccaagttttctctacaccttggagtccaccgccaatataaataatacacatcacgattccatgatggtgcaacaattgcaatttaagtgaattcaacatttaaacctttctgggccagcctagtagcattacagtgttctagaatatggtagatacggggtgcgctacaaagccacaacactgggctggtgaggtgatcactgtaggaagatgtccttctcagggggtcccatttgtttttattcacagggtaatgggaggaagggttctgaaaggacaacaaatgcatcccagacagaatccatatcctttcaacactataatagcatctagctaaaaatacaaagttggcggcca

SEQ ID NO: 282403 - DNA, 933 bp, Homo sapiens
tatcgtcgacccacggcgctcggaaaccgcccgccgcgcgtcattggtctcggcgccggagccgttggctcccagacccgcctctccgcctcctctcacttttcccagggcggatgcgcctgcgctcagctgcctgggcgggctgggaggcgcgggttgaaaagtctcgttccaagtttggagagagagagaagagcgcctcagacctcggtacccgcgagcggggaggaggcaggaaagaaggacgcggcgtctggggagcacccaggcagcaagacggggcccgggctttcgacagtggggagtgtgacgcgcttgggaaaggcaggagcgccagcggtcgggctgctcttggctaacgagaggagtccgaggcggcggcgaggggcgaacgacccgacgcaagatggcgagtaaagagatgtttgaagatactgtggaggagcgtgtcatcaatgaagaatataaaatctggaagaagaatacaccgtttctatatgacctggttatgacccatgctcttcagtggcccagtcttaccgttcagtggcttcctgaagtgactaaacctgaaggaaaagattatgcccttcattggctagtgctggggactcatacgtctgatgagcagaatcatctggtggttgctcgagtacatattcccaatgatgatgcacagtttgatgcttcccattgtgacagtgacaagggtgaatttggtggctttggttctgtaacaggaaaaattgaatgtgaaattaaaatcaatcacgaaggagaagtaaaccgtgctcgttacatgccgcagaatcctcacatcattgctacaaaaacaccatcttctgatgtgttggtttttgactatacaaaacaccctgctaaaccagccagacccaagtggagaatggatcccggacttagattgagtcacct

SEQ ID NO: 282404 - DNA, 889 bp, Homo sapiens
tatcgtcgacccacggcgctcggaaaccgcccgccgcgcgtcattggtctcggcgccggagccgttggctcccagacccgcctctccgcctcctctcacttttcccagggcggatgcgcctgcgctcagctgcctgggcgggctgggaggcgcgggttgaaaagtctcgttccaagtttggagagagagagaagagcgcctcagacctcggtacccgcgagcggggaggaggcaggaaagaaggacgcggcgtctggggagcacccaggcagcaagacggggcccgggctttcgacagtggggagtgtgacgcgcttgggaaaggcaggagcgccagcggtcgggctgctcttggctaacgagaggagtccgaggcggcggcgaggggcgaacgacccgacgcaagatggcgagtaaagagatgtttgaagatactgtggaggagcgtgtcatcaatgaagaatataaaatctggaagaagaatacaccgtttctatatgacctggttatgacccatgctcttcagtggcccagtcttaccgttcagtggcttcctgaagtgactaaacctgaaggaaaagattatgcccttcattggctagtgctggggactcatacgtctgatgagcagaatcatctggtggttgctcgagtacatattcccaatgatgatgcacagtttgatgcttcccattgtgacagtgacaagggtggtaggtatatcatatattccaatattggtgtcaaagggaaaatgtctctttcaaagcatatgctattaaaactatactattagcttttggcccagtaatttaacttctaggactttattctacagaacttcccacccacacgtgcaccaaggatttcgtcgtaattgcagaattga

SEQ ID NO: 282405 - DNA, 391 bp, Homo sapiens
aagatttggcccgcaatcagtctgattggttgaggtactttcaatttccatctgcctgtcagaaaagagggagagttcgatgccaggacagtccagatccaacggctacagaacccatgaggatgggctataaaatatgtgaagaattaaagaagcacagtgaaatacacattattgatacgcagctgaaacatgggatacaatccatctatgaataactggtacagtccagactccatttttgcagtctacaccaaccaaacaagcaaaattaatgtatttaaataaagaagaaaatataaaagcaacagaataaaaagcttcttatatgaatactggccaaaaaaacctgttgtcactggtaatgtaaacatcaaaaaaaaaccacaca

SEQ ID NO: 282406 - DNA, 405 bp, Homo sapiens
ttgtgaatctaaggtacagaaaacactttatacttcagtcacccaaaacaacagcttgtggtctcctccaattacacacagagggagagttcgatgccaggacagtccagatccaacggctacagaacccatgaggatgggctataaaatatgtgaagaattaaagaagcacagtgaaatacacattattgatacgcagctgaaacatgggatacaatccatctatgaataactggtacagtccagactccatttttgcagtctacaccaaccaaacaagcaaaattaatgtatttaaataaagaagaaaatataaaagcaacagaataaaaagcttcttatatgaatactggccaaaaaaacctgttgtcactggtaatgtaaacatcaaaaaaaaaccacaca

SEQ ID NO: 282407 - DNA, 459 bp, Homo sapiens
gcttagcttgggctcagaggcctgacaatcacctgatgggttcttcttgctcactgcacagacaaaaccaattcactgagatcatactattgcagtagagaaagagttcaattaacagtcctagcaggagcatggatgttattactcaaatcagtctctccaagaactcagaggctagggttttaatggataatttgattctggccccaagcctgtttcctgctgaggcccagcccaccacagtggaattcatccagcagctgggacggttggcaccatctgctccagaaagctgggatgatgaaaatgtgtggctgcagaactgaacagtggccaaacttgtggggtagtaaagccaaggcaacgtatatagctacctgcactttggaactgtgctgacttataattatagaatgtttacaacttgaagggacaataaaaacccttgactggtttatt

SEQ ID NO: 282408 - DNA, 510 bp, Homo sapiens
gcaaacctgtgccagcctgcaatgtgaagccctaaagctttggcatctctgctgggctctgagccaggtgcctggcagggccccaagaactactttcagcaaatcttcaggcaacgccgaaggtggtgagaagcaggaggcagagcgagaaggcaggaatggaggggccccctagaggcaccagcttaagaggaaggttcacgagctcaggaggacttgggggagtgctgcaagatggtgcgagaaatggagaaggaagacagaacggggaagaatggctcctccgttgacggagatgcggaatggctccagagtcagagggcttcctgagtcttccggagtctaactgaagatccggttgcagcagaagcccatttctttcagccttgcccaccatgcctgccacccgacctccacctgtcccccgagtggggggctccctggctgtaagacagctcccaccagccattttcttctccagagaaagcattttcagttctttcaatcttt

SEQ ID NO: 282409 - DNA, 1074 bp, Homo sapiens
tcaaaacccagacagaaacgtccaacaaactcccagtccaggagcgctgcaaaaccaacgccagtctagtttggggtctctataatcctgctcctttggctgccagccatctccataaaaaaagaatttgaaaggcttccattctttcagagacctgtttcccgggactggctgcaagggagagatgcactgaccttctgccaggtatagaactattgaatggtacagtttgagatcttcgaaaccatcaggactgatcattttctggctactttctacataggaatcctagagttccttggagaggatatgaaggttattctcaggccatgcagatgggcaagaaaggatgtgcgtccatggttcctcttcaaatccaaccaaaacagccttgcttccgttggctttatataatactgcaactcttgataatctgatttaacacaaatttcctcattgagtttctcctcatgaagaaacggcctcagtgaggtaaatcggaatgcacaggagcacatagcaggttagtgcagaccagaaatcaaacccaggctttctgactgctcaatagaccacaatctaccatgctaccatggaaactttaaaacagatgaaagtaaaaacaaacaaacaacaacttaaaaaaacaaaaacaaaaacaaaagcaaaacccagagcctctctaggaaataccaacgtgcttttgccaagtggggtttctctcacttcataagagcagtaaacactaaaccaagggaatgtgaatttagaggttagaaaagataaccagagatttggccgtgcgtggggctcatgcctgtaatcccagcactttgggaggctgaggctggtgggtgcctgaggtcaggagtttgagaccagctggccaacatagtgaaaccctgtctctactaaaaatacaaaattagctgggtgtggtggcgtgcacctgtaatcccagctactagggaggctgaggcaggagaatcgcttgaactggagaggtggaggttgcagtgagccgagatggtgccattgcactccagcccgggcaagaagattgaaattccatct

SEQ ID NO: 282410 - DNA, 1320 bp, Homo sapiens
aacagtttgttagatgaatgaaaggattgggaggaagaatgaaaagatacctttcctttagacatttctaagcttgcaaatgcacaggcaatgagaaccacctctcttcactccctggcatttgaggctttttacgtaaaaatttaaactaatgattatattagaaatttttaaatgtttaaaaaaagtatgttgtaaaattgaggaaatatagtattttgagagtccaaacacgttcatgcagttgattgagcctaagtgttgggttaatcctagtaagtgattgatctttttaggtaggtaagggaataaacagaagatcagaaaagaagaggtactactattacattttaagtttccaaatatactactaagtgtctctagtaaaacttaactcattgaagaagaaaatagtctgactctaaaaaaagagtgtgtgttcctgagaaagactaaaccagttattttctcctttcatgtttgaatgaataaccatcagcaagggagagatgcactgaccttctgccaggaatcctagagttccttggagaggatatgaaggttattctcaggccatgcagatgggcaagaaaggatgtgcgtccatggttcctcttcaaatccaaccaaaacagccttgcttccgttggctttatataatactgcaactcttgataatctgatttaacacaaatttcctcattgagtttctcctcatgaagaaacggcctcagtgaggtaaatcggaatgcacaggagcacatagcaggttagtgcagaccagaaatcaaacccaggctttctgactgctcaatagaccacaatctaccatgctaccatggaaactttaaaacagatgaaagtaaaaacaaacaaacaacaacttaaaaaaacaaaaacaaaaacaaaagcaaaacccagagcctctctaggaaataccaacgtgcttttgccaagtggggtttctctcacttcataagagcagtaaacactaaaccaagggaatgtgaatttagaggttagaaaagataaccagagatttggccgtgcgtggggctcatgcctgtaatcccagcactttgggaggctgaggctggtgggtgcctgaggtcaggagtttgagaccagctggccaacatagtgaaaccctgtctctactaaaaatacaaaattagctgggtgtggtggcgtgcacctgtaatcccagctactagggaggctgaggcaggagaatcgcttgaactggagaggtggaggttgcagtgagccgagatggtgccattgcactccagcccgggcaagaagattgaaattccatct

SEQ ID NO: 282411 - DNA, 1063 bp, Homo sapiens
aggcgagcccatagtggctatcagcaagtgcctgccaacccagtttcagacactcatccttcatccttcctgctgccgccctgggttcctctataaacctcgctgctcagctgcccccacactccctgctggcacagcacaccagatggacatgttggatgggctgtgcccttccccccaactgtggccccccaaggaggtccccaagatctccaccccagtcatgctgatggggccttcagcaccagctctgtcctgggtcgatggaggaaagcccagccccatggccttgcccttcctggggcatcccacatcgtgccgccgacactgtgtgcccctgggggagtgaaggggccaggggcctttgacccccagcttaggctggctatgccctgagcctgccaacccagtttcagaggcctagcacttgctgatagccactatgggctcgactctgtgctaagtggtatctggggacacagaggcaatcagacctggttccccccctggtggagttcacagtctagtggaggacagactgttaacaaatggcaacacggcttcatgcgtgccaggatcagagtacaaatcaggctgtggcaggcctcactggtaatggaaaagtgagggaggcttcacggaggaggtgtcataggagctcagcctcaacggctgctcggaaccctccgagtccacaagatgggaagcaagtccacaagatgggaagcgtgctctatacagaagggagggcctgtgcacaggctcaggtgtcagtaagccagaaatccagggacagagtcaggatggctggagcatggactgcggggggaacagagaagggggtggagcaaaaggttgggaccatgtgaccagggaagatgctggatggaggattctgaacctcatttgtggacggtcaggagtcaacaaagggaggagagaggactcactggtcaagagtgtcggctgtgacacaagggccatcatccctgaatgcccaccatgtgccccgcactgtgctgatgatgataataataactacgtccattgagcactctccaaa

SEQ ID NO: 282412 - DNA, 2688 bp, Homo sapiens
ggcaggctggtactggtctggaatatattggatctcatcccctcccccggccctgggtgtcccgtgacgaggcagcgcggagccgccgcgggccgggcccatcccgccgcagcggcccggggccgagcaggggctaggcggggagggagcggcgcccagcggggcccggagcgtggccagaatggtgctggaaggaaaccctgaagtggggtccccccgaacctcagacctccagcaccgggggaacaagggctcttgcgttctctcctctcccggtgaagatgcgcagccaggcgaggagcccatcaagtatggtgaactcatcgtcctgggctacaatggttgtctggcaagtggggacaagggccgccggcgaagccgcctggcactgagccgccggtcgcacgccaacggggtgaagccagacgtcatgcaccacatctccacgccgctcgtctccaaggcactgagtaaccgtggtcagcacagcatctcgtatacactgtcccggagccactcggtcatagtggagtatacacatgatagcgacacagacatgttccagattggccgctccacagagaacatgattgacttcgtggtaacagacacgtcccctggaggaggggctgccgagggcccttctgcccagagcaccatctcccgctatgcctgccgcatcctctgtgaccgccggccaccctatactgcccgcatctatgccgctggcttcgacgcctctagcaacatcttccttggagagcgagcggccaaatggcggaccccagatggcctgatggatggactgaccaccaatggagtcctggtgatgcacccggcaggcggcttctccgaggactcagccccgggtgtctggcgggagatctcggtctgtgggaatgtgtacacattgcgggacagccgctcagcccagcagcggggcaagctggtggaaaacgagtccaacgtgctgcaggacggctctctcatcgacctgtgtggggccacactgctgtggcgcacaccggcggggctgctgcgggctcccacactgaagcaactggaggcccagcggcaggaggcaaatgcagcgcggccccagtgccccgtgggcctcagcactctggccttccccagcccagcccgtggccgcacagcgcccgacaaacagcagccctgggtctacgtccgctgcgggcacgtccatggctaccacggctggggctgccggcgggagcggggcccccaggagcgcgaatgtcctctctgccgccttgtggggccttatgtgcctctatggcttggccaggaggccggcctctgcctggaccctgggccgcctagccatgcctttgcaccttgcggccacgtctgctctgagaagactgcccgctactgggcccagacaccactgccccacggcacccatgctttccatgccgcctgccccttttgcggggcctggcttaccggcgagcatggctgcgtccgcctcattttccagggcccgctggattaggctccctggggccccctgctgctgtgcccacctgcccacccaggtccccacctcctgcagcccagagggagctctgcatgtgggacactccctgctggcacagcacaccagatggacatgttggatgggctgtgcccttccccccaactgtggccccccaaggaggtccccaagatctccaccccagtcatgctgatggggccttcagcaccagctctgtcctgggtcgatggaggaaagcccagccccatggccttgcccttcctggggcatcccacatcgtgccgccgacactgtgtgcccctgggggagtgaaggggccaggggcctttgacccccagcttaggctggctatgccctgagcctgccaacccagtttcagacactcatccttcatccttcctgctgccgccctgggttcctctataaacctcgctgctcagctgcccccacaagtcccacatgccccgcatgcgtgcaatgcctccagcccccaagtgagtggtgggtgggtggcaggctgggcctagcacttgctgatagccactatgggctcgactctgtgctaagtggtatctggggacacagaggcaatcagacctggttccccccctggtggagttcacagtctagtggaggacagactgttaacaaatggcaacacggcttcatgcgtgccaggatcagagtacaaatcaggctgtggcaggcctcactggtaatggaaaagtgagggaggcttcacggaggaggtgtcataggagctcagcctcaacggctgctcggaaccctccgagtccacaagatgggaagcaagtccacaagatgggaagcgtgctctatacagaagggagggcctgtgcacaggctcaggtgtcagtaagccagaaatccagggacagagtcaggatggctggagcatggactgcggggggaacagagaagggggtggagcaaaaggttgggaccatgtgaccagggaagatgctggatggaggattctgaacctcatttgtggacggtcaggagtcaacaaagggaggagagaggactcactggtcaagagtgtcggctgtgacacaagggccatcatccctgaatgcccaccatgtgccccgcactgtgctgatgatgataataataactacgtccattgagcactctccaaa

SEQ ID NO: 282413 - DNA, 2242 bp, Homo sapiens
ggcaggctggtactggtctggaatatattggatctcatcccctcccccggccctgggtgtcccgtgacgaggcagcgcggagccgccgcgggccgggcccatcccgccgcagcggcccggggccgagcaggggctaggcggggagggagcggcgcccagcggggcccggagcgtggccagaatggtgctggaaggaaaccctgaagtggggtccccccgaacctcagacctccagcaccgggggaacaagggctcttgcgttctctcctctcccggtgaagatgcgcagccaggcgaggagcccatcaagtatggtgaactcatcgtcctgggatgctgtgaggaaggaggtgaggaaaccgaggctcagagaggggaagtgactggcccaagggcacacagctgctacaatggttgtctggcaagtggggacaagggccgccggcgaagccgcctggcactgagccgccggtcgcacgccaacggggtgaagccagacgtcatgcaccacatctccacgccgctcgtctccaaggcactgagtaaccgtggtcagcacagcatctcgtatacactgtcccggagccactcggtcatagtggagtatacacatgatagcgacacagacatgttccagattggccgctccacagagaacatgattgacttcgtggtaacagacacgtcccctggaggaggggctgccgagggcccttctgcccagagcaccatctcccgctatgcctgccgcatcctctgtgaccgccggccaccctatactgcccgcatctatgccgctggcttcgacgcctctagcaacatcttccttggagagcgagcggccaaatggcggaccccagatggcctgatggatggactgaccaccaatggagtcctggtgatgcacccggcaggcggcttctccgaggactcagccccgggtgtctggcgggagatctcggtctgtgggaatgtgtacacattgcgggacagccgctcagcccagcagcggggcaagctggtggaaaacgagtccaacgtgctgcaggacggctctctcatcgacctgtgtggggccacactgctgtggcgcacaccggcggggctgctgcgggctcccacactgaagcaactggaggcccagcggcaggaggcaaatgcagcgcggccccagtgccccgtgggcctcagcactctggccttccccagcccagcccgtggccgcacagcgcccgacaaacagcagccctgggtctacgtccgctgcgggcacgtccatggctaccacggctggggctgccggcgggagcggggcccccaggagcgcgaatgtcctctctgccgccttgtggggccttatgtgcctctatggcttggccaggaggccggcctctgcctggaccctgggccgcctagccatgcctttgcaccttgcggccacgtctgctctgagaagactgcccgctactgggcccagacaccactgccccacggcacccatgctttccatgccgcctgccccttttgcggggcctggcttaccggcgagcatggctgcgtccgcctcattttccagggcccgctggattaggctccctggggccccctgctgctgtgcccacctgcccacccaggtccccacctcctgcagcccagagggagctctgcatgtgggacactccctgctggcacagcacaccagatggacatgttggatgggctgtgcccttccccccaactgtggccccccaaggaggtccccaagatctccaccccagtcatgctgatggggccttcagcaccagctctgtcctgggtcgatggaggaaagcccagccccatggccttgcccttcctggggcatcccacatcgtgccgccgacactgtgtgcccctgggggagtgaaggggccaggggcctttgacccccagcttaggctggctatgccctgagcctgccaacccagtttcagacactcatccttcatccttcctgctgccgccctgggttcctctataaacctcgctgctcagctgcccccacaagtcccacatgccccgcatgcgtgcaatgcctccagcccccaagtgagtggtgggtgggtggcaggctgtccgctagacgataggcttattgcatacccactatggtcttcaggaatatagcgacattgatactgggtaccctagactgtaactagctgaacctgtggtgaggctaatgagccactagggggagcca

SEQ ID NO: 282414 - DNA, 1726 bp, Homo sapiens
ggcaggctggtactggtctggaatatattggatctcatcccctcccccggccctgggtgtcccgtgacgaggcagcgcggagccgccgcgggccgggcccatcccgccgcagcggcccggggccgagcaggggctaggcggggagggagcggcgcccagcggggcccggagcgtggccagcccgtggccgcacagcgcccgacaaacagcagccctgggtctacgtccgctgcgggcacgtccatggctaccacggctggggctgccggcgggagcggggcccccaggagcgcgaatgtcctctctgccgccttgtggggccttatgtgcctctatggcttggccaggaggccggcctctgcctggaccctgggccgcctagccatgcctttgcaccttgcggccacgtctgctctgagaagactgcccgctactgggcccagacaccactgccccacggcacccatgctttccatgccgcctgccccttttgcggggcctggcttaccggcgagcatggctgcgtccgcctcattttccagggcccgctggattaggctccctggggccccctgctgctgtgcccacctgcccacccaggtccccacctcctgcagcccagagggagctctgcatgtgggacactccctgctggcacagcacaccagatggacatgttggatgggctgtgcccttccccccaactgtggccccccaaggaggtccccaagatctccaccccagtcatgctgatggggccttcagcaccagctctgtcctgggtcgatggaggaaagcccagccccatggccttgcccttcctggggcatcccacatcgtgccgccgacactgtgtgcccctgggggagtgaaggggccaggggcctttgacccccagcttaggctggctatgccctgagcctgccaacccagtttcagacactcatccttcatccttcctgctgccgccctgggttcctctataaacctcgctgctcagctgcccccacaagtcccacatgccccgcatgcgtgcaatgcctccagcccccaagtgagtggtgggtgggtggcaggctgggcctagcacttgctgatagccactatgggctcgactctgtgctaagtggtatctggggacacagaggcaatcagacctggttccccccctggtggagttcacagtctagtggaggacagactgttaacaaatggcaacacggcttcatgcgtgccaggatcagagtacaaatcaggctgtggcaggcctcactggtaatggaaaagtgagggaggcttcacggaggaggtgtcataggagctcagcctcaacggctgctcggaaccctccgagtccacaagatgggaagcaagtccacaagatgggaagcgtgctctatacagaagggagggcctgtgcacaggctcaggtgtcagtaagccagaaatccagggacagagtcaggatggctggagcatggactgcggggggaacagagaagggggtggagcaaaaggttgggaccatgtgaccagggaagatgctggatggaggattctgaacctcatttgtggacggtcaggagtcaacaaagggaggagagaggactcactggtcaagagtgtcggctgtgacacaagggccatcatccctgaatgcccaccatgtgccccgcactgtgctgatgatgataataataactacgtccattgagcactctccaaa

SEQ ID NO: 282415 - DNA, 152 bp, Homo sapiens
cacttatcatggctgcacaccctggcaagtgacttttttctccccaccaggcactgagtaaccgtggtcagcacagcatctcgtatacactgtcccggagccactcggtcatagtggagtatacacatgatagcgacacagacatgttccag

SEQ ID NO: 282416 - DNA, 473 bp, Homo sapiens
tcagcaaatcaacttgtatttattgaatggggcgatccctagtgctgtgggggcaacagagaaggagaagctgctccaggccacggcttcttggacttggagaccccacctgggagcctagagggcctatggagttggtgctgccccttctccagggcctggcagcctccttttttggtgaccttgcatacagagcagctgctggtactctgggagggaaggcccatgagagtcccctatgtacatacagtccctgcttgctctccctgtcctcacagattggccgctccacagagaacatgattgacttcgtggtaacagacacgtcccctggaggaggggctgccgagggcccttctgcccagagcaccatctcccgctatgcctgccgcatcctctgtgaccgccggccaccctatactgcccgcatctatgccgctggcttcgacgcctctagcaacatcttccttgga

SEQ ID NO: 282417 - DNA, 1040 bp, Homo sapiens
  misc_feature (12)..(12): n is a, c, g, or t
  misc_feature (18)..(18): n is a, c, g, or t
  misc_feature (30)..(30): n is a, c, g, or t
  misc_feature (227)..(228): n is a, c, g, or t
  misc_feature (233)..(233): n is a, c, g, or t
aggttcacaagnatgggnagcaagtcacangatgggaagcgtgctctatacagaagggagggcctgtgcacaggctcaggtgtcagtaagccagaaatccaggacagagtcaggatggctggagcatggactgcggggggaacagagaagggggtggagcaaaaggttgggaccatgtgaccagggaagatgctggatggaggattctgaacctcatttgtggacgnncaggngcctgccaacccagtttcagacactcatccttcatccttcctgctgccgccctgggttcctctataaacctcgctgctcagctgcccccacaagtcccacatgccccgcatgcgtgcaatgcctccagcccccaagtgagtggtgggtgggtggcaggctgggcctagcacttgctgatagccactatgggctcgactctgtgctaagtggtatctggggacacagaggcaatcagacctggttccccccctggtggagttcacagtctagtggaggacagactgttaacaaatggcaacacggcttcatgcgtgccaggatcagagtacaaatcaggctgtggcaggcctcactggtaatggaaaagtgagggaggcttcacggaggaggtgtcataggagctcagcctcaacggctgctcggaaccctccgagtccacaagatgggaagcaagtccacaagatgggaagcgtgctctatacagaagggagggcctgtgcacaggctcaggtgtcagtaagccagaaatccagggacagagtcaggatggctggagcatggactgcggggggaacagagaagggggtggagcaaaaggttgggaccatgtgaccagggaagatgctggatggaggattctgaacctcatttgtggacggtcaggagtcaacaaagggaggagagaggactcactggtcaagagtgtcggctgtgacacaagggccatcatccctgaatgcccaccatgtgccccgcactgtgctgatgatgataataataactacgtccattgagcactctccaaa

SEQ ID NO: 282418 - DNA, 2760 bp, Homo sapiens
ggcaggctggtactggtctggaatatattggatctcatcccctcccccggccctgggtgtcccgtgacgaggcagcgcggagccgccgcgggccgggcccatcccgccgcagcggcccggggccgagcaggggctaggcggggagggagcggcgcccagcggggcccggagcgtggccagaatggtgctggaaggaaaccctgaagtggggtccccccgaacctcagacctccagcaccgggggaacaagggctcttgcgttctctcctctcccggtgaagatgcgcagccaggcgaggagcccatcaagtatggtgaactcatcgtcctgggatgctgtgaggaaggaggtgaggaaaccgaggctcagagaggggaagtgactggcccaagggcacacagctgctacaatggttgtctggcaagtggggacaagggccgccggcgaagccgcctggcactgagccgccggtcgcacgccaacggggtgaagccagacgtcatgcaccacatctccacgccgctcgtctccaaggcactgagtaaccgtggtcagcacagcatctcgtatacactgtcccggagccactcggtcatagtggagtatacacatgatagcgacacagacatgttccagattggccgctccacagagaacatgattgacttcgtggtaacagacacgtcccctggaggaggggctgccgagggcccttctgcccagagcaccatctcccgctatgcctgccgcatcctctgtgaccgccggccaccctatactgcccgcatctatgccgctggcttcgacgcctctagcaacatcttccttggagagcgagcggccaaatggcggaccccagatggcctgatggatggactgaccaccaatggagtcctggtgatgcacccggcaggcggcttctccgaggactcagccccgggtgtctggcgggagatctcggtctgtgggaatgtgtacacattgcgggacagccgctcagcccagcagcggggcaagctggtggaaaacgagtccaacgtgctgcaggacggctctctcatcgacctgtgtggggccacactgctgtggcgcacaccggcggggctgctgcgggctcccacactgaagcaactggaggcccagcggcaggaggcaaatgcagcgcggccccagtgccccgtgggcctcagcactctggccttccccagcccagcccgtggccgcacagcgcccgacaaacagcagccctgggtctacgtccgctgcgggcacgtccatggctaccacggctggggctgccggcgggagcggggcccccaggagcgcgaatgtcctctctgccgccttgtggggccttatgtgcctctatggcttggccaggaggccggcctctgcctggaccctgggccgcctagccatgcctttgcaccttgcggccacgtctgctctgagaagactgcccgctactgggcccagacaccactgccccacggcacccatgctttccatgccgcctgccccttttgcggggcctggcttaccggcgagcatggctgcgtccgcctcattttccagggcccgctggattaggctccctggggccccctgctgctgtgcccacctgcccacccaggtccccacctcctgcagcccagagggagctctgcatgtgggacactccctgctggcacagcacaccagatggacatgttggatgggctgtgcccttccccccaactgtggccccccaaggaggtccccaagatctccaccccagtcatgctgatggggccttcagcaccagctctgtcctgggtcgatggaggaaagcccagccccatggccttgcccttcctggggcatcccacatcgtgccgccgacactgtgtgcccctgggggagtgaaggggccaggggcctttgacccccagcttaggctggctatgccctgagcctgccaacccagtttcagacactcatccttcatccttcctgctgccgccctgggttcctctataaacctcgctgctcagctgcccccacaagtcccacatgccccgcatgcgtgcaatgcctccagcccccaagtgagtggtgggtgggtggcaggctgggcctagcacttgctgatagccactatgggctcgactctgtgctaagtggtatctggggacacagaggcaatcagacctggttccccccctggtggagttcacagtctagtggaggacagactgttaacaaatggcaacacggcttcatgcgtgccaggatcagagtacaaatcaggctgtggcaggcctcactggtaatggaaaagtgagggaggcttcacggaggaggtgtcataggagctcagcctcaacggctgctcggaaccctccgagtccacaagatgggaagcaagtccacaagatgggaagcgtgctctatacagaagggagggcctgtgcacaggctcaggtgtcagtaagccagaaatccagggacagagtcaggatggctggagcatggactgcggggggaacagagaagggggtggagcaaaaggttgggaccatgtgaccagggaagatgctggatggaggattctgaacctcatttgtggacggtcaggagtcaacaaagggaggagagaggactcactggtcaagagtgtcggctgtgacacaagggccatcatccctgaatgcccaccatgtgccccgcactgtgctgatgatgataataataactacgtccattgagcactctccaaa

SEQ ID NO: 282419 - DNA, 2571 bp, Homo sapiens
cgcacaccccctttgcctttagcattttcctcctctcctctaattgcgtggcgtccccagatgaatggtgctggaaggaaaccctgaagtggggtccccccgaacctcagacctccagcaccgggggaacaagggctcttgcgttctctcctctcccggtgaagatgcgcagccaggcgaggagcccatcaagtatggtgaactcatcgtcctgggctacaatggttgtctggcaagtggggacaagggccgccggcgaagccgcctggcactgagccgccggtcgcacgccaacggggtgaagccagacgtcatgcaccacatctccacgccgctcgtctccaaggcactgagtaaccgtggtcagcacagcatctcgtatacactgtcccggagccactcggtcatagtggagtatacacatgatagcgacacagacatgttccagattggccgctccacagagaacatgattgacttcgtggtaacagacacgtcccctggaggaggggctgccgagggcccttctgcccagagcaccatctcccgctatgcctgccgcatcctctgtgaccgccggccaccctatactgcccgcatctatgccgctggcttcgacgcctctagcaacatcttccttggagagcgagcggccaaatggcggaccccagatggcctgatggatggactgaccaccaatggagtcctggtgatgcacccggcaggcggcttctccgaggactcagccccgggtgtctggcgggagatctcggtctgtgggaatgtgtacacattgcgggacagccgctcagcccagcagcggggcaagctggtggaaaacgagtccaacgtgctgcaggacggctctctcatcgacctgtgtggggccacactgctgtggcgcacaccggcggggctgctgcgggctcccacactgaagcaactggaggcccagcggcaggaggcaaatgcagcgcggccccagtgccccgtgggcctcagcactctggccttccccagcccagcccgtggccgcacagcgcccgacaaacagcagccctgggtctacgtccgctgcgggcacgtccatggctaccacggctggggctgccggcgggagcggggcccccaggagcgcgaatgtcctctctgccgccttgtggggccttatgtgcctctatggcttggccaggaggccggcctctgcctggaccctgggccgcctagccatgcctttgcaccttgcggccacgtctgctctgagaagactgcccgctactgggcccagacaccactgccccacggcacccatgctttccatgccgcctgccccttttgcggggcctggcttaccggcgagcatggctgcgtccgcctcattttccagggcccgctggattaggctccctggggccccctgctgctgtgcccacctgcccacccaggtccccacctcctgcagcccagagggagctctgcatgtgggacactccctgctggcacagcacaccagatggacatgttggatgggctgtgcccttccccccaactgtggccccccaaggaggtccccaagatctccaccccagtcatgctgatggggccttcagcaccagctctgtcctgggtcgatggaggaaagcccagccccatggccttgcccttcctggggcatcccacatcgtgccgccgacactgtgtgcccctgggggagtgaaggggccaggggcctttgacccccagcttaggctggctatgccctgagcctgccaacccagtttcagacactcatccttcatccttcctgctgccgccctgggttcctctataaacctcgctgctcagctgcccccacaagtcccacatgccccgcatgcgtgcaatgcctccagcccccaagtgagtggtgggtgggtggcaggctgggcctagcacttgctgatagccactatgggctcgactctgtgctaagtggtatctggggacacagaggcaatcagacctggttccccccctggtggagttcacagtctagtggaggacagactgttaacaaatggcaacacggcttcatgcgtgccaggatcagagtacaaatcaggctgtggcaggcctcactggtaatggaaaagtgagggaggcttcacggaggaggtgtcataggagctcagcctcaacggctgctcggaaccctccgagtccacaagatgggaagcaagtccacaagatgggaagcgtgctctatacagaagggagggcctgtgcacaggctcaggtgtcagtaagccagaaatccagggacagagtcaggatggctggagcatggactgcggggggaacagagaagggggtggagcaaaaggttgggaccatgtgaccagggaagatgctggatggaggattctgaacctcatttgtggacggtcaggagtcaacaaagggaggagagaggactcactggtcaagagtgtcggctgtgacacaagggccatcatccctgaatgcccaccatgtgccccgcactgtgctgatgatgataataataactacgtccattgagcactctccaaa

SEQ ID NO: 282420 - DNA, 1203 bp, Homo sapiens
aggcgagcccatagtggctatcagcaagtgcctgccaacccagtttcagacactcatccttcatccttcctgctgccgccctgggttcctctataaacctcgctgctcagctgcccccacactccctgctggcacagcacaccagatggacatgttggatgggctgtgcccttccccccaactgtggccccccaaggaggtccccaagatctccaccccagtcatgctgatggggccttcagcaccagctctgtcctgggtcgatggaggaaagcccagccccatggccttgcccttcctggggcatcccacatcgtgccgccgacactgtgtgcccctgggggagtgaaggggccaggggcctttgacccccagcttaggctggctatgccctgagcctgccaacccagtttcagacactcatccttcatccttcctgctgccgccctgggttcctctataaacctcgctgctcagctgcccccacaagtcccacatgccccgcatgcgtgcaatgcctccagcccccaagtgagtggtgggtgggtggcaggctgggcctagcacttgctgatagccactatgggctcgactctgtgctaagtggtatctggggacacagaggcaatcagacctggttccccccctggtggagttcacagtctagtggaggacagactgttaacaaatggcaacacggcttcatgcgtgccaggatcagagtacaaatcaggctgtggcaggcctcactggtaatggaaaagtgagggaggcttcacggaggaggtgtcataggagctcagcctcaacggctgctcggaaccctccgagtccacaagatgggaagcaagtccacaagatgggaagcgtgctctatacagaagggagggcctgtgcacaggctcaggtgtcagtaagccagaaatccagggacagagtcaggatggctggagcatggactgcggggggaacagagaagggggtggagcaaaaggttgggaccatgtgaccagggaagatgctggatggaggattctgaacctcatttgtggacggtcaggagtcaacaaagggaggagagaggactcactggtcaagagtgtcggctgtgacacaagggccatcatccctgaatgcccaccatgtgccccgcactgtgctgatgatgataataataactacgtccattgagcactctccaaa

SEQ ID NO: 282421 - DNA, 432 bp, Homo sapiens
caggcggcttctccgaggactcagccccgggtgtctggcgggagatctcggtctgtgggaatgtgtacacattgcgggacagccgctcagcccagcagcggggcaagctggtaggtggcccgctccattccccacccctatccttgccaggccctcacaagctgcccatccccctgcccaagccaggagatgatctccagtccttctgccccagggagccccaacaggctccatatcagggaatcccaggcccagggggttcttagcatgagccacttgtcccacagacaggcagacagaccagggtccccaagcatagcatgcataccactggaggtccagggggtgatgcgatcaaggcacacacagacatactgtgcagtcccaggtggcttcaaggctgctggcagcttaaaaaaaatcacaccttct

SEQ ID NO: 282422 - DNA, 734 bp, Homo sapiens
caggcctcatctccgcaccgggagctcgggctcacactgtagaatgaagtgccctgtagaatattcgatccccacggccagctagggaccccgccacagtggagcgcctcgccacctccatccgccctcctgtggtccgggactaggtgcagttacaggacccgcctaagaagagcactagaaggacgcagtgggtggatgtccgagttcgagcggctggatgtcgcgcggtggcaacaagtagctcggaaaaggggtattgagagtccactgcgagctgcttcctgcttgcggccaatggggacgtgcggcagagcagttagaaacaagaagggagaagactaaagagagactccttacttctggcaacgagatacacaaaaggggttgcgaacatccaaaagggtcttgctccaggtagcaagtatgaattcctccatgacatctgggctacaagaaatgccaagcttggccactgctcacagtacccgggactcataagaatccatgcatgccttctcccatctaagacatgcgggatccatgccaggaagaatgaggcacatgccagaggatatgggggctgggaggagggcactaacccagagtgatttgaaatgaggtagcattcaatggcccctggcaaaaaagagaaagaagacgagggagctgaaaaatgtcttcatgggagaaaggagggagggaagacagggagggaggggtggtccaactgg

SEQ ID NO: 282423 - DNA, 811 bp, Homo sapiens
caggcctcatctccgcaccgggagctcgggctcacactgtagaatgaagtgccctgtagaatattcgatccccacggccagctagggaccccgccacagtggagcgcctcgccacctccatccgccctcctgtggtccgggactaggtgcagttacaggacccgcctaagaagagcactagaaggacgcagtgggtggatgtccgagttcgagcggctggatgtcgcgcggtggcaacaagtagctcggaaaaggggtattgagagtccactgcgagctgcttcctgcttgcggccaatggggacgtgcggcagagcagttagaaacaagaagggagaagactaaagagagactccttacttctggcaacgagatacacaaaaggggttgcgaacatccaaaagggtcttgctccaggtgaggctcgaactcacaacctcggcattgctctgcatgtactgctgtataagtaccgcgcgctaaccgattgcgccactggagctctgctgaatgggcctcgtgatggctctatcagggtgcgctggcgcccgcggcgggcctcggcagagcatgcgcgttcgcggcgcgagcccaggcccgagccttctgcgacttcgcgccgagctcccggctgttccgcagccgatcgagccggggaagcctgcgagtgtcgccctcggggatggaggggccgcctagcctggccgtgacgggagggccacgggggccctgcaaagagcgcagcgcgcagccccgggcctcgccgtaggaggagcggccccagcgcctgcggccggaaaaccccctctat

SEQ ID NO: 282424 - DNA, 737 bp, Homo sapiens
gttgtgccaccttatactcccaccagtaatgttgagagttccagttgcttgacatcctcaccaatgcttcatattgtcagtctttaattttagccattctaccgggtgtgtaatagtatctcattgtatatttaatttgcatgttaatttgcatttatacaatgcaaattaatttgcatatatttaatttgagcatgtcattaattgctcaactaatgatgttaagcaatattttgtgtgtgcttattggtcatctgtgtatctttataaaatggttgctcaaaccttttgcccattgttttgttgttttttgtttgtcttcttttttgtttttgggttttggtctttttttttaattaagttgtaggagtggctaaatgcctcgggtaagtcattgattttctgtttctttatctgtaggtagcaagtatgaattcctccatgacatctgggctacaagaaatgccaagcttggccactgctcacagtacccgggactcataagaatccatgcatgccttctcccatctaagacatgcgggatccatgccaggaagaatgaggcacatgccagaggatatgggggctgggaggagggcactaacccagagtgatttgaaatgaggtagcattcaatggcccctggcaaaaaagagaaagaagacgagggagctgaaaaatgtcttcatgggagaaaggagggagggaagacagggagggaggggtggtccaactgg

SEQ ID NO: 282425 - DNA, 362 bp, Homo sapiens
acaagggcctggaatgtgagcaggagcaagggagtgctcgggaaatggaaacaatgaatgaatcaatcagtcaatcagtggcacgttccagagccatagcctctgttctattcatctccagtctcctggggtggaagtgtccagcacagagactgccacactgcaagacgaaggggctggacacacggaagagagaggcggaaccctgcaccccctcaacctcagccctactgagtctccaatggggccacgcttctgagtgcacctccccgtgtcatctgtaatgtgagggggaaccaggcttgatatggcattcccaatccagggcctctggaccccttgagatgcataaaaatagtgat

SEQ ID NO: 282426 - DNA, 777 bp, Homo sapiens
tgtgtaactggtggtaaaactttattattcaagtttagatgtaacagacatctttgctgcctgaagattgtttgcataagaaatacaccaagaacatgtttgtgagtagaaatgaacatgcactatgaaaacaaaataaaataaaacgaaaaaatttcatgtgttgtaagaacagaactattatagccaacattctagtattcaaatcaggactacaaattgaattctttttcttagcaacatgaaatcattccatatgaaagacattttctgctggtgaatattgctgtaagttaaattttacattggcattttgagatgttcccccctcatgcctcccccaaagttttccatgtggttgtcaaatagtccgccctaaggaatttggcgtttattattgtgatatttgccttattggtagccattaagaaactatgattttatcagcctagtaatagttttgcatcttcatagtcaacactattggctgcctagttgatatttacagctcgtctttaagaaaaatgaccccaacctttcctggcctttgggaactgacagtttaaataacccccttggccacataataatacttggcactcctatggtgcctttcaaccaaggatctcaaagtgctttacaaacaagtactacattaccattattattattaataatattattaatacatatatttttcaattttacagctgaggaacctgaggcacaaaaagaaaaagtgatatgctgcagttcatatgttgggaaaaaaaaaaa

SEQ ID NO: 282427 - DNA, 215 bp, Homo sapiens
ctctttctaggttttggagtgtttttgtcatgaagaagtgactaacattgtcaaaagctttttgtgaatctactgagataatcacgtgaattttgccctttattccattgaagccgtaagttgagagaagaaccagctgttgcttcatctgaggaacctgaggcacaaaaagaaaaagtgatatgctgcagttcatatgttgggaaaaaaaaaaa

SEQ ID NO: 282428 - DNA, 2630 bp, Homo sapiens
gggtctgggagtcccttagtgaaagagactgggagtcacgtactaggtaagctggcacccggggccagggcacttgaaatcttccaatcaaggtgactagtactactccaggttatgcaggaatcatgcctaaaatctcatcatccttcaacccacccataggacagacctggaggtggtatatactatctgcaaactaatataccacttttccttttatttgattttctgtcctccctattctgcccaatccgcatggtttgaaattgagcttatggcccattgtcttctttctctccttgagtttctcccaagctggttttagcttggtgggacaaatcagagaaaggtatagtgtgtgtacttctcctttgtgtttgcatgtttgcacttatgggtgcttacacccactctatgcagagacatcccagcctcgaccacaggatctggagccacctctaccctgagctgaaagaggaattttttttttttttttgagacagtctcactctgtcacccaggctggagtgcagtggcatgatctcagctcactgcaacctccgcctgccgggttcaactgcaacctccacctcccgggttcaaatgattctcctgcctcagcctcccgagtagctgggattacaggcgtccaccaccatgcctggctaattttgtatttttagtagagatggggtttcaccatggtggccaggctggtctcgaactcctgacctcaagtgatccacccacctcgccctcccaaagtgctgggattacagatgtgagacaccgtgcctggtggaaagaggaatcttggctgggaccctagcatcgtctagggaacagagaggttgtgattaagaggtatctggatgaaatcttggtgaaaggaagcacttgtttttaatcccaccatggtttttcatatgcatacaaccatcctcaaccatctgcccatcagcagagctcctagaaaggcaggacataccactggatatccccttctggcagttctaaaccagccttgcccggaagtgggagccttatctatgtggcccagactcaaataaggcctcttggaaatactctcacccttcccctttgtttaccctccaacccctgtgaatcttgtgaacagagggttgaagaaacatgttctgcacatgtgctagtacctgtgaatcttgatgtcccctggaccctctgtgtaagtacatcatggcagaattgctctagatccttcggagctgcagggtgagttaccagccactcaaggtggaggcaaacatgccaggctgcacaagggaccaggagcagctctgcctcttcccttgcaggaggaaatgagaacggggctatacttaggtacttcatcattcctttaactcaccatctgtacctgacatattttgttttgtctcacctaaagtcatatcagacttcctacctgatcactctcattgtgactgattctgccatccaaatgtctaatttttcacagctagagaaactaagagataggaagacaagggccatgaactaagaaggggaactcctctcctgagaattattgaccctctatcagctacaagtctaagaatttctaacttctgcttcatcttctaccatttctaatagcttccccaccacctcagccttctctccccagtttcttattccatgccactggctggtaacatctaactcctagttttcagatgatcctaaactgctgctgttaatggcaaagcttcatgacatcctcaccaccagagggaaaagggtctcatgctcttctttctcttggggtatatggtgaccccagctgaaatttcttggcccctaaatttcgctaggctcccctggggccctgtggtgcagtgtgttggaagactgtcatgtagtgcatgtgacaatttgctaataacaattttgtcttttttttccctccctcatccccattcccccactccctttccttttaactcttttgattttctcacctctggggaaaccacaaggagctggtaagaagcctgacctttcatctgctttttaacggggtgtgctatgatgagcagttgtttctctgtcctttagactctactaaatctttcattcatctattcagtcccacacccagccttttcctatctcacaagtcactgtaattatactgcccccaactcatgccccagatcttcaagacactgctggagtaggtgctactggaggactagagtgtgctcccgggccacagccttggagaggctccagaggatgccagcgccaggtagcccaactggcccaggacactctcccacagcaggaatgaaaatgctctctgtccctgtgactgtccagaacctctgagactcaccgtctatgtgttgaccctcttctactccccgctttccctacttaggaacgtaaataagaaagtaggttccatctgcatagtgcccgcccataataagggcttaacaaatggtagctatgattaatttttttcctgggtctgtaggttatgcctcccattcctcttttttaagaggattaaacaaaagaggatgggtgggattggcctggattggggctttcacagggagaagtggcatattcctgagtat

SEQ ID NO: 282429 - DNA, 406 bp, Homo sapiens
agtgctgggattacagacgtgagccaccatgcccagcctcagtcaccttcttaacccctgacaacagcattctccgccttaatcttcagtttattttcaactttaattttatcagtttttaaagtaggtaatgtatgcacagggaacagaggattcaagggtaagtagtgaaaaatctgcctcccacctctgcctaccaccactcagttctcttccctagagacaaccaatatggatagactcttgtggaacctttcagggggtctccagatttctttttggtttttgagacagagtctcactctttcccccaggctggagtgcagtggcacaatcttgtctcactgcaacctttgcctccccggttcaagcgattctcctgcctcagcctcccaagtagctggaa

SEQ ID NO: 282430 - DNA, 360 bp, Homo sapiens
cctgatttttctactatccctttaaaacaattttagcaggaagtaaaatcttctaaaacaggaatggaccaggaaagtgcacgggctgtagccctttcctcctcaatctgggaagatctctttgcacttcagacactcccaggttaattggggcaataggcttgcttggagatttttcttaaaatgtttggaaaactaattcccaaatagaattccacccacacacacaccatgccaactcatgtccaatactgctttgcctggtgtggggaaggattgggtcttgtcccccaacacagcttctgtggctgactgtaatactgtacaactgtttctgaccattaaatgctgttgtactct

SEQ ID NO: 282431 - DNA, 536 bp, Homo sapiens
aaaaaactaaaatcactatagtaaaaaccttcaatgcatcaggcgtcaaaccccagagaaatatctgcaatttgtcatctatttgcaatgactcagcattttttagaggtgagatcatgtttcaatatgataaagaaagcactgttccccagaatcaacatataacgaatggcaccttaactggagtcccgtctctaagtgaattaaaacgctcagagctcaacaaaaccctgcaaaccctaagtgagacttactttataatgtgtgctacagcagaggcccaaagcacattaaattgtacattcacaacaaaactgaataatacaatgaatgcatgtgctgtaatagctgctttggaaagagtaaagattcgaccaatggaacactgctgctgttctgtcaggaagcagcactaggatatagatattcattcgtcataacaggcaatctaagccactctatactacaagagatggatttaaattgtaacctgttcttaccaaagaactaaataaaaaatgagtacagagccagag

SEQ ID NO: 282432 - DNA, 2668 bp, Homo sapiens
cggacgcgtgggtcgcggacgcgtggccttctgctgtgctactgctgtcgcgagacttcctgctcatctgccgctccctttgccgccgccttagcccgggacccgaacccagcctctcccctacccgaacaccggccccggctccaccgaggcccgggtcccccagcccgtctcgccgccgccatggcggaccctaaatacgccgaccttcccggcattgccaggaatgagccagatgtttatgaaactagcgacctacctgaggatgatcaagcggagttcgatgcggaggagctgacaagcacaagtgtggaacacatcattgtcaatcctaatgctgcctatgacaagttcaaggacaagagagtggggacaaagggacttgatttctcagatcgtattggaaaaaccaagaggacaggatatgaatctggagaatatgagatgcttggagagggtctgggagtgaaggagacaccccagcaaaagtaccagcgcctactgcatgaggtccaagagctgacaactgaagttgaaaaaatcaagacgacagtgaaggagtcagccacagaggagaagctgacccctgtgttgctggctaaacagctggcagccctgaagcagcagctggttgcttcccacctggagaagctgctgggaccagatgctgcaatcaaccttaccgaccccgatggcgccctggctaagcgcctactactgcagctggaagcaacaaagaacagcaaagggggatcagggggaaaaaccactgggacccccccagatagcagccttgtcacttatgaactacattctcggcctgagcaggacaagttctctcaagctgccaaagtcgcagaacttgaaaagcgcctgacagagctggagacagctgtacgttgtgatcaggatgctcagaatcccctttctgcaggtctacagggagcctgtctcatggagactgtagagctgttgcaagcaaaggtgagcgccctagaccttgcagttttggatcaagtggaggctcggctacagagtgtcctgggaaaggtgaacgagattgccaagcataaagcctctgtagaagatgcagatacacaaagcaaggtgcaccagctatatgaaactatacagcgctggagccccattgcctccaccctccctgagctggtgcagagacttgtcaccatcaagcagctgcacgagcaagccatgcagtttggtcagctcctgacacacttggataccacccagcagatgattgctaattccttgaaggacaataccaccctcttgacccaggtgcagacaaccatgcgtgaaaacctggccacagttgaggggaactttgccagcattgatgaacggatgaagaagctgggaaagtgagcacatttgggagctggagaacaggggttatccctacccctgtgaactctgttaacagcttacatagggtttcccctttactataactctagcatccccatcccatttgacactgggggcaagggttcttcttgcatgtggggtttatacccctcccctgatgaatacagagtggtagctaggggttggttatcatcagaaggtggtctcccctcaggcctgggggataaggacgtgggcccagccacatgccaactcatgtccaatactgctttgcctggtgtggggaaggattgggtcttgtcccccaacacagcttctgtggctgactgtaatactgtacaactgtttctgaccattaaatgctgttgtactctgtgtggcctctgctgtgtttcctggggaggaagcagcactaggatatagatattcattcgtcataacaggcaatctaagccactctatactacaagagatggatttaaattgtaacctgttcttaccaaagaactaaataaaaaatgagtacagagccagagccagagtttcaaaatattctcatctgttaaattaagagtgtctcccatagaaaagcagtggaggccccacagggcaagtacaaaacagaattaaaactcccaagggtcttgtctttacaaaagaaaaggcaggaggcagcccctggacagctggtcatgctggccgctccggttggaccacgttgcataatcctcagtcgcatcatcacaacgtctctgagcgttttgatggggggagaaggggcagtgtagtgtgtatgggaggagaggcccagagggctctctttgcccccttacccccttttttatatcccagaggaaagtcgggggaacctggctacaccttgaaatgaggctatgtgtttcaaacctggggacggggtaagagaggatctgtgctttgagcaacctgagccagaggcagaggggtgttggaggggtaaggggaggatgcatgatgcttattgctttgtacctttcactgggaaggagggcagcagccaacagtagctcacaggtttgtaaactgagcctgttggctttaagaagggaggcaatgaaatcgaattaaatataaaagagtcatttgtgcaaaaataacttaaacaaataaaagacctggggaagggggtgttccccttagcgcctggtggggaaagggccatataccatcccccccaggccttttcagtgacatggcttcgggggggcggcaagggtggtgggggggggtgaacttc

SEQ ID NO: 282433 - DNA, 2394 bp, Homo sapiens
cggacgcgtgggtcgcggacgcgtggccttctgctgtgctactgctgtcgcgagacttcctgctcatctgccgctccctttgccgccgccttagcccgggacccgaacccagcctctcccctacccgaacaccggccccggctccaccgaggcccgggtcccccagcccgtctcgccgccgccatggcggaccctaaatacgccgaccttcccggcattgccaggaatgagccagatgtttatgaaactagcgacctacctgaggatgatcaagcggagttcgatgcggaggagctgacaagcacaagtgtggaacacatcattgtcaatcctaatgctgcctatgacaagttcaaggacaagagagtggggacaaagggacttgatttctcagatcgtattggaaaaaccaagaggacaggatatgaatctggagaatatgagatgcttggagagggtctgggagtgaaggagacaccccagcaaaagtaccagcgcctactgcatgaggtccaagagctgacaactgaagttgaaaaaatcaagacgacagtgaaggagtcagccacagaggagaagctgacccctgtgttgctggctaaacagctggcagccctgaagcagcagctggttgcttcccacctggagaagctgctgggaccagatgctgcaatcaaccttaccgaccccgatggcgccctggctaagcgcctactactgcagctggaagcaacaaagaacagcaaagggggatcagggggaaaaaccactgggacccccccagatagcagccttgtcacttatgaactacattctcggcctgagcaggacaagttctctcaagctgccaaagtcgcagaacttgaaaagcgcctgacagagctggagacagctgtacgttgtgatcaggatgctcagaatcccctttctgcaggtctacagggagcctgtctcatggagactgtagagctgttgcaagcaaaggtgagcgccctagaccttgcagttttggatcaagtggaggctcggctacagagtgtcctgggaaaggtgaacgagattgccaagcataaagcctctgtagaagatgcagatacacaaagcaaggtgcaccagctatatgaaactatacagcgctggagccccattgcctccaccctccctgagctggtgcagagacttgtcaccatcaagcagctgcacgagcaagccatgcagtttggtcagctcctgacacacttggataccacccagcagatgattgctaattccttgaaggacaataccaccctcttgacccaggtgcagacaaccatgcgtgaaaacctggccacagttgaggggaactttgccagcattgatgaacggatgaagaagctgggaaagtgagcacatttgggagctggagaacaggggttatccctacccctgtgaactctgttaacagcttacatagggtttcccctttactataactctagcatccccatcccatttgacactgggggcaagggttcttcttgcatgtggggtttatacccctcccctgatgaatacagagtggtagctaggggttggttatcatcagaaggtggtctcccctcaggcctgggggataaggacgtgggcccagccacatgccaactcatgtccaatactgctttgcctggtgtggggaaggattgggtcttgtcccccaacacagcttctgtggctgactgtaatactgtacaactgtttctgaccattaaatgctgttgtactctgtgtggcctctgctgtgtttcctggggaggaagcagcactaggatatagatattcattcgtcataacaggcaatctaagccactctatactacaagagatggatttaaattgtaacctgttcttaccaaagaactaaataaaaaatgagtacagagccagagccagagtttcaaaatattctcatctgttaaattaagagtgtctcccatagaaaagcagtggaggccccacagggcaagtacaaaacagaattaaaactcccaagggtcttgtctttacaaaagaaaaggcaggaggcagcccctggacagctggtcatgctggccgctccggttggaccacgttgcataatcctcagtcgcatcatcacaacgtctctgagcgttttgatggggggagaaggggcagtgtagtgtgtatgggaggagaggcccagagggctctctttgcccccttacccccttttttatatcccagaggaaagtcgggggaacctggctacaccttgaaatgaggctatgtgtttcaaacctggggacggggtaagagaggatctgtgctttgagcaacctgagccagaggcagaggggtgttggaggggctgcctcctgcctttttttttgtaaa

SEQ ID NO: 282434 - DNA, 2294 bp, Homo sapiens
cggacgcgtgggtcgcggacgcgtggccttctgctgtgctactgctgtcgcgagacttcctgctcatctgccgctccctttgccgccgccttagcccgggacccgaacccagcctctcccctacccgaacaccggccccggctccaccgaggcccgggtcccccagcccgtctcgccgccgccatggcggaccctaaatacgccgaccttcccggcattgccaggaatgagccagatgtttatgaaactagcgacctacctgaggatgatcaagcggagttcgatgcggaggagctgacaagcacaagtgtggaacacatcattgtcaatcctaatgctgcctatgacaagttcaaggacaagagagtggggacaaagggacttgatttctcagatcgtattggaaaaaccaagaggacaggatatgaatctggagaatatgagatgcttggagagggtctgggagtgaaggagacaccccagcaaaagtaccagcgcctactgcatgaggtccaagagctgacaactgaagttgaaaaaatcaagacgacagtgaaggagtcagccacagaggagaagctgacccctgtgttgctggctaaacagctggcagccctgaagcagcagctggttgcttcccacctggagaagctgctgggaccagatgctgcaatcaaccttaccgaccccgatggcgccctggctaagcgcctactactgcagctggaagcaacaaagaacagcaaagggggatcagggggaaaaaccactgggacccccccagatagcagccttgtcacttatgaactacattctcggcctgagcaggacaagttctctcaagctgccaaagtcgcagaacttgaaaagcgcctgacagagctggagacagctgtacgttgtgatcaggatgctcagaatcccctttctgcaggtctacagggagcctgtctcatggagactgtagagctgttgcaagcaaaggtgagcgccctagaccttgcagttttggatcaagtggaggctcggctacagagtgtcctgggaaaggtgaacgagattgccaagcataaagcctctgtagaagatgcagatacacaaagcaaggtgcaccagctatatgaaactatacagcgctggagccccattgcctccaccctccctgagctggtgcagagacttgtcaccatcaagcagctgcacgagcaagccatgcagtttggtcagctcctgacacacttggataccacccagcagatgattgctaattccttgaaggacaataccaccctcttgacccaggtgcagacaaccatgcgtgaaaacctggccacagttgaggggaactttgccagcattgatgaacggatgaagaagctgggaaagtgagcacatttgggagctggagaacaggggttatccctacccctgtgaactctgttaacagcttacatagggtttcccctttactataactctagcatccccatcccatttgacactgggggcaagggttcttcttgcatgtggggtttatacccctcccctgatgaatacagagtggtagctaggggttggttatcatcagaaggtggtctcccctcaggcctgggggataaggacgtgggcccagccacatgccaactcatgtccaatactgctttgcctggtgtggggaaggattgggtcttgtcccccaacacagcttctgtggctgactgtaatactgtacaactgtttctgaccattaaatgctgttgtactctgtgtggcctctgctgtgtttcctggggaggaagcagcactaggatatagatattcattcgtcataacaggcaatctaagccactctatactacaagagatggatttaaattgtaacctgttcttaccaaagaactaaataaaaaatgagtacagagccagagccagagtttcaaaatattctcatctgttaaattaagagtgtctcccatagaaaagcagtggaggccccacagggcaagtacaaaacagaattaaaactcccaagggtcttgtctttacaaaagaaaaggcaggaggcagcccctggacagctggtcatgctggccgctccggttggaccacgttgcataatcctcagtcgcatcatcacaacgtctctctttcactgggaaggagggcagcagccaacagtagctcacaggtttgtaaactgagcctgttggccactgtccacaggtgcaggtggctggcaggggctcccaaggctcagcactcagctctccccaatcagggtcagatccagcttc

SEQ ID NO: 282435 - DNA, 2229 bp, Homo sapiens
cggacgcgtgggtcgcggacgcgtggccttctgctgtgctactgctgtcgcgagacttcctgctcatctgccgctccctttgccgccgccttagcccgggacccgaacccagcctctcccctacccgaacaccggccccggctccaccgaggcccgggtcccccagcccgtctcgccgccgccatggcggaccctaaatacgccgaccttcccggcattgccaggaatgagccagatgtttatgaaactagcgacctacctgaggatgatcaagcggagttcgatgcggaggagctgacaagcacaagtgtggaacacatcattgtcaatcctaatgctgcctatgacaagttcaaggacaagagagtggggacaaagggacttgatttctcagatcgtattggaaaaaccaagaggacaggatatgaatctggagaatatgagatgcttggagagggtctgggagtgaaggagacaccccagcaaaagtaccagcgcctactgcatgaggtccaagagctgacaactgaagttgaaaaaatcaagacgacagtgaaggagtcagccacagaggagaagctgacccctgtgttgctggctaaacagctggcagccctgaagcagcagctggttgcttcccacctggagaagctgctgggaccagatgctgcaatcaaccttaccgaccccgatggcgccctggctaagcgcctactactgcagctggaagcaacaaagaacagcaaagggggatcagggggaaaaaccactgggacccccccagatagcagccttgtcacttatgaactacattctcggcctgagcaggacaagttctctcaagctgccaaagtcgcagaacttgaaaagcgcctgacagagctggagacagctgtacgttgtgatcaggatgctcagaatcccctttctgcaggtctacagggagcctgtctcatggagactgtagagctgttgcaagcaaaggtgagcgccctagaccttgcagttttggatcaagtggaggctcggctacagagtgtcctgggaaaggtgaacgagattgccaagcataaagcctctgtagaagatgcagatacacaaagcaaggtgcaccagctatatgaaactatacagcgctggagccccattgcctccaccctccctgagctggtgcagagacttgtcaccatcaagcagctgcacgagcaagccatgcagtttggtcagctcctgacacacttggataccacccagcagatgattgctaattccttgaaggacaataccaccctcttgacccaggtgcagacaaccatgcgtgaaaacctggccacagttgaggggaactttgccagcattgatgaacggatgaagaagctgggaaagtgagcacatttgggagctggagaacaggggttatccctacccctgtgaactctgttaacagcttacatagggtttcccctttactataactctagcatccccatcccatttgacactgggggcaagggttcttcttgcatgtggggtttatacccctcccctgatgaatacagagtggtagctaggggttggttatcatcagaaggtggtctcccctcaggcctgggggataaggacgtgggcccagccacatgccaactcatgtccaatactgctttgcctggtgtggggaaggattgggtcttgtcccccaacacagcttctgtggctgactgtaatactgtacaactgtttctgaccattaaatgctgttgtactctgtgtggcctctgctgtgtttcctggggaggaagcagcactaggatatagatattcattcgtcataacaggcaatctaagccactctatactacaagagatggatttaaattgtaacctgttcttaccaaagaactaaataaaaaatgagtacagagccagagccagagtttcaaaatattctcatctgttaaattaagagtgtctcccatagaaaagcagtggaggccccacagggcaagtacaaaacagaattaaaactcccaagggtcttgtctttacaaaagaaaaggcaggaggcagcccctggacagctggtcatgctggccgctccggttggaccacgttgcataatcctcagtcgcatcatcacaacgtctctcactgtccacaggtgcaggtggctggcaggggctcccaaggctcagcactcagctctccccaatcagggtcagatccagcttc

SEQ ID NO: 282436 - DNA, 2411 bp, Homo sapiens
cggacgcgtgggtcgcggacgcgtggccttctgctgtgctactgctgtcgcgagacttcctgctcatctgccgctccctttgccgccgccttagcccgggacccgaacccagcctctcccctacccgaacaccggccccggctccaccgaggcccgggtcccccagcccgtctcgccgccgccatggcggaccctaaatacgccgaccttcccggcattgccaggaatgagccagatgtttatgaaactagcgacctacctgaggatgatcaagcggagttcgatgcggaggagctgacaagcacaagtgtggaacacatcattgtcaatcctaatgctgcctatgacaagttcaaggacaagagagtggggacaaagggacttgatttctcagatcgtattggaaaaaccaagaggacaggatatgaatctggagaatatgagatgcttggagagggtctgggagtgaaggagacaccccagcaaaagtaccagcgcctactgcatgaggtccaagagctgacaactgaagttgaaaaaatcaagacgacagtgaaggagtcagccacagaggagaagctgacccctgtgttgctggctaaacagctggcagccctgaagcagcagctggttgcttcccacctggagaagctgctgggaccagatgctgcaatcaaccttaccgaccccgatggcgccctggctaagcgcctactactgcagctggaagcaacaaagaacagcaaagggggatcagggggaaaaaccactgggacccccccagatagcagccttgtcacttatgaactacattctcggcctgagcaggacaagttctctcaagctgccaaagtcgcagaacttgaaaagcgcctgacagagctggagacagctgtacgttgtgatcaggatgctcagaatcccctttctgcaggtctacagggagcctgtctcatggagactgtagagctgttgcaagcaaaggtgagcgccctagaccttgcagttttggatcaagtggaggctcggctacagagtgtcctgggaaaggtgaacgagattgccaagcataaagcctctgtagaagatgcagatacacaaagcaaggtgcaccagctatatgaaactatacagcgctggagccccattgcctccaccctccctgagctggtgcagagacttgtcaccatcaagcagctgcacgagcaagccatgcagtttggtcagctcctgacacacttggataccacccagcagatgattgctaattccttgaaggacaataccaccctcttgacccaggtgcagacaaccatgcgtgaaaacctggccacagttgaggggaactttgccagcattgatgaacggatgaagaagctgggaaagtgagcacatttgggagctggagaacaggggttatccctacccctgtgaactctgttaacagcttacatagggtttcccctttactataactctagcatccccatcccatttgacactgggggcaagggttcttcttgcatgtggggtttatacccctcccctgatgaatacagagtggtagctaggggttggttatcatcagaaggtggtctcccctcaggcctgggggataaggacgtgggcccagccacatgccaactcatgtccaatactgctttgcctggtgtggggaaggattgggtcttgtcccccaacacagcttctgtggctgactgtaatactgtacaactgtttctgaccattaaatgctgttgtactctgtgtggcctctgctgtgtttcctggggaggaagcagcactaggatatagatattcattcgtcataacaggcaatctaagccactctatactacaagagatggatttaaattgtaacctgttcttaccaaagaactaaataaaaaatgagtacagagccagagccagagtttcaaaatattctcatctgttaaattaagagtgtctcccatagaaaagcagtggaggccccacagggcaagtacaaaacagaattaaaactcccaagggtcttgtctttacaaaagaaaaggcaggaggcagcccctggacagctggtcatgctggccgctccggttggaccacgttgcataatcctcagtcgcatcatcacaacgtctctctttcactgggaaggagggcagcagccaacagtagctcacaggtttgtaaactgagcctgttggctttaagaagggaggcaatgaaatcgaattaaatataaaagagtcatttgtgcaaaaataacttaaacaaataaaagacctggggaagggggtgttccccttagcgcctggtggggaaagggccatataccatcccccccaggccttttcagtgacatggcttcgggggggcggcaagggtggtgggggggggtgaacttc

SEQ ID NO: 282437 - DNA, 2080 bp, Homo sapiens
cggacgcgtgggtcgcggacgcgtggccttctgctgtgctactgctgtcgcgagacttcctgctcatctgccgctccctttgccgccgccttagcccgggacccgaacccagcctctcccctacccgaacaccggccccggctccaccgaggcccgggtcccccagcccgtctcgccgccgccatggcggaccctaaatacgccgaccttcccggcattgccaggaatgagccagatgtttatgaaactagcgacctacctgaggatgatcaagcggagttcgatgcggaggagctgacaagcacaagtgtggaacacatcattgtcaatcctaatgctgcctatgacaagttcaaggacaagagagtggggacaaagggacttgatttctcagatcgtattggaaaaaccaagaggacaggatatgaatctggagaatatgagatgcttggagagggtctgggagtgaaggagacaccccagcaaaagtaccagcgcctactgcatgaggtccaagagctgacaactgaagttgaaaaaatcaagacgacagtgaaggagtcagccacagaggagaagctgacccctgtgttgctggctaaacagctggcagccctgaagcagcagctggttgcttcccacctggagaagctgctgggaccagatgctgcaatcaaccttaccgaccccgatggcgccctggctaagcgcctactactgcagctggaagcaacaaagaacagcaaagggggatcagggggaaaaaccactgggacccccccagatagcagccttgtcacttatgaactacattctcggcctgagcaggacaagttctctcaagctgccaaagtcgcagaacttgaaaagcgcctgacagagctggagacagctgtacgttgtgatcaggatgctcagaatcccctttctgcaggtctacagggagcctgtctcatggagactgtagagctgttgcaagcaaaggtgagcgccctagaccttgcagttttggatcaagtggaggctcggctacagagtgtcctgggaaaggtgaacgagattgccaagcataaagcctctgtagaagatgcagatacacaaagcaaggtgcaccagctatatgaaactatacagcgctggagccccattgcctccaccctccctgagctggtgcagagacttgtcaccatcaagcagctgcacgagcaagccatgcagtttggtcagctcctgacacacttggataccacccagcagatgattgctaattccttgaaggacaataccaccctcttgacccaggtgcagacaaccatgcgtgaaaacctggccacagttgaggggaactttgccagcattgatgaacggatgaagaagctgggaaagtgagcacatttgggagctggagaacaggggttatccctacccctgtgaactctgttaacagcttacatagggtttcccctttactataactctagcatccccatcccatttgacactgggggcaagggttcttcttgcatgtggggtttatacccctcccctgatgaatacagagtggtagctaggggttggttatcatcagaaggtggtctcccctcaggcctgggggataaggacgtgggcccagccacatgccaactcatgtccaatactgctttgcctggtgtggggaaggattgggtcttgtcccccaacacagcttctgtggctgactgtaatactgtacaactgtttctgaccattaaatgctgttgtactctgtgtggcctctgctgtgtttcctggggaggaagcagcactaggatatagatattcattcgtcataacaggcaatctaagccactctatactacaagagatggatttaaattgtaacctgttcttaccaaagaactaaataaaaaatgagtacagagccagagaaaaaaagatatctataataaatttgctaattgattaatataattcattatattatgtattaattcagtattatcatttacatatgtattgtataattattttattatatgaaaaaaaattccggggggcggccccattctcacaatttaac

SEQ ID NO: 282438 - DNA, 2633 bp, Homo sapiens
ccagaggatgctgtataggtcgtgcctgggtgttatttcgctgccggcgtcaggccgtgttacctgatacaacccagcctctcccctacccgaacaccggccccggctccaccgaggcccgggtcccccagcccgtctcgccgccgccatggcggaccctaaatacgccgaccttcccggcattgccaggaatgagccagatgtttatgaaactagcgacctacctgaggatgatcaagcggagttcgatgcggaggagctgacaagcacaagtgtggaacacatcattgtcaatcctaatgctgcctatgacaagttcaaggacaagagagtggggacaaagggacttgatttctcagatcgtattggaaaaaccaagaggacaggatatgaatctggagaatatgagatgcttggagagggtctgggagtgaaggagacaccccagcaaaagtaccagcgcctactgcatgaggtccaagagctgacaactgaagttgaaaaaatcaagacgacagtgaaggagtcagccacagaggagaagctgacccctgtgttgctggctaaacagctggcagccctgaagcagcagctggttgcttcccacctggagaagctgctgggaccagatgctgcaatcaaccttaccgaccccgatggcgccctggctaagcgcctactactgcagctggaagcaacaaagaacagcaaagggggatcagggggaaaaaccactgggacccccccagatagcagccttgtcacttatgaactacattctcggcctgagcaggacaagttctctcaagctgccaaagtcgcagaacttgaaaagcgcctgacagagctggagacagctgtacgttgtgatcaggatgctcagaatcccctttctgcaggtctacagggagcctgtctcatggagactgtagagctgttgcaagcaaaggtgagcgccctagaccttgcagttttggatcaagtggaggctcggctacagagtgtcctgggaaaggtgaacgagattgccaagcataaagcctctgtagaagatgcagatacacaaagcaaggtgcaccagctatatgaaactatacagcgctggagccccattgcctccaccctccctgagctggtgcagagacttgtcaccatcaagcagctgcacgagcaagccatgcagtttggtcagctcctgacacacttggataccacccagcagatgattgctaattccttgaaggacaataccaccctcttgacccaggtgcagacaaccatgcgtgaaaacctggccacagttgaggggaactttgccagcattgatgaacggatgaagaagctgggaaagtgagcacatttgggagctggagaacaggggttatccctacccctgtgaactctgttaacagcttacatagggtttcccctttactataactctagcatccccatcccatttgacactgggggcaagggttcttcttgcatgtggggtttatacccctcccctgatgaatacagagtggtagctaggggttggttatcatcagaaggtggtctcccctcaggcctgggggataaggacgtgggcccagccacatgccaactcatgtccaatactgctttgcctggtgtggggaaggattgggtcttgtcccccaacacagcttctgtggctgactgtaatactgtacaactgtttctgaccattaaatgctgttgtactctgtgtggcctctgctgtgtttcctggggaggaagcagcactaggatatagatattcattcgtcataacaggcaatctaagccactctatactacaagagatggatttaaattgtaacctgttcttaccaaagaactaaataaaaaatgagtacagagccagagccagagtttcaaaatattctcatctgttaaattaagagtgtctcccatagaaaagcagtggaggccccacagggcaagtacaaaacagaattaaaactcccaagggtcttgtctttacaaaagaaaaggcaggaggcagcccctggacagctggtcatgctggccgctccggttggaccacgttgcataatcctcagtcgcatcatcacaacgtctctgagcgttttgatggggggagaaggggcagtgtagtgtgtatgggaggagaggcccagagggctctctttgcccccttacccccttttttatatcccagaggaaagtcgggggaacctggctacaccttgaaatgaggctatgtgtttcaaacctggggacggggtaagagaggatctgtgctttgagcaacctgagccagaggcagaggggtgttggaggggtaaggggaggatgcatgatgcttattgctttgtacctttcactgggaaggagggcagcagccaacagtagctcacaggtttgtaaactgagcctgttggctttaagaagggaggcaatgaaatcgaattaaatataaaagagtcatttgtgcaaaaataacttaaacaaataaaagacctggggaagggggtgttccccttagcgcctggtggggaaagggccatataccatcccccccaggccttttcagtgacatggcttcgggggggcggcaagggtggtgggggggggtgaacttc

SEQ ID NO: 282439 - DNA, 3990 bp, Homo sapiens
aggtgcagtttgcaagatcatagctcactgctggtctcgaactcctgacctcaagtgatccacccacctcgccctcccaaagtgctgggattacagatgtgagacaccgtgcctggtggaaagaggaatcttggctgggaccctagcatcgtctagggaacagagaggttgtgattaagaggtatctggatgaaatcttggtgaaaggaagcacttgtttttaatcccaccatggtttttcatatgcatacaaccatcctcaaccatctgcccatcagcagagctcctagaaaggcaggacataccactggatatccccttctggcagttctaaaccagccttgcccggaagtgggagccttatctatgtggcccagactcaaataaggcctcttggaaatactctcacccttcccctttgtttaccctccaacccctgtgaatcttgtgaacagagggttgaagaaacatgttctgcacatgtgctagtacctgtgaatcttgatgtcccctggaccctctgtgtaagtacatcatggcagaattgctctagatccttcggagctgcagggtgagttaccagccactcaaggtggaggcaaacatgccaggctgcacaagggaccaggagcagctctgcctcttcccttgcaggaggaaatgagaacggggctatacttaggtacttcatcattcctttaactcaccatctgtacctgacatattttgttttgtctcacctaaagtcatatcagacttcctacctgatcactctcattgtgactgattctgccatccaaatgtctaatttttcacagctagagaaactaagagataggaagacaagggccatgaactaagaaggggaactcctctcctgagaattattgaccctctatcagctacaagtctaagaatttctaacttctgcttcatcttctaccatttctaatagcttccccaccacctcagccttctctccccagtttcttattccatgccactggctggtaacatctaactcctagttttcagatgatcctaaactgctgctgttaatggcaaagcttcatgacatcctcaccaccagagggaaaagggtctcatgctcttctttctcttggggtatatggtgaccccagctgaaatttcttggcccctaaatttcgctaggctcccctggggccctgtggtgcagtgtgttggaagactgtcatgtagtgcatgtgacaatttgctaataacaattttgtcttttttttccctccctcatccccattcccccactccctttccttttaactcttttgattttctcacctctggggaaaccacaaggagctggtaagaagcctgacctttcatctgctttttaacggggtgtgctatgatgagcagttgtttctctgtcctttagactctactaaatctttcattcatctattcagtcccacacccagccttttcctatctcacaagtcactgtaattatactgcccccaactcatgccccagatcttcaagacactgctggagtaggtgctactggaggactagagtgtgctcccgggccacagccttggagaggctccagaggatgccagcgccaggaggagctgacaagcacaagtgtggaacacatcattgtcaatcctaatgctgcctatgacaagttcaaggacaagagagtggggacaaagggacttgatttctcagatcgtattggaaaaaccaagaggacaggatatgaatctggagaatatgagatgcttggagagggtctgggagtgaaggagacaccccagcaaaagtaccagcgcctactgcatgaggtccaagagctgacaactgaagttgaaaaaatcaagacgacagtgaaggagtcagccacagaggagaagctgacccctgtgttgctggctaaacagctggcagccctgaagcagcagctggttgcttcccacctggagaagctgctgggaccagatgctgcaatcaaccttaccgaccccgatggcgccctggctaagcgcctactactgcagctggaagcaacaaagaacagcaaagggggatcagggggaaaaaccactgggacccccccagatagcagccttgtcacttatgaactacattctcggcctgagcaggacaagttctctcaagctgccaaagtcgcagaacttgaaaagcgcctgacagagctggagacagctgtacgttgtgatcaggatgctcagaatcccctttctgcaggtctacagggagcctgtctcatggagactgtagagctgttgcaagcaaaggtgagcgccctagaccttgcagttttggatcaagtggaggctcggctacagagtgtcctgggaaaggtgaacgagattgccaagcataaagcctctgtagaagatgcagatacacaaagcaaggtgcaccagctatatgaaactatacagcgctggagccccattgcctccaccctccctgagctggtgcagagacttgtcaccatcaagcagctgcacgagcaagccatgcagtttggtcagctcctgacacacttggataccacccagcagatgattgctaattccttgaaggacaataccaccctcttgacccaggtgcagacaaccatgcgtgaaaacctggccacagttgaggggaactttgccagcattgatgaacggatgaagaagctgggaaagtgagcacatttgggagctggagaacaggggttatccctacccctgtgaactctgttaacagcttacatagggtttcccctttactataactctagcatccccatcccatttgacactgggggcaagggttcttcttgcatgtggggtttatacccctcccctgatgaatacagagtggtagctaggggttggttatcatcagaaggtggtctcccctcaggcctgggggataaggacgtgggcccagccacatgccaactcatgtccaatactgctttgcctggtgtggggaaggattgggtcttgtcccccaacacagcttctgtggctgactgtaatactgtacaactgtttctgaccattaaatgctgttgtactctgtgtggcctctgctgtgtttcctggggaggaagcagcactaggatatagatattcattcgtcataacaggcaatctaagccactctatactacaagagatggatttaaattgtaacctgttcttaccaaagaactaaataaaaaatgagtacagagccagagccagagtttcaaaatattctcatctgttaaattaagagtgtctcccatagaaaagcagtggaggccccacagggcaagtacaaaacagaattaaaactcccaagggtcttgtctttacaaaagaaaaggcaggaggcagcccctggacagctggtcatgctggccgctccggttggaccacgttgcataatcctcagtcgcatcatcacaacgtctctgagcgttttgatggggggagaaggggcagtgtagtgtgtatgggaggagaggcccagagggctctctttgcccccttacccccttttttatatcccagaggaaagtcgggggaacctggctacaccttgaaatgaggctatgtgtttcaaacctggggacggggtaagagaggatctgtgctttgagcaacctgagccagaggcagaggggtgttggaggggtaaggggaggatgcatgatgcttattgctttgtacctttcactgggaaggagggcagcagccaacagtagctcacaggtttgtaaactgagcctgttggctttaagaagggaggcaatgaaatcgaattaaatataaaagagtcatttgtgcaaaaataacttaaacaaataaaagacctggggaagggggtgttccccttagcgcctggtggggaaagggccatataccatcccccccaggccttttcagtgacatggcttcgggggggcggcaagggtggtgggggggggtgaacttc

SEQ ID NO: 282440 - DNA, 2599 bp, Homo sapiens
cggacgcgtgggtcgcggacgcgtggccttctgctgtgctactgctgtcgcgagacttcctgctcatctgccgctccctttgccgccgccttagcccgggacccgaacccagcctctcccctacccgaacaccggccccggctccaccgaggcccgggtcccccagcccgtctcgccgccgccatggcggaccctaaatacgccgaccttcccggcattgaggagctgacaagcacaagtgtggaacacatcattgtcaatcctaatgctgcctatgacaagttcaaggacaagagagtggggacaaagggacttgatttctcagatcgtattggaaaaaccaagaggacaggatatgaatctggagaatatgagatgcttggagagggtctgggagtgaaggagacaccccagcaaaagtaccagcgcctactgcatgaggtccaagagctgacaactgaagttgaaaaaatcaagacgacagtgaaggagtcagccacagaggagaagctgacccctgtgttgctggctaaacagctggcagccctgaagcagcagctggttgcttcccacctggagaagctgctgggaccagatgctgcaatcaaccttaccgaccccgatggcgccctggctaagcgcctactactgcagctggaagcaacaaagaacagcaaagggggatcagggggaaaaaccactgggacccccccagatagcagccttgtcacttatgaactacattctcggcctgagcaggacaagttctctcaagctgccaaagtcgcagaacttgaaaagcgcctgacagagctggagacagctgtacgttgtgatcaggatgctcagaatcccctttctgcaggtctacagggagcctgtctcatggagactgtagagctgttgcaagcaaaggtgagcgccctagaccttgcagttttggatcaagtggaggctcggctacagagtgtcctgggaaaggtgaacgagattgccaagcataaagcctctgtagaagatgcagatacacaaagcaaggtgcaccagctatatgaaactatacagcgctggagccccattgcctccaccctccctgagctggtgcagagacttgtcaccatcaagcagctgcacgagcaagccatgcagtttggtcagctcctgacacacttggataccacccagcagatgattgctaattccttgaaggacaataccaccctcttgacccaggtgcagacaaccatgcgtgaaaacctggccacagttgaggggaactttgccagcattgatgaacggatgaagaagctgggaaagtgagcacatttgggagctggagaacaggggttatccctacccctgtgaactctgttaacagcttacatagggtttcccctttactataactctagcatccccatcccatttgacactgggggcaagggttcttcttgcatgtggggtttatacccctcccctgatgaatacagagtggtagctaggggttggttatcatcagaaggtggtctcccctcaggcctgggggataaggacgtgggcccagccacatgccaactcatgtccaatactgctttgcctggtgtggggaaggattgggtcttgtcccccaacacagcttctgtggctgactgtaatactgtacaactgtttctgaccattaaatgctgttgtactctgtgtggcctctgctgtgtttcctggggaggaagcagcactaggatatagatattcattcgtcataacaggcaatctaagccactctatactacaagagatggatttaaattgtaacctgttcttaccaaagaactaaataaaaaatgagtacagagccagagccagagtttcaaaatattctcatctgttaaattaagagtgtctcccatagaaaagcagtggaggccccacagggcaagtacaaaacagaattaaaactcccaagggtcttgtctttacaaaagaaaaggcaggaggcagcccctggacagctggtcatgctggccgctccggttggaccacgttgcataatcctcagtcgcatcatcacaacgtctctgagcgttttgatggggggagaaggggcagtgtagtgtgtatgggaggagaggcccagagggctctctttgcccccttacccccttttttatatcccagaggaaagtcgggggaacctggctacaccttgaaatgaggctatgtgtttcaaacctggggacggggtaagagaggatctgtgctttgagcaacctgagccagaggcagaggggtgttggaggggtaaggggaggatgcatgatgcttattgctttgtacctttcactgggaaggagggcagcagccaacagtagctcacaggtttgtaaactgagcctgttggctttaagaagggaggcaatgaaatcgaattaaatataaaagagtcatttgtgcaaaaataacttaaacaaataaaagacctggggaagggggtgttccccttagcgcctggtggggaaagggccatataccatcccccccaggccttttcagtgacatggcttcgggggggcggcaagggtggtgggggggggtgaacttc

SEQ ID NO: 282441 - DNA, 2763 bp, Homo sapiens
cggacgcgtgggtcgcggacgcgtggccttctgctgtgctactgctgtcgcgagacttcctgctcatctgccgctccctttgccgccgccttagcccgggacccgaacccagcctctcccctacccgaacaccggccccggctccaccgaggcccgggtcccccagcccgtctcgccgccgccatggcggaccctaaatacgccgaccttcccggcattgccaggaatgagccagatgtttatgaaactagcgacctacctgaggatgatcaagcggagttcgatgcgatcttcaagacactgctggagtaggtgctactggaggactagagtgtgctcccgggccacagccttggagaggctccagaggatgccagcgccaggaggagctgacaagcacaagtgtggaacacatcattgtcaatcctaatgctgcctatgacaagttcaaggacaagagagtggggacaaagggacttgatttctcagatcgtattggaaaaaccaagaggacaggatatgaatctggagaatatgagatgcttggagagggtctgggagtgaaggagacaccccagcaaaagtaccagcgcctactgcatgaggtccaagagctgacaactgaagttgaaaaaatcaagacgacagtgaaggagtcagccacagaggagaagctgacccctgtgttgctggctaaacagctggcagccctgaagcagcagctggttgcttcccacctggagaagctgctgggaccagatgctgcaatcaaccttaccgaccccgatggcgccctggctaagcgcctactactgcagctggaagcaacaaagaacagcaaagggggatcagggggaaaaaccactgggacccccccagatagcagccttgtcacttatgaactacattctcggcctgagcaggacaagttctctcaagctgccaaagtcgcagaacttgaaaagcgcctgacagagctggagacagctgtacgttgtgatcaggatgctcagaatcccctttctgcaggtctacagggagcctgtctcatggagactgtagagctgttgcaagcaaaggtgagcgccctagaccttgcagttttggatcaagtggaggctcggctacagagtgtcctgggaaaggtgaacgagattgccaagcataaagcctctgtagaagatgcagatacacaaagcaaggtgcaccagctatatgaaactatacagcgctggagccccattgcctccaccctccctgagctggtgcagagacttgtcaccatcaagcagctgcacgagcaagccatgcagtttggtcagctcctgacacacttggataccacccagcagatgattgctaattccttgaaggacaataccaccctcttgacccaggtgcagacaaccatgcgtgaaaacctggccacagttgaggggaactttgccagcattgatgaacggatgaagaagctgggaaagtgagcacatttgggagctggagaacaggggttatccctacccctgtgaactctgttaacagcttacatagggtttcccctttactataactctagcatccccatcccatttgacactgggggcaagggttcttcttgcatgtggggtttatacccctcccctgatgaatacagagtggtagctaggggttggttatcatcagaaggtggtctcccctcaggcctgggggataaggacgtgggcccagccacatgccaactcatgtccaatactgctttgcctggtgtggggaaggattgggtcttgtcccccaacacagcttctgtggctgactgtaatactgtacaactgtttctgaccattaaatgctgttgtactctgtgtggcctctgctgtgtttcctggggaggaagcagcactaggatatagatattcattcgtcataacaggcaatctaagccactctatactacaagagatggatttaaattgtaacctgttcttaccaaagaactaaataaaaaatgagtacagagccagagccagagtttcaaaatattctcatctgttaaattaagagtgtctcccatagaaaagcagtggaggccccacagggcaagtacaaaacagaattaaaactcccaagggtcttgtctttacaaaagaaaaggcaggaggcagcccctggacagctggtcatgctggccgctccggttggaccacgttgcataatcctcagtcgcatcatcacaacgtctctgagcgttttgatggggggagaaggggcagtgtagtgtgtatgggaggagaggcccagagggctctctttgcccccttacccccttttttatatcccagaggaaagtcgggggaacctggctacaccttgaaatgaggctatgtgtttcaaacctggggacggggtaagagaggatctgtgctttgagcaacctgagccagaggcagaggggtgttggaggggtaaggggaggatgcatgatgcttattgctttgtacctttcactgggaaggagggcagcagccaacagtagctcacaggtttgtaaactgagcctgttggctttaagaagggaggcaatgaaatcgaattaaatataaaagagtcatttgtgcaaaaataacttaaacaaataaaagacctggggaagggggtgttccccttagcgcctggtggggaaagggccatataccatcccccccaggccttttcagtgacatggcttcgggggggcggcaagggtggtgggggggggtgaacttc

SEQ ID NO: 282442 - DNA, 2617 bp, Homo sapiens
cggacgcgtgggtcgcggacgcgtggccttctgctgtgctactgctgtcgcgagacttcctgctcatctgccgctccctttgccgccgccttagcccgggacccgaacccagcctctcccctacccgaacaccggccccggctccaccgaggcccgggtcccccagcccgtctcgccgccgccatggcggaccctaaatacgccgaccttcccggcattgccaggaatgagccagatgtttatgaaactagcgacctacctgaggatgatcaagcggagttcgatgcggaggagctgacaagcacaagtgtggaacacatcattgtcaatcctaatgctgcctatgacaagttcaaggacaagagagtggggacaaagggacttgatttctcagatcgtattggaaaaaccaagaggacaggatatgaatctggagaatatgagatgcttggagagggtctgggagtgaaggagacaccccagcaaaagtaccagcgcctactgcatgaggtccaagagctgacaactgaagttgaaaaaatcaagacgacagtgaaggagtcagccacagaggagaagctgacccctgtgttgctggctaaacagctggcagccctgaagcagcagctggttgcttcccacctggagaagctgctgggaccagatgctgcaatcaaccttaccgaccccgatggcgccctggctaagcgcctactactgcagctggaagcaacaaagaacagcaaagggggatcagggggaaaaaccactgggacccccccagatagcagccttgtcacttatgaactacattctcggcctgagcaggacaagttctctcaagctgccaaagtcgcagaacttgaaaagcgcctgacagagctggagacagctgtacgttgtgatcaggatgctcagaatcccctttctgcaggtctacagggagcctgtctcatggagactgtagagctgttgcaagcaaagagtgtcctgggaaaggtgaacgagattgccaagcataaagcctctgtagaagatgcagatacacaaagcaaggtgcaccagctatatgaaactatacagcgctggagccccattgcctccaccctccctgagctggtgcagagacttgtcaccatcaagcagctgcacgagcaagccatgcagtttggtcagctcctgacacacttggataccacccagcagatgattgctaattccttgaaggacaataccaccctcttgacccaggtgcagacaaccatgcgtgaaaacctggccacagttgaggggaactttgccagcattgatgaacggatgaagaagctgggaaagtgagcacatttgggagctggagaacaggggttatccctacccctgtgaactctgttaacagcttacatagggtttcccctttactataactctagcatccccatcccatttgacactgggggcaagggttcttcttgcatgtggggtttatacccctcccctgatgaatacagagtggtagctaggggttggttatcatcagaaggtggtctcccctcaggcctgggggataaggacgtgggcccagccacatgccaactcatgtccaatactgctttgcctggtgtggggaaggattgggtcttgtcccccaacacagcttctgtggctgactgtaatactgtacaactgtttctgaccattaaatgctgttgtactctgtgtggcctctgctgtgtttcctggggaggaagcagcactaggatatagatattcattcgtcataacaggcaatctaagccactctatactacaagagatggatttaaattgtaacctgttcttaccaaagaactaaataaaaaatgagtacagagccagagccagagtttcaaaatattctcatctgttaaattaagagtgtctcccatagaaaagcagtggaggccccacagggcaagtacaaaacagaattaaaactcccaagggtcttgtctttacaaaagaaaaggcaggaggcagcccctggacagctggtcatgctggccgctccggttggaccacgttgcataatcctcagtcgcatcatcacaacgtctctgagcgttttgatggggggagaaggggcagtgtagtgtgtatgggaggagaggcccagagggctctctttgcccccttacccccttttttatatcccagaggaaagtcgggggaacctggctacaccttgaaatgaggctatgtgtttcaaacctggggacggggtaagagaggatctgtgctttgagcaacctgagccagaggcagaggggtgttggaggggtaaggggaggatgcatgatgcttattgctttgtacctttcactgggaaggagggcagcagccaacagtagctcacaggtttgtaaactgagcctgttggctttaagaagggaggcaatgaaatcgaattaaatataaaagagtcatttgtgcaaaaataacttaaacaaataaaagacctggggaagggggtgttccccttagcgcctggtggggaaagggccatataccatcccccccaggccttttcagtgacatggcttcgggggggcggcaagggtggtgggggggggtgaacttc

SEQ ID NO: 282443 - DNA, 2056 bp, Homo sapiens
  misc_feature (1775)..(1775): n is a, c, g, or t
  misc_feature (1778)..(1779): n is a, c, g, or t
  misc_feature (1880)..(1880): n is a, c, g, or t
  misc_feature (2001)..(2001): n is a, c, g, or t
cggacgcgtgggtcgcggacgcgtggccttctgctgtgctactgctgtcgcgagacttcctgctcatctgccgctccctttgccgccgccttagcccgggacccgaacccagcctctcccctacccgaacaccggccccggctccaccgaggcccgggtcccccagcccgtctcgccgccgccatggcggaccctaaatacgccgaccttcccggcattgccaggaatgagccagatgtttatgaaactagcgacctacctgaggatgatcaagcggagttcgatgcggaggagctgacaagcacaagtgtggaacacatcattgtcaatcctaatgctgcctatgacaagttcaaggacaagagagtggggacaaagggacttgatttctcagatcgtattggaaaaaccaagaggacaggatatgaatctggagaatatgagatgcttggagagggtctgggagtgaaggagacaccccagcaaaagtaccagcgcctactgcatgaggtccaagagctgacaactgaagttgaaaaaatcaagacgacagtgaaggagtcagccacagaggagaagctgacccctgtgttgctggctaaacagctggcagccctgaagcagcagctggttgcttcccacctggagaagctgctgggaccagatgctgcaatcaaccttaccgaccccgatggcgccctggctaagcgcctactactgcagctggaagcaacaaagaacagcaaagggggatcagggggaaaaaccactgggacccccccagatagcagccttgtcacttatgaactacattctcggcctgagcaggacaagttctctcaagctgccaaagtcgcagaacttgaaaagcgcctgacagagctggagacagctgtacgttgtgatcaggatgctcagaatcccctttctgcaggtctacagggagcctgtctcatggagactgtagagctgttgcaagcaaaggtgagcgccctagaccttgcagttttggatcaagtggaggctcggctacagagtgtcctgggaaaggtgaacgagattgccaagcataaagcctctgtagaagatgcagatacacaaagcaaggtgcaccagctatatgaaactatacagcgctggagccccattgcctccaccctccctgagctggtgcagagacttgtcaccatcaagcagctgcacgagcaagccatgcagtttggtcagctcctgacacacttggataccacccagcagatgattgctaattccttgaaggacaataccaccctcttgacccaggtgcagacaaccatgcgtgaaaacctggccacagttgaggggaactttgccagcattgatgaacggatgaagaagctgggaaagtgagcacatttgggagctggagaacaggggttatccctacccctgtgaactctgttaacagcttacatagggtttcccctttactataactctagcatccccatcccatttgacactgggggcaagggttcttcttgcatgtggggtttatacccctcccctgatgaatacagagtggtagctaggggttggttatcatcagaaggtggtctcccctcaggcctgggggataaggacgtgggcccagccacatgccaactcatgtccaatactgctttgcctggtgtggggaaggattgggtcttgtcccccaacacagcttctgtggctgactgtaatactgtacaactgtttctgaccattaaatgctgttgtactctaaaaaaaanaannaaaaaaaactttttgcgcgctggacctcgaaagtttctaaaccatccggtggggggcggccaggtgtaattggacctggcaaagcgtctccaggaaatcgnggcctggcaaggggcgggttttccccataaaaaaacgcgcgcgaccggttttcgaacaccccgaggctcgggcccacggtctccacgggtgcacgcgctagccccccgccgcgggcgcggncaaaatcccaacccagaacaaacgaccacacaaaacacgagcaagcacaaagaac

SEQ ID NO: 282444 - DNA, 1930 bp, Homo sapiens
cggacgcgtgggtcgcggacgcgtggccttctgctgtgctactgctgtcgcgagacttcctgctcatctgccgctccctttgccgccgccttagcccgggacccgaacccagcctctcccctacccgaacaccggccccggctccaccgaggcccgggtcccccagcccgtctcgccgccgccatggcggaccctaaatacgccgaccttcccggcattgccaggaatgagccagatgtttatgaaactagcgacctacctgaggatgatcaagcggagttcgatgcggaggagctgacaagcacaagtgtggaacacatcattgtcaatcctaatgctgcctatgacaagttcaaggacaagagagtggggacaaagggacttgatttctcagatcgtattggaaaaaccaagaggacaggatatgaatctggagaatatgagatgcttggagagggtctgggagtgaaggagacaccccagcaaaagtaccagcgcctactgcatgaggtccaagagctgacaactgaagttgaaaaaatcaagacgacagtgaaggagtcagccacagaggagaagctgacccctgtgttgctggctaaacagctggcagccctgaagcagcagctggttgcttcccacctggagaagctgctgggaccagatgctgcaatcaaccttaccgaccccgatggcgccctggctaagcgcctactactgcagctggaagcaacaaagaacagcaaagggggatcagggggaaaaaccactgggacccccccagatagcagccttgtcacttatgaactacattctcggcctgagcaggacaagttctctcaagctgccaaagtcgcagaacttgaaaagcgcctgacagagctggagacagctgtacgttgtgatcaggatgctcagaatcccctttctgcaggtctacagggagcctgtctcatggagactgtagagctgttgcaagcaaaggtgagcgccctagaccttgcagttttggatcaagtggaggctcggctacagagtgtcctgggaaaggtgaacgagattgccaagcataaagcctctgtagaagatgcagatacacaaagcaaggtgcaccagctatatgaaactatacagcgctggagccccattgcctccaccctccctgagctggtgcagagacttgtcaccatcaagcagctgcacgagcaagccatgcagtttggtcagctcctgacacacttggataccacccagcagatgattgctaattccttgaaggacaataccaccctcttgacccaggtgcagacaaccatgcgtgaaaacctggccacagttgaggggaactttgccagcattgatgaacggatgaagaagctgggaaagtgagcacatttgggagctggagaacaggggttatccctacccctgtgaactctgttaacagcttacatagggtttcccctttactataactctagcatccccatcccatttgacactgggggcaagggttcttcttgcatgtggggtttatacccctcccctgatgaatacagagtggtagctaggggttggttatcatcagaaggtggtctcccctcaggcctgggggataaggacgtgggcccagccacatgccaactcatgtccaatactgctttgcctggtgtggggaaggattgggtcttgtcccccaacacagcttctgtggctgactgtaatactgtacaactgtttctgaccattaaatgctgttgtactctaaatatacttcaaggatgagactcgagggggggcccgtgacccaagtcgccctatggcagagatcggatccaatgcacatgccagagatctacaatgtcaccactgggaacaccctgggatcacccactttaatcgcctggcagcacatccgcgttacgacagc

SEQ ID NO: 282445 - DNA, 2602 bp, Homo sapiens
cggacgcgtgggtcgcggacgcgtggccttctgctgtgctactgctgtcgcgagacttcctgctcatctgccgctccctttgccgccgccttagcccgggacccgaacccagcctctcccctacccgaacaccggccccggctccaccgaggcccgggtcccccagcccgtctcgccgccgccatggcggaccctaaatacgccgaccttcccggcattgccaggaatgagccagatgtttatgaaactagcgacctacctgaggatgatcaagcggagttcgatgcggaggagctgacaagcacaagtgtggaacacatcattgtcaatcctaatgctgcctatgacaagttcaaggacaagagagtggggacaaagggacttgatttctcagatcgtattggaaaaaccaagaggacaggatatgaatctggagaatatgagatgcttggagagggtctgggagtgaaggagacaccccagcaaaagtaccagcgcctactgcatgaggtccaagagctgacaactgaagttgaaaaaatcaagacgacagtgaaggagtcagccacagaggagaagctgacccctgtgttgctggctaaacagctggcagccctgaagcagcagctggttgcttcccacctggagaagctgctgggaccagatgctgcaatcaaccttaccgaccccgatggcgccctggctaagcgcctactactgcagctggaagcaacaaagaacagcaaagggggatcagggggaaaaaccactgggacccccccagatagcagccttgtcacttatgaactacattctcggcctgagcaggacaagttctctcaagctgccaaaaatcccctttctgcaggtctacagggagcctgtctcatggagactgtagagctgttgcaagcaaaggtgagcgccctagaccttgcagttttggatcaagtggaggctcggctacagagtgtcctgggaaaggtgaacgagattgccaagcataaagcctctgtagaagatgcagatacacaaagcaaggtgcaccagctatatgaaactatacagcgctggagccccattgcctccaccctccctgagctggtgcagagacttgtcaccatcaagcagctgcacgagcaagccatgcagtttggtcagctcctgacacacttggataccacccagcagatgattgctaattccttgaaggacaataccaccctcttgacccaggtgcagacaaccatgcgtgaaaacctggccacagttgaggggaactttgccagcattgatgaacggatgaagaagctgggaaagtgagcacatttgggagctggagaacaggggttatccctacccctgtgaactctgttaacagcttacatagggtttcccctttactataactctagcatccccatcccatttgacactgggggcaagggttcttcttgcatgtggggtttatacccctcccctgatgaatacagagtggtagctaggggttggttatcatcagaaggtggtctcccctcaggcctgggggataaggacgtgggcccagccacatgccaactcatgtccaatactgctttgcctggtgtggggaaggattgggtcttgtcccccaacacagcttctgtggctgactgtaatactgtacaactgtttctgaccattaaatgctgttgtactctgtgtggcctctgctgtgtttcctggggaggaagcagcactaggatatagatattcattcgtcataacaggcaatctaagccactctatactacaagagatggatttaaattgtaacctgttcttaccaaagaactaaataaaaaatgagtacagagccagagccagagtttcaaaatattctcatctgttaaattaagagtgtctcccatagaaaagcagtggaggccccacagggcaagtacaaaacagaattaaaactcccaagggtcttgtctttacaaaagaaaaggcaggaggcagcccctggacagctggtcatgctggccgctccggttggaccacgttgcataatcctcagtcgcatcatcacaacgtctctgagcgttttgatggggggagaaggggcagtgtagtgtgtatgggaggagaggcccagagggctctctttgcccccttacccccttttttatatcccagaggaaagtcgggggaacctggctacaccttgaaatgaggctatgtgtttcaaacctggggacggggtaagagaggatctgtgctttgagcaacctgagccagaggcagaggggtgttggaggggtaaggggaggatgcatgatgcttattgctttgtacctttcactgggaaggagggcagcagccaacagtagctcacaggtttgtaaactgagcctgttggctttaagaagggaggcaatgaaatcgaattaaatataaaagagtcatttgtgcaaaaataacttaaacaaataaaagacctggggaagggggtgttccccttagcgcctggtggggaaagggccatataccatcccccccaggccttttcagtgacatggcttcgggggggcggcaagggtggtgggggggggtgaacttc

SEQ ID NO: 282446 - DNA, 1734 bp, Homo sapiens
  misc_feature (27)..(27): n is a, c, g, or t
  misc_feature (29)..(29): n is a, c, g, or t
taacggctaggtacgaggctgggtggngnaacccagcctctcccctacccgaacaccggccccggctccaccgaggcccgggtcccccagcccgtctcgccgccgccatggcggaccctaaatacgccgaccttcccggcattgccaggaatgagccagatgtttatgaaactagcgacctacctgaggatgatcaagcggagttcgatgcggaggagctgacaagcacaagtgtggaacacatcattgtcaccatcaagcagctgcacgagcaagccatgcagtttggtcagctcctgacacacttggataccacccagcagatgattgctaattccttgaaggacaataccaccctcttgacccaggtgcagacaaccatgcgtgaaaacctggccacagttgaggggaactttgccagcattgatgaacggatgaagaagctgggaaagtgagcacatttgggagctggagaacaggggttatccctacccctgtgaactctgttaacagcttacatagggtttcccctttactataactctagcatccccatcccatttgacactgggggcaagggttcttcttgcatgtggggtttatacccctcccctgatgaatacagagtggtagctaggggttggttatcatcagaaggtggtctcccctcaggcctgggggataaggacgtgggcccagccacatgccaactcatgtccaatactgctttgcctggtgtggggaaggattgggtcttgtcccccaacacagcttctgtggctgactgtaatactgtacaactgtttctgaccattaaatgctgttgtactctgtgtggcctctgctgtgtttcctggggaggaagcagcactaggatatagatattcattcgtcataacaggcaatctaagccactctatactacaagagatggatttaaattgtaacctgttcttaccaaagaactaaataaaaaatgagtacagagccagagccagagtttcaaaatattctcatctgttaaattaagagtgtctcccatagaaaagcagtggaggccccacagggcaagtacaaaacagaattaaaactcccaagggtcttgtctttacaaaagaaaaggcaggaggcagcccctggacagctggtcatgctggccgctccggttggaccacgttgcataatcctcagtcgcatcatcacaacgtctctgagcgttttgatggggggagaaggggcagtgtagtgtgtatgggaggagaggcccagagggctctctttgcccccttacccccttttttatatcccagaggaaagtcgggggaacctggctacaccttgaaatgaggctatgtgtttcaaacctggggacggggtaagagaggatctgtgctttgagcaacctgagccagaggcagaggggtgttggaggggtaaggggaggatgcatgatgcttattgctttgtacctttcactgggaaggagggcagcagccaacagtagctcacaggtttgtaaactgagcctgttggctttaagaagggaggcaatgaaatcgaattaaatataaaagagtcatttgtgcaaaaataacttaaacaaataaaagacctggggaagggggtgttccccttagcgcctggtggggaaagggccatataccatcccccccaggccttttcagtgacatggcttcgggggggcggcaagggtggtgggggggggtgaacttc

SEQ ID NO: 282447 - DNA, 1980 bp, Homo sapiens
cggacgcgtgggtcgcggacgcgtggccttctgctgtgctactgctgtcgcgagacttcctgctcatctgccgctccctttgccgccgccttagcccgggacccgaacccagcctctcccctacccgaacaccggccccggctccaccgaggcccgggtcccccagcccgtctcgccgccgccatggcggaccctaaatacgccgaccttcccggcattgccaggaatgagccagatgtttatgaaactagcgacctacctgaggatgatcaagcggagttcgatgcggaggagctgacaagcacaagtgtggaacacatcattgtcaatcctaatgctgcctatgacaagttcaaggacaagagagtggggacaaagggacttgatttctcagatcgtattggaaaaaccaagaggacaggatatgaatctggagaatatgagatgcttggagagggtctgggagtgaaggagacaccccagcaaaagtaccagcgcctactgcatgaggtccaagagctgacaactgaagttgaaaaaatcaagacgacagtgaaggagtcagccacagaggagaagctgacccctgtgttgctggctaaacagctggcagccctgaagcagcagctggttgcttcccacctggagaagctgctgggaccagatgctgcaatcaaccttaccgaccccgatggcgccctggctaagcgcctactactgcagctggaagcaacaaagaacagcaaagggggatcagggggaaaaaccactgggacccccccagatagcagccttgtcacttatgaactacattctcggcctgagcaggacaagttctctcaagctgccaaagtcgcagaacttgaaaagcgcctgacagagctggagacagctgtacgttgtgatcaggatgctcaggcctgggggataaggacgtgggcccagccacatgccaactcatgtccaatactgctttgcctggtgtggggaaggattgggtcttgtcccccaacacagcttctgtggctgactgtaatactgtacaactgtttctgaccattaaatgctgttgtactctgtgtggcctctgctgtgtttcctggggaggaagcagcactaggatatagatattcattcgtcataacaggcaatctaagccactctatactacaagagatggatttaaattgtaacctgttcttaccaaagaactaaataaaaaatgagtacagagccagagccagagtttcaaaatattctcatctgttaaattaagagtgtctcccatagaaaagcagtggaggccccacagggcaagtacaaaacagaattaaaactcccaagggtcttgtctttacaaaagaaaaggcaggaggcagcccctggacagctggtcatgctggccgctccggttggaccacgttgcataatcctcagtcgcatcatcacaacgtctctgagcgttttgatggggggagaaggggcagtgtagtgtgtatgggaggagaggcccagagggctctctttgcccccttacccccttttttatatcccagaggaaagtcgggggaacctggctacaccttgaaatgaggctatgtgtttcaaacctggggacggggtaagagaggatctgtgctttgagcaacctgagccagaggcagaggggtgttggaggggtaaggggaggatgcatgatgcttattgctttgtacctttcactgggaaggagggcagcagccaacagtagctcacaggtttgtaaactgagcctgttggctttaagaagggaggcaatgaaatcgaattaaatataaaagagtcatttgtgcaaaaataacttaaacaaataaaagacctggggaagggggtgttccccttagcgcctggtggggaaagggccatataccatcccccccaggccttttcagtgacatggcttcgggggggcggcaagggtggtgggggggggtgaacttc

SEQ ID NO: 282448 - DNA, 987 bp, Homo sapiens
  misc_feature (956)..(956): n is a, c, g, or t
  misc_feature (971)..(971): n is a, c, g, or t
cggacgcgtgggtcgcggacgcgtggccttctgctgtgctactgctgtcgcgagacttcctgctcatctgccgctccctttgccgccgccttagcccgggacccgaacccagcctctcccctacccgaacaccggccccggctccaccgaggcccgggtcccccagcccgtctcgccgccgccatggcggaccctaaatacgccgaccttcccggcattgccaggaatgagccagatgtttatgaaactagcgacctacctgaggatgatcaagcggagttcgatgcggaggagctgacaagcacaagtgtggaacacatcattgtcaatcctaatgctgcctatgacaagttcaaggacaagagagtggggacaaagggacttgatttctcagatcgtattggaaaaaccaagaggacaggatatgaatctggagaatatgagatgcttggagagggtctgggagtgaaggagacaccccagcaaaagtaccagcgcctactgcatgaggtccaagagctgacaactgaagttgaaaaaatcaagacgacagtgaaggagtcagccacagaggagaagctgacccctgtgttgctggctaaacagctggcagccctgaagcagcagctggttgcttcccacctggagaagctgctgggaccagatgctgcaatcaaccttaccgaccccgatggcgccctggctaagcgcctactactgcagctggaagcaacaaagaacagcaaagggggatcagggggaaaaaccactgggacccccccagatagcagccttgtcacttatgaactacattctcggcctgagcaggacaagttctctcaagctgccaaagtcgcagaacttgaaaagcgcctgacagagctggagacagctgtacgttgtgatcaggatgctcagaatcccctttctgcaggttctacaggaaccttttcccntgaaaatgttaaacntttgcaacaaggttaa

SEQ ID NO: 282449 - DNA, 1553 bp, Homo sapiens
cggacgcgtgggtcgcggacgcgtggccttctgctgtgctactgctgtcgcgagacttcctgctcatctgccgctccctttgccgccgccttagcccgggacccgaacccagcctctcccctacccgaacaccggccccggctccaccgaggcccgggtcccccagcccgtctcgccgccgccatggcggaccctaaatacgccgaccttcccggcattgccaggaatgagccagatgtttatgaaactagcgacctacctgaggatgatcaagcggagttcgatgcggaggagctgacaagcacaagtgtggaacacatcattgtcaatcctaatgctgcctatgacaagttcaaggacaagagagtggggacaaagggacttgatttctcagatcgtattggaaaaaccaagaggacaggatatgaatctggagaatatgagatgcttggagagggtctgggagtgaaggagacaccccagcaaaagtaccagcgcctactgcatgaggtccaagagctgatgccaactcatgtccaatactgctttgcctggtgtggggaaggattgggtcttgtcccccaacacagcttctgtggctgactgtaatactgtacaactgtttctgaccattaaatgctgttgtactctgtgtggcctctgctgtgtttcctggggaggaagcagcactaggatatagatattcattcgtcataacaggcaatctaagccactctatactacaagagatggatttaaattgtaacctgttcttaccaaagaactaaataaaaaatgagtacagagccagagccagagtttcaaaatattctcatctgttaaattaagagtgtctcccatagaaaagcagtggaggccccacagggcaagtacaaaacagaattaaaactcccaagggtcttgtctttacaaaagaaaaggcaggaggcagcccctggacagctggtcatgctggccgctccggttggaccacgttgcataatcctcagtcgcatcatcacaacgtctctgagcgttttgatggggggagaaggggcagtgtagtgtgtatgggaggagaggcccagagggctctctttgcccccttacccccttttttatatcccagaggaaagtcgggggaacctggctacaccttgaaatgaggctatgtgtttcaaacctggggacggggtaagagaggatctgtgctttgagcaacctgagccagaggcagaggggtgttggaggggtaaggggaggatgcatgatgcttattgctttgtacctttcactgggaaggagggcagcagccaacagtagctcacaggtttgtaaactgagcctgttggctttaagaagggaggcaatgaaatcgaattaaatataaaagagtcatttgtgcaaaaataacttaaacaaataaaagacctggggaagggggtgttccccttagcgcctggtggggaaagggccatataccatcccccccaggccttttcagtgacatggcttcgggggggcggcaagggtggtgggggggggtgaacttc

SEQ ID NO: 282450 - DNA, 651 bp, Homo sapiens
cggacgcgtgggtcgcggacgcgtggccttctgctgtgctactgctgtcgcgagacttcctgctcatctgccgctccctttgccgccgccttagcccgggacccgaacccagcctctcccctacccgaacaccggccccggctccaccgaggcccgggtcccccagcccgtctcgccgccgccatggcggaccctaaatacgccgaccttcccggcattgccaggaatgagccagatgtttatgaaactagcgacctacctgaggatgatcaagcggagttcgatgcggaggagctgacaagcacaagtgtggaacacatcattgtcaatcctaatgctgcctatgacaagttcaaggacaagagagtggggacaaagggacttgatttctcagatcgtattggaaaaaccaagaggacaggatatgaatctggagaatatgagatgcttggagagggtctgggagtgaaggagacaccccagcaaaagtaccagcgcctactgcatgaggtccaagagctgatgccaactcatgtccaatactgctttgcctggtgtggggaaggattgggtcttgtcccccaacacagcttctgtggctgactgtaatactgtacaactgtttctgaccattaaatgctgttgtactct

SEQ ID NO: 282451 - DNA, 1947 bp, Homo sapiens
aggtgcagtttgcaagatcatagctcactgctggtctcgaactcctgacctcaagtgatccacccacctcgccctcccaaagtgctgggattacagatgtgagacaccgtgcctggtggaaagaggaatcttggctgggaccctagcatcgtctagggaacagagaggttgtgattaagaggtatctggatgaaatcttggtgaaaggaagcacttgtttttaatcccaccatggtttttcatatgcatacaaccatcctcaaccatctgcccatcagcagagctcctagaaaggcaggacataccactggatatccccttctggcagttctaaaccagccttgcccggaagtgggagccttatctatgtggcccagactcaaataaggcctcttggaaatactctcacccttcccctttgtttaccctccaacccctgtgaatcttgtgaacagagggttgaagaaacatgttctgcacatgtgctagtacctgtgaatcttgatgtcccctggaccctctgtgtaagtacatcatggcagaattgctctagatccttcggagctgcagggtgagttaccagccactcaaggtggaggcaaacatgccaggctgcacaagggaccaggagcagctctgcctcttcccttgcaggaggaaatgagaacggggctatacttaggtacttcatcattcctttaactcaccatctgtacctgacatattttgttttgtctcacctaaagtcatatcagacttcctacctgatcactctcattgtgactgattctgccatccaaatgtctaatttttcacagctagagaaactaagagataggaagacaagggccatgaactaagaaggggaactcctctcctgagaattattgaccctctatcagctacaagtctaagaatttctaacttctgcttcatcttctaccatttctaatagcttccccaccacctcagccttctctccccagtttcttattccatgccactggctggtaacatctaactcctagttttcagatgatcctaaactgctgctgttaatggcaaagcttcatgacatcctcaccaccagagggaaaagggtctcatgctcttctttctcttggggtatatggtgaccccagctgaaatttcttggcccctaaatttcgctaggctcccctggggccctgtggtgcagtgtgttggaagactgtcatgtagtgcatgtgacaatttgctaataacaattttgtcttttttttccctccctcatccccattcccccactccctttccttttaactcttttgattttctcacctctggggaaaccacaaggagctggtaagaagcctgacctttcatctgctttttaacggggtgtgctatgatgagcagttgtttctctgtcctttagactctactaaatctttcattcatctattcagtcccacacccagccttttcctatctcacaagtcactgtaattatactgcccccaactcatgccccagatcttcaagacactgctggagtaggtgctactggaggactagagtgtgctcccgggccacagccttggagaggctccagaggatgccagcgccaggtagcccaactggcccaggacactctcccacagcaggaatgaaaatgctctctgtccctgtgactgtccagaacctctgagactcaccgtctatgtgttgaccctcttctactccccgctttccctacttaggaacgtaaataagaaagtaggttccatctgcatagtgcccgcccataataagggcttaacaaatggtagctatgattaatttttttcctgggtctgtaggttatgcctcccattcctcttttttaagaggattaaacaaaagaggatgggtgggattggcctggattggggctttcacagggagaagtggcatattcctgagtat

SEQ ID NO: 282452 - DNA, 1630 bp, Homo sapiens
cggacgcgtgggtcgcggacgcgtggccttctgctgtgctactgctgtcgcgagacttcctgctcatctgccgctccctttgccgccgccttagcccgggacccgaacccagcctctcccctacccgaacaccggccccggctccaccgaggcccgggtcccccagcccgtctcgccgccgccatggcggaccctaaatacgccgaccttcccggcattgtgagtacaggaccggccccggctccccaggaccgcgcccccgacctcccaaggacccccaacagaaaccagcccgcgacccctcccgcctgcagcccatcctccgcccaagggctcccgccgctcgttctccgatcggcctcagcaccccccgaactcttctgacccgactgggccgggccgccggacggcgcaccaggccccctttccggcagtcgccggtagctcggcccagaaatcgactccgggccaggaatgagccagatgtttatgaaactagcgacctacctgaggatgatcaagcggagttcgatgcgagaatgtgtgctgccacagactcctccggactctgacctttctcccctagacaggtccttccctttctcgggggagctacagcaataagcgggtatgccaaccccagcctgggtggtatataggttgcagggcttgcaaagaccttgctgggcttgcagccaccaatgagcaatggcaggagggagagtcaagtcagcggaattacagctaacaacatctgtttgcaaagccctgattcttgggccttttaaataaaattgaaatatctcaaaacaggtttggagctagtgacttaggcccctgggttctaacccatggaaatgaatcatgaagcctgggcacttgtaataaactgctaccaagaactagactttgaaatatggagaaatactttttccatatgaatatccagtatccattgggcaaggaattaagaaagtgattccaagattttagagcaaaacaaatttgaggaagaatgtaaatatttcacatcagcggatgtgagactgtggttgcatttttagatccgagaattctgaggatggagtaattaggtacggatacattttaactgtgaggggaaacatttagtatggtttattgagtgtgttcattctgtggttttttttgtgcaatgcagaggaagaaatgtctctgcccccaatgagccccagactaatggggaattaggatacatataggaaacatatagaaggaaaaaaaaattgagtgaatggaaatcaacatagtaaaaactctgtttaagtgccaagaggtgtgtttataggatgtgttttaggttctattatttctgaagacagctgggctgggatcacattgatgatgtgagttctcagtaaagatgtgtccaagagtcattgcaatatgcaggctcagtatgcttgtctgtaagtcctgtggctatgtctgtggggctggttaattctggggaatgctgactgctggcttacaatgtgtggcttggcgtactcacttatttcttatttgactcccccatgtggaagtggttcttacattgtgggaaacaccttctctgtcccttctcccagtggtgtgttccttgtggctt

SEQ ID NO: 282453 - DNA, 504 bp, Homo sapiens
  misc_feature (27)..(27): n is a, c, g, or t
  misc_feature (29)..(29): n is a, c, g, or t
taacggctaggtacgaggctgggtggngnaacccagcctctcccctacccgaacaccggccccggctccaccgaggcccgggtcccccagcccgtctcgccgccgccatggcggaccctaaatacgccgaccttcccggcattgtgagtacaggaccggccccggctccccaggaccgcgcccccgacctcccaaggacccccaacagaaaccagcccgcgacccctcccgcctgcagcccatcctccgcccaagggctcccgccgctcgttctccgatcggcctcagcaccccccgaactcttctgacccgactgggccgggccgccggacggcgcaccaggccccctttccggcagtcgccggtagctcggcccagaaatcgactccgggtactgacctcttgtgcctgagtttttccaccatccgtgtcaacgcctcccatgtcccccccaaatctctccataagaccccatcgctaccccagacacacacaccagaccac

SEQ ID NO: 282454 - DNA, 127 bp, Homo sapiens
agaagacgataatcatggagatataaggaccactcacttcttcccttcctttcccaccaaatcccctttctgcaggtctacagggagcctgtctcatggtgagtttggaagaaactggagtgtttgg

SEQ ID NO: 282455 - DNA, 214 bp, Homo sapiens
gcttgaaaattggtgctataaacatcccccctctgtggcccacaaattgtgcttccatttcttgtcttctctctcagagaattccttcaggtcctcatccagttaagcaactggacctgacaaagagtaaaacctctctaccactttgtaggtgcagacaaccatgcgtgaaaacctggccacagttgaggggaactttgccagcattgatgaa

SEQ ID NO: 282456 - DNA, 409 bp, Homo sapiens
actggaggataagcatgagaagtggtttcctgtcctaaagtcttagtgagttgtgcttgggggaaggggtccctcatggagatattttatggaagccctcacagtcacctgagaccatgactgccttgggcctagatcaggccctcagttccatcttcttttcttggcagatttctcagatcgtattggaaaaaccaagaggacaggatatgaatctggagaatatgagatggtttgttgtgtgtgtgtgtgtgttgatgggaatggtgtagtgaccctatctagcagacatgtagtagggagatcaagggatacaggcgggattctgttcctcctctgttcctgaggaagcagcaggatgcagccagggaaactctgccctactgctgtttgttctggagagcctcca

SEQ ID NO: 282457 - DNA, 1928 bp, Homo sapiens
cggacgcgtgggtcgcggacgcgtggccttctgctgtgctactgctgtcgcgagacttcctgctcatctgccgctccctttgccgccgccttagcccgggacccgaacccagcctctcccctacccgaacaccggccccggctccaccgaggcccgggtcccccagcccgtctcgccgccgccatggcggaccctaaatacgccgaccttcccggcattgccaggaatgagccagatgtttatgaaactagcgacctacctgaggatgatcaagcggagttcgatgcggaggagctgacaagcacaagtgtggaacacatcattgtcaatcctaatgctgcctatgacaagttcaaggacaagagagtggggacaaagggacttgatttctcagatcgtattggaaaaaccaagaggacaggatatgaatctggagaatatgagatgcttggagagggtctgggagtgaaggagacaccccagcaaaagtaccagcgcctactgcatgaggtccaagagctgacaactgaagttgaaaaaatcaagacgacagtgaaggagtcagccacagaggagaagctgacccctgtgttgctggctaaacagctggcagccctgaagcagcagctggttgcttcccacctggagaagctgctgggaccagatgctgcaatcaaccttaccgaccccgatggcgccctggctaagcgcctactactgcagctggaagcaacaaagaacagcaaagggggatcagggggaaaaaccactgggacccccccagatagcagccttgtcacttatgaactacattctcggcctgagcaggacaagttctctcaagctgccaaagtcgcagaacttgaaaagcgcctgacagagctggagacagctgtacgttgtgatcaggatgctcagaatcccctttctgcaggtctacagggagcctgtctcatggagactgtagagctgttgcaagcaaaggtgagcgccctagaccttgcagttttggatcaagtggaggctcggctacagagtgtcctgggaaaggtgaacgagattgccaagcataaagcctctgtagaagatgcagatacacaaagcaaggtgcaccagctatatgaaactatacagcgctggagccccattgcctccaccctccctgagctggtgcagagacttgtcaccatcaagcagctgcacgagcaagccatgcagtttggtcagctcctgacacacttggataccacccagcagatgattgctaattccttgaaggacaataccaccctcttgacccaggtgcagacaaccatgcgtgaaaacctggccacagttgaggggaactttgccagcattgatgaacggatgaagaagctgggaaagtgagcacatttgggagctggagaacaggggttatccctacccctgtgaactctgttaacagcttacatagggtttcccctttactataactctagcatccccatcccatttgacactgggggcaagggttcttcttgcatgtggggtttatacccctcccctgatgaatacagagtggtagctaggggttggttatcatcagaaggtggtctcccctcaggcctgggggataaggacgtgggcccagccacatgccaactcatgtccaatactgctttgcctggtgtggggaaggattgggtcttgtcccccaacacagcttctgtggctgactgtaatactgtacaactgtttctgaccattaaatgctgttgtactctgtgtggcctctgctgtgtttcctggggaggaagcagcactaggatatagatattcattcgtcataacaggcaatctaagccactctatactacaagagatggatttaaattgtaacctgttcttaccaaagaactaaataaaaaatgagtacagagccagag

SEQ ID NO: 282458 - DNA, 2621 bp, Homo sapiens
cggacgcgtgggtcgcggacgcgtggccttctgctgtgctactgctgtcgcgagacttcctgctcatctgccgctccctttgccgccgccttagcccgggacccgaacccagcctctcccctacccgaacaccggccccggctccaccgaggcccgggtcccccagcccgtctcgccgccgccatggcggaccctaaatacgccgaccttcccggcattgccaggaatgagccagatgtttatgaaactagcgacctacctgaggatgatcaagcggagttcgatgcggaggagctgacaagcacaagtgtggaacacatcattgtcaatcctaatgctgcctatgacaagttcaaggacaagagagtggggacaaagggacttgatttctcagatcgtattggaaaaaccaagaggacaggatatgaatctggagaatatgagatgcttggagagggtctgggagtgaaggagacaccccagcaaaagtaccagcgcctactgcatgaggtccaagagctgacaactgaagttgaaaaaatcaagacgacagtgaaggagtcagccacagaggagaagctgacccctgtgttgctggctaaacagctggcagccctgaagcagcagctggttgcttcccacctggagaagctgctgggaccagatgctgcaatcaaccttaccgaccccgatggcgccctggctaagcgcctactactgcagctggaagcaacaaagaacagcaaagggggatcagggggaaaaaccactgggacccccccagatagcagccttgtcacttatgaactacattctcggcctgagcaggacaagttctctcaagctgccaaagtcgcagaacttgaaaagcgcctgacagagctggagacagctgtacgttgtgatcaggatgctcagaatcccctttctgcaggtctacagggagcctgtctcatggagactgtagagctgttgcaagcaaaggtgagcgccctagaccttgcagttttggatcaagtggaggctcggctacagagtgtcctgggaaaggtgaacgagattgccaagcataaagcctctgtagaagatgcagatacacaaagcaaggtgcaccagctatatgaaactatacagcgctggagccccattgcctccaccctccctgagctggtgcagagacttgtcaccatcaagcagctgcacgagcaagccatgcagtttggtcagctcctgacacacttggataccacccagcagatgattgctaattccttgaaggacaataccaccctcttgacccaggtgcagacaaccatgcgtgaaaacctggccacagttgaggggaactttgccagcattgatgaacggatgaagaagctgggaaagtgagcacatttgggagctggagaacaggggttatccctacccctgtgaactctgttaacagcttacatagggtttcccctttactataactctagcatccccatcccatttgacactgggggcaagggttcttcttgcatgtggggtttatacccctcccctgatgaatacagagtggtagctaggggttggttatcatcagaaggtggtctcccctcaggcctgggggataaggacgtgggcccagccacatgccaactcatgtccaatactgctttgcctggtgtggggaaggattgggtcttgtcccccaacacagcttctgtggctgactgtaatactgtacaactgtttctgaccattaaatgctgttgtactctgtgtggcctctgctgtgtttcctggggaggaagcagcactaggatatagatattcattcgtcataacaggcaatctaagccactctatactacaagagatggatttaaattgtaacctgttcttaccaaagaactaaataaaaaatgagtacagagccagagccagagtttcaaaatattctcatctgttaaattaagagtgtctcccatagaaaagcagtggaggccccacagggcaagtacaaaacagaattaaaactcccaagggtcttgtctttacaaaagaaaaggcaggaggcagcccctggacagctggtcatgctggccgctccggagcgttttgatggggggagaaggggcagtgtagtgtgtatgggaggagaggcccagagggctctctttgcccccttacccccttttttatatcccagaggaaagtcgggggaacctggctacaccttgaaatgaggctatgtgtttcaaacctggggacggggtaagagaggatctgtgctttgagcaacctgagccagaggcagaggggtgttggaggggtaaggggaggatgcatgatgcttattgctttgtacctttcactgggaaggagggcagcagccaacagtagctcacaggtttgtaaactgagcctgttggctttaagaagggaggcaatgaaatcgaattaaatataaaagagtcatttgtgcaaaaataacttaaacaaataaaagacctggggaagggggtgttccccttagcgcctggtggggaaagggccatataccatcccccccaggccttttcagtgacatggcttcgggggggcggcaagggtggtgggggggggtgaacttc

SEQ ID NO: 282459 - DNA, 2297 bp, Homo sapiens
cggacgcgtgggtcgcggacgcgtggccttctgctgtgctactgctgtcgcgagacttcctgctcatctgccgctccctttgccgccgccttagcccgggacccgaacccagcctctcccctacccgaacaccggccccggctccaccgaggcccgggtcccccagcccgtctcgccgccgccatggcggaccctaaatacgccgaccttcccggcattgccaggaatgagccagatgtttatgaaactagcgacctacctgaggatgatcaagcggagttcgatgcggaggagctgacaagcacaagtgtggaacacatcattgtcaatcctaatgctgcctatgacaagttcaaggacaagagagtggggacaaagggacttgatttctcagatcgtattggaaaaaccaagaggacaggatatgaatctggagaatatgagatgcttggagagggtctgggagtgaaggagacaccccagcaaaagtaccagcgcctactgcatgaggtccaagagctgacaactgaagttgaaaaaatcaagacgacagtgaaggagtcagccacagaggagaagctgacccctgtgttgctggctaaacagctggcagccctgaagcagcagctggttgcttcccacctggagaagctgctgggaccagatgctgcaatcaaccttaccgaccccgatggcgccctggctaagcgcctactactgcagctggaagcaacaaagaacagcaaagggggatcagggggaaaaaccactgggacccccccagatagcagccttgtcacttatgaactacattctcggcctgagcaggacaagttctctcaagctgccaaagtcgcagaacttgaaaagcgcctgacagagctggagacagctgtacgttgtgatcaggatgctcagaatcccctttctgcaggtctacagggagcctgtctcatggagactgtagagctgttgcaagcaaaggtgagcgccctagaccttgcagttttggatcaagtggaggctcggctacagagtgtcctgggaaaggtgaacgagattgccaagcataaagcctctgtagaagatgcagatacacaaagcaaggtgcaccagctatatgaaactatacagcgctggagccccattgcctccaccctccctgagctggtgcagagacttgtcaccatcaagcagctgcacgagcaagccatgcagtttggtcagctcctgacacacttggataccacccagcagatgattgctaattccttgaaggacaataccaccctcttgacccaggtgcagacaaccatgcgtgaaaacctggccacagttgaggggaactttgccagcattgatgaacggatgaagaagctgggaaagtgagcacatttgggagctggagaacaggggttatccctacccctgtgaactctgttaacagcttacatagggtttcccctttactataactctagcatccccatcccatttgacactgggggcaagggttcttcttgcatgtggggtttatacccctcccctgatgaatacagagtggtagctaggggttggttatcatcagaaggtggtctcccctcaggcctgggggataaggacgtgggcccagccacatgccaactcatgtccaatactgctttgcctggtgtggggaaggattgggtcttgtcccccaacacagcttctgtggctgactgtaatactgtacaactgtttctgaccattaaatgctgttgtactctgtgtggcctctgctgtgtttcctggggaggaagcagcactaggatatagatattcattcgtcataacaggcaatctaagccactctatactacaagagatggatttaaattgtaacctgttcttaccaaagaactaaataaaaaatgagtacagagccagagccagagtttcaaaatattctcatctgttaaattaagagtgtctcccatagaaaagcagtggaggccccacagggcaagtacaaaacagaattaaaactcccaagggtcttgtctttacaaaagaaaaggcaggaggcaagggagaggcaaggccccaagcatcccagggaagccagctccactcagtgccaggccctgctcagggctggggaaagggaaagcctctccaccagccaggggaggcagagggcaggccggcctgcccccatccccagtccttcggatgggctttgaagcacagggctggggactactggggctttggaggcagctggtggggcaggggcacctgtaaaagaggagagaaat

SEQ ID NO: 282460 - DNA, 2592 bp, Homo sapiens
  misc_feature (27)..(27): n is a, c, g, or t
  misc_feature (29)..(29): n is a, c, g, or t
taacggctaggtacgaggctgggtggngnaacccagcctctcccctacccgaacaccggccccggctccaccgaggcccgggtcccccagcccgtctcgccgccgccatggcggaccctaaatacgccgaccttcccggcattgccaggaatgagccagatgtttatgaaactagcgacctacctgaggatgatcaagcggagttcgatgcggaggagctgacaagcacaagtgtggaacacatcattgtcaatcctaatgctgcctatgacaagttcaaggacaagagagtggggacaaagggacttgatttctcagatcgtattggaaaaaccaagaggacaggatatgaatctggagaatatgagatgcttggagagggtctgggagtgaaggagacaccccagcaaaagtaccagcgcctactgcatgaggtccaagagctgacaactgaagttgaaaaaatcaagacgacagtgaaggagtcagccacagaggagaagctgacccctgtgttgctggctaaacagctggcagccctgaagcagcagctggttgcttcccacctggagaagctgctgggaccagatgctgcaatcaaccttaccgaccccgatggcgccctggctaagcgcctactactgcagctggaagcaacaaagaacagcaaagggggatcagggggaaaaaccactgggacccccccagatagcagccttgtcacttatgaactacattctcggcctgagcaggacaagttctctcaagctgccaaagtcgcagaacttgaaaagcgcctgacagagctggagacagctgtacgttgtgatcaggatgctcagaatcccctttctgcaggtctacagggagcctgtctcatggagactgtagagctgttgcaagcaaaggtgagcgccctagaccttgcagttttggatcaagtggaggctcggctacagagtgtcctgggaaaggtgaacgagattgccaagcataaagcctctgtagaagatgcagatacacaaagcaaggtgcaccagctatatgaaactatacagcgctggagccccattgcctccaccctccctgagctggtgcagagacttgtcaccatcaagcagctgcacgagcaagccatgcagtttggtcagctcctgacacacttggataccacccagcagatgattgctaattccttgaaggacaataccaccctcttgacccaggtgcagacaaccatgcgtgaaaacctggccacagttgaggggaactttgccagcattgatgaacggatgaagaagctgggaaagtgagcacatttgggagctggagaacaggggttatccctacccctgtgaactctgttaacagcttacatagggtttcccctttactataactctagcatccccatcccatttgacactgggggcaagggttcttcttgcatgtggggtttatacccctcccctgatgaatacagagtggtagctaggggttggttatcatcagaaggtggtctcccctcaggcctgggggataaggacgtgggcccagccacatgccaactcatgtccaatactgctttgcctggtgtggggaaggattgggtcttgtcccccaacacagcttctgtggctgactgtaatactgtacaactgtttctgaccattaaatgctgttgtactctgtgtggcctctgctgtgtttcctggggaggaagcagcactaggatatagatattcattcgtcataacaggcaatctaagccactctatactacaagagatggatttaaattgtaacctgttcttaccaaagaactaaataaaaaatgagtacagagccagagccagagtttcaaaatattctcatctgttaaattaagagtgtctcccatagaaaagcagtggaggccccacagggcaagtacaaaacagaattaaaactcccaagggtcttgtctttacaaaagaaaaggcaggaggcagcccctggacagctggtcatgctggccgctccggttggaccacgttgcataatcctcagtcgcatcatcacaacgtctctgagcgttttgatggggggagaaggggcagtgtagtgtgtatgggaggagaggcccagagggctctctttgcccccttacccccttttttatatcccagaggaaagtcgggggaacctggctacaccttgaaatgaggctatgtgtttcaaacctggggacggggtaagagaggatctgtgctttgagcaacctgagccagaggcagaggggtgttggaggggtaaggggaggatgcatgatgcttattgctttgtacctttcactgggaaggagggcagcagccaacagtagctcacaggtttgtaaactgagcctgttggctttaagaagggaggcaatgaaatcgaattaaatataaaagagtcatttgtgcaaaaataacttaaacaaataaaagacctggggaagggggtgttccccttagcgcctggtggggaaagggccatataccatcccccccaggccttttcagtgacatggcttcgggggggcggcaagggtggtgggggggggtgaacttc

SEQ ID NO: 282461 - DNA, 2916 bp, Homo sapiens
cggacgcgtgggtcgcggacgcgtggccttctgctgtgctactgctgtcgcgagacttcctgctcatctgccgctccctttgccgccgccttagcccgggacccgaacccagcctctcccctacccgaacaccggccccggctccaccgaggcccgggtcccccagcccgtctcgccgccgccatggcggaccctaaatacgccgaccttcccggcattgtgagtacaggaccggccccggctccccaggaccgcgcccccgacctcccaaggacccccaacagaaaccagcccgcgacccctcccgcctgcagcccatcctccgcccaagggctcccgccgctcgttctccgatcggcctcagcaccccccgaactcttctgacccgactgggccgggccgccggacggcgcaccaggccccctttccggcagtcgccggtagctcggcccagaaatcgactccgggccaggaatgagccagatgtttatgaaactagcgacctacctgaggatgatcaagcggagttcgatgcggaggagctgacaagcacaagtgtggaacacatcattgtcaatcctaatgctgcctatgacaagttcaaggacaagagagtggggacaaagggacttgatttctcagatcgtattggaaaaaccaagaggacaggatatgaatctggagaatatgagatgcttggagagggtctgggagtgaaggagacaccccagcaaaagtaccagcgcctactgcatgaggtccaagagctgacaactgaagttgaaaaaatcaagacgacagtgaaggagtcagccacagaggagaagctgacccctgtgttgctggctaaacagctggcagccctgaagcagcagctggttgcttcccacctggagaagctgctgggaccagatgctgcaatcaaccttaccgaccccgatggcgccctggctaagcgcctactactgcagctggaagcaacaaagaacagcaaagggggatcagggggaaaaaccactgggacccccccagatagcagccttgtcacttatgaactacattctcggcctgagcaggacaagttctctcaagctgccaaagtcgcagaacttgaaaagcgcctgacagagctggagacagctgtacgttgtgatcaggatgctcagaatcccctttctgcaggtctacagggagcctgtctcatggagactgtagagctgttgcaagcaaaggtgagcgccctagaccttgcagttttggatcaagtggaggctcggctacagagtgtcctgggaaaggtgaacgagattgccaagcataaagcctctgtagaagatgcagatacacaaagcaaggtgcaccagctatatgaaactatacagcgctggagccccattgcctccaccctccctgagctggtgcagagacttgtcaccatcaagcagctgcacgagcaagccatgcagtttggtcagctcctgacacacttggataccacccagcagatgattgctaattccttgaaggacaataccaccctcttgacccaggtgcagacaaccatgcgtgaaaacctggccacagttgaggggaactttgccagcattgatgaacggatgaagaagctgggaaagtgagcacatttgggagctggagaacaggggttatccctacccctgtgaactctgttaacagcttacatagggtttcccctttactataactctagcatccccatcccatttgacactgggggcaagggttcttcttgcatgtggggtttatacccctcccctgatgaatacagagtggtagctaggggttggttatcatcagaaggtggtctcccctcaggcctgggggataaggacgtgggcccagccacatgccaactcatgtccaatactgctttgcctggtgtggggaaggattgggtcttgtcccccaacacagcttctgtggctgactgtaatactgtacaactgtttctgaccattaaatgctgttgtactctgtgtggcctctgctgtgtttcctggggaggaagcagcactaggatatagatattcattcgtcataacaggcaatctaagccactctatactacaagagatggatttaaattgtaacctgttcttaccaaagaactaaataaaaaatgagtacagagccagagccagagtttcaaaatattctcatctgttaaattaagagtgtctcccatagaaaagcagtggaggccccacagggcaagtacaaaacagaattaaaactcccaagggtcttgtctttacaaaagaaaaggcaggaggcagcccctggacagctggtcatgctggccgctccggttggaccacgttgcataatcctcagtcgcatcatcacaacgtctctgagcgttttgatggggggagaaggggcagtgtagtgtgtatgggaggagaggcccagagggctctctttgcccccttacccccttttttatatcccagaggaaagtcgggggaacctggctacaccttgaaatgaggctatgtgtttcaaacctggggacggggtaagagaggatctgtgctttgagcaacctgagccagaggcagaggggtgttggaggggtaaggggaggatgcatgatgcttattgctttgtacctttcactgggaaggagggcagcagccaacagtagctcacaggtttgtaaactgagcctgttggctttaagaagggaggcaatgaaatcgaattaaatataaaagagtcatttgtgcaaaaataacttaaacaaataaaagacctggggaagggggtgttccccttagcgcctggtggggaaagggccatataccatcccccccaggccttttcagtgacatggcttcgggggggcggcaagggtggtgggggggggtgaacttc

SEQ ID NO: 282462 - DNA, 2634 bp, Homo sapiens
  misc_feature (27)..(27): n is a, c, g, or t
  misc_feature (29)..(29): n is a, c, g, or t
taacggctaggtacgaggctgggtggngnaacccagcctctcccctacccgaacaccggccccggctccaccgaggcccgggtcccccagcccgtctcgccgccgccatggcggaccctaaatacgccgaccttcccggcattgccaggaatgagccagatgtttatgaaactagcgacctacctgaggatgatcaagcggagttcgatgcggagctggtaagaagcctgacctttcatctgctttttaacggggaggagctgacaagcacaagtgtggaacacatcattgtcaatcctaatgctgcctatgacaagttcaaggacaagagagtggggacaaagggacttgatttctcagatcgtattggaaaaaccaagaggacaggatatgaatctggagaatatgagatgcttggagagggtctgggagtgaaggagacaccccagcaaaagtaccagcgcctactgcatgaggtccaagagctgacaactgaagttgaaaaaatcaagacgacagtgaaggagtcagccacagaggagaagctgacccctgtgttgctggctaaacagctggcagccctgaagcagcagctggttgcttcccacctggagaagctgctgggaccagatgctgcaatcaaccttaccgaccccgatggcgccctggctaagcgcctactactgcagctggaagcaacaaagaacagcaaagggggatcagggggaaaaaccactgggacccccccagatagcagccttgtcacttatgaactacattctcggcctgagcaggacaagttctctcaagctgccaaagtcgcagaacttgaaaagcgcctgacagagctggagacagctgtacgttgtgatcaggatgctcagaatcccctttctgcaggtctacagggagcctgtctcatggagactgtagagctgttgcaagcaaaggtgagcgccctagaccttgcagttttggatcaagtggaggctcggctacagagtgtcctgggaaaggtgaacgagattgccaagcataaagcctctgtagaagatgcagatacacaaagcaaggtgcaccagctatatgaaactatacagcgctggagccccattgcctccaccctccctgagctggtgcagagacttgtcaccatcaagcagctgcacgagcaagccatgcagtttggtcagctcctgacacacttggataccacccagcagatgattgctaattccttgaaggacaataccaccctcttgacccaggtgcagacaaccatgcgtgaaaacctggccacagttgaggggaactttgccagcattgatgaacggatgaagaagctgggaaagtgagcacatttgggagctggagaacaggggttatccctacccctgtgaactctgttaacagcttacatagggtttcccctttactataactctagcatccccatcccatttgacactgggggcaagggttcttcttgcatgtggggtttatacccctcccctgatgaatacagagtggtagctaggggttggttatcatcagaaggtggtctcccctcaggcctgggggataaggacgtgggcccagccacatgccaactcatgtccaatactgctttgcctggtgtggggaaggattgggtcttgtcccccaacacagcttctgtggctgactgtaatactgtacaactgtttctgaccattaaatgctgttgtactctgtgtggcctctgctgtgtttcctggggaggaagcagcactaggatatagatattcattcgtcataacaggcaatctaagccactctatactacaagagatggatttaaattgtaacctgttcttaccaaagaactaaataaaaaatgagtacagagccagagccagagtttcaaaatattctcatctgttaaattaagagtgtctcccatagaaaagcagtggaggccccacagggcaagtacaaaacagaattaaaactcccaagggtcttgtctttacaaaagaaaaggcaggaggcagcccctggacagctggtcatgctggccgctccggttggaccacgttgcataatcctcagtcgcatcatcacaacgtctctgagcgttttgatggggggagaaggggcagtgtagtgtgtatgggaggagaggcccagagggctctctttgcccccttacccccttttttatatcccagaggaaagtcgggggaacctggctacaccttgaaatgaggctatgtgtttcaaacctggggacggggtaagagaggatctgtgctttgagcaacctgagccagaggcagaggggtgttggaggggtaaggggaggatgcatgatgcttattgctttgtacctttcactgggaaggagggcagcagccaacagtagctcacaggtttgtaaactgagcctgttggctttaagaagggaggcaatgaaatcgaattaaatataaaagagtcatttgtgcaaaaataacttaaacaaataaaagacctggggaagggggtgttccccttagcgcctggtggggaaagggccatataccatcccccccaggccttttcagtgacatggcttcgggggggcggcaagggtggtgggggggggtgaacttc

SEQ ID NO: 282463 - DNA, 1766 bp, Homo sapiens
cggacgcgtgggtcgcggacgcgtggccttctgctgtgctactgctgtcgcgagacttcctgctcatctgccgctccctttgccgccgccttagcccgggacccgaacccagcctctcccctacccgaacaccggccccggctccaccgaggcccgggtcccccagcccgtctcgccgccgccatggcggaccctaaatacgccgaccttcccggcattgccaggaatgagccagatgtttatgaaactagcgacctacctgaggatgatcaagcggagttcgatgcggaggagctgacaagcacaagtgtggaacacatcattgtcaatcctaatgctgcctatgacaagttcaaggacaagagagtggggacaaagggacttgatttctcagatcgtattggaaaaaccaagaggacaggatatgaatctggagaatatgagatgcttggagagggtctgggagtgaaggagacaccccagcaaaagtaccagcgcctactgcatgaggtccaagagctgacaactgaagttgaaaaaatcaagacgacagtgaaggagtcagccacagaggagaagctgacccctgtgttgctggctaaacagctggcagccctgaagcagcagctggttgcttcccacctggagaagctgctgggaccagatgctgcaatcaaccttaccgaccccgatggcgccctggctaagcgcctactactgcagctggaagcaacaaagaacagcaaagggggatcagggggaaaaaccactgggacccccccagatagcagccttgtcacttatgaactacattctcggcctgagcaggacaagttctctcaagctgccaaagtcgcagaacttgaaaagcgcctgacagagctggagacagctgtacgttgtgatcaggatgctcagaatcccctttctgcaggtctacagggagcctgtctcatggagactgtagagctgttgcaagcaaaggtgagcgccctagaccttgcagttttggatcaagtggaggctcggctacagagtgtcctgggaaaggtgaacgagattgccaagcataaagcctctgtagaagatgcagatacacaaagcaaggtgcaccagctatatgaaactatacagcgctggagccccattgcctccaccctccctgagctggtgcagagacttgtcaccatcaagcagctgcacgagcaagccatgcagtttggtcagctcctgacacacttggataccacccagcagatgattgctaattccttgaaggacaataccaccctcttgacccaggtgcagacaaccatgcgtgaaaacctggccacagttgaggggaactttgccagcattgatgaacggatgaagaagctgggaaagtgagcacatttgggagctggagaacaggggttatccctacccctgtgaactctgttaacagcttacatagggtttcccctttactataactctagcatccccatcccatttgacactgggggcaagggttcttcttgcatgtggggtttatacccctcccctgatgaatacagagtggtagctaggggttggttatcatcagaaggtggtctcccctcaggcctgggggataaggacgtgggcccagccacatgccaactcatgtccaatactgctttgcctggtgtggggaaggattgggtcttgtcccccaacacagcttctgtggctgactgtaatactgtacaactgtttctgaccattaaatgctgttgtactct

SEQ ID NO: 282464 - DNA, 1806 bp, Homo sapiens
  misc_feature (1778)..(1778): n is a, c, g, or t
  misc_feature (1784)..(1784): n is a, c, g, or t
cggacgcgtgggtcgcggacgcgtggccttctgctgtgctactgctgtcgcgagacttcctgctcatctgccgctccctttgccgccgccttagcccgggacccgaacccagcctctcccctacccgaacaccggccccggctccaccgaggcccgggtcccccagcccgtctcgccgccgccatggcggaccctaaatacgccgaccttcccggcattgccaggaatgagccagatgtttatgaaactagcgacctacctgaggatgatcaagcggagttcgatgcggaggagctgacaagcacaagtgtggaacacatcattgtcaatcctaatgctgcctatgacaagttcaaggacaagagagtggggacaaagggacttgatttctcagatcgtattggaaaaaccaagaggacaggatatgaatctggagaatatgagatgcttggagagggtctgggagtgaaggagacaccccagcaaaagtaccagcgcctactgcatgaggtccaagagctgacaactgaagttgaaaaaatcaagacgacagtgaaggagtcagccacagaggagaagctgacccctgtgttgctggctaaacagctggcagccctgaagcagcagctggttgcttcccacctggagaagctgctgggaccagatgctgcaatcaaccttaccgaccccgatggcgccctggctaagcgcctactactgcagctggaagcaacaaagaacagcaaagggggatcagggggaaaaaccactgggacccccccagatagcagccttgtcacttatgaactacattctcggcctgagcaggacaagttctctcaagctgccaaagtcgcagaacttgaaaagcgcctgacagagctggagacagctgtacgttgtgatcaggatgctcagaatcccctttctgcaggtctacagggagcctgtctcatggagactgtagagctgttgcaagcaaaggtgagcgccctagaccttgcagttttggatcaagtggaggctcggctacagagtgtcctgggaaaggtgaacgagattgccaagcataaagcctctgtagaagatgcagatacacaaagcaaggtgcaccagctatatgaaactatacagcgctggagccccattgcctccaccctccctgagctggtgcagagacttgtcaccatcaagcagctgcacgagcaagccatgcagtttggtcagctcctgacacacttggataccacccagcagatgattgctaattccttgaaggacaataccaccctcttgacccaggtgcagacaaccatgcgtgaaaacctggccacagttgaggggaactttgccagcattgatgaacggatgaagaagctgggaaagtgagcacatttgggagctggagaacaggggttatccctacccctgtgaactctgttaacagcttacatagggtttcccctttactataactctagcatccccatcccatttgacactgggggcaagggttcttcttgcatgtggggtttatacccctcccctgatgaatacagagtggtagctaggggttggttatcatcagaaggtggtctcccctcaggcctgggggataaggacgtgggcccagccacatgccaactcatgtccaatactgctttgcctggtgtggggaaggattgggtcttgtcccccaacacagcttctgtggctgactgtaatactgtacaactgtttctgaccattaaatgctgttgtactctaaaaaaaaaaanaacaanaacacaacacacacacaacagg

SEQ ID NO: 282465 - DNA, 2883 bp, Homo sapiens
cggacgcgtgggtcgcggacgcgtggccttctgctgtgctactgctgtcgcgagacttcctgctcatctgccgctccctttgccgccgccttagcccgggacccgaacccagcctctcccctacccgaacaccggccccggctccaccgaggcccgggtcccccagcccgtctcgccgccgccatggcggaccctaaatacgccgaccttcccggcattgccaggaatgagccagatgtttatgaaactagcgacctacctgaggatgatcaagcggagttcgatgcggaggagctgacaagcacaagtgtggaacacatcattgtcaatcctaatgctgcctatgacaagttcaaggacaagagagtggggacaaagggacttgatttctcagatcgtattggaaaaaccaagaggacaggatatgaatctggagaatatgagatgcttggagagggtctgggagtgaaggagacaccccagcaaaagtaccagcgcctactgcatgaggtccaagagctgacaactgaagttgaaaaaatcaagacgacagtgaaggagtcagccacagaggagaagctgacccctgtgttgctggctaaacagctggcagccctgaagcagcagctggttgcttcccacctggagaagctgctgggaccagatgctgcaatcaaccttaccgaccccgatggcgccctggctaagcgcctactactgcagctggaagcaacaaagaacagcaaagggggatcagggggaaaaaccactgggacccccccagatagcagccttgtcacttatgaactacattctcggcctgagcaggacaagttctctcaagctgccaaagtcgcagaacttgaaaagcgcctgacagagctggagacagctgtacgttgtgatcaggatgctcagggtcaggtgttctcctgtacataatctgagccttagatcctgcaactctaggccttaaggtctacaacattccacataagcctgggaggagtcatcaaagggcttcagttacagggatcagctagtgggttcccagctagaaccaggaaagatgggagaagacgataatcatggagatataaggaccactcacttcttcccttcctttcccaccaaatcccctttctgcaggtctacagggagcctgtctcatggagactgtagagctgttgcaagcaaaggtgagcgccctagaccttgcagttttggatcaagtggaggctcggctacagagtgtcctgggaaaggtgaacgagattgccaagcataaagcctctgtagaagatgcagatacacaaagcaaggtgcaccagctatatgaaactatacagcgctggagccccattgcctccaccctccctgagctggtgcagagacttgtcaccatcaagcagctgcacgagcaagccatgcagtttggtcagctcctgacacacttggataccacccagcagatgattgctaattccttgaaggacaataccaccctcttgacccaggtgcagacaaccatgcgtgaaaacctggccacagttgaggggaactttgccagcattgatgaacggatgaagaagctgggaaagtgagcacatttgggagctggagaacaggggttatccctacccctgtgaactctgttaacagcttacatagggtttcccctttactataactctagcatccccatcccatttgacactgggggcaagggttcttcttgcatgtggggtttatacccctcccctgatgaatacagagtggtagctaggggttggttatcatcagaaggtggtctcccctcaggcctgggggataaggacgtgggcccagccacatgccaactcatgtccaatactgctttgcctggtgtggggaaggattgggtcttgtcccccaacacagcttctgtggctgactgtaatactgtacaactgtttctgaccattaaatgctgttgtactctgtgtggcctctgctgtgtttcctggggaggaagcagcactaggatatagatattcattcgtcataacaggcaatctaagccactctatactacaagagatggatttaaattgtaacctgttcttaccaaagaactaaataaaaaatgagtacagagccagagccagagtttcaaaatattctcatctgttaaattaagagtgtctcccatagaaaagcagtggaggccccacagggcaagtacaaaacagaattaaaactcccaagggtcttgtctttacaaaagaaaaggcaggaggcagcccctggacagctggtcatgctggccgctccggttggaccacgttgcataatcctcagtcgcatcatcacaacgtctctgagcgttttgatggggggagaaggggcagtgtagtgtgtatgggaggagaggcccagagggctctctttgcccccttacccccttttttatatcccagaggaaagtcgggggaacctggctacaccttgaaatgaggctatgtgtttcaaacctggggacggggtaagagaggatctgtgctttgagcaacctgagccagaggcagaggggtgttggaggggtaaggggaggatgcatgatgcttattgctttgtacctttcactgggaaggagggcagcagccaacagtagctcacaggtttgtaaactgagcctgttggctttaagaagggaggcaatgaaatcgaattaaatataaaagagtcatttgtgcaaaaataacttaaacaaataaaagacctggggaagggggtgttccccttagcgcctggtggggaaagggccatataccatcccccccaggccttttcagtgacatggcttcgggggggcggcaagggtggtgggggggggtgaacttc

SEQ ID NO: 282466 - DNA, 1811 bp, Homo sapiens
  misc_feature (27)..(27): n is a, c, g, or t
  misc_feature (29)..(29): n is a, c, g, or t
taacggctaggtacgaggctgggtggngntggagacagctgtacgttgtgatcaggatgctaatcccctttctgcaggtctacagggagcctgtctcatggagactgtagagctgttgcaagcaaaggtgagcgccctagaccttgcagttttggatcaagtggaggctcggctacagagtgtcctgggaaaggtgaacgagattgccaagcataaagcctctgtagaagatgcagatacacaaagcaaggtgcaccagctatatgaaactatacagcgctggagccccattgcctccaccctccctgagctggtgcagagacttgtcaccatcaagcagctgcacgagcaagccatgcagtttggtcagctcctgacacacttggataccacccagcagatgattgctaattccttgaaggacaataccaccctcttgacccaggtgcagacaaccatgcgtgaaaacctggccacagttgaggggaactttgccagcattgatgaacggatgaagaagctgggaaagtgagcacatttgggagctggagaacaggggttatccctacccctgtgaactctgttaacagcttacatagggtttcccctttactataactctagcatccccatcccatttgacactgggggcaagggttcttcttgcatgtggggtttatacccctcccctgatgaatacagagtggtagctaggggttggttatcatcagaaggtggtctcccctcaggcctgggggataaggacgtgggcccagccacatgccaactcatgtccaatactgctttgcctggtgtggggaaggattgggtcttgtcccccaacacagcttctgtggctgactgtaatactgtacaactgtttctgaccattaaatgctgttgtactctgtgtggcctctgctgtgtttcctggggaggaagcagcactaggatatagatattcattcgtcataacaggcaatctaagccactctatactacaagagatggatttaaattgtaacctgttcttaccaaagaactaaataaaaaatgagtacagagccagagccagagtttcaaaatattctcatctgttaaattaagagtgtctcccatagaaaagcagtggaggccccacagggcaagtacaaaacagaattaaaactcccaagggtcttgtctttacaaaagaaaaggcaggaggcagcccctggacagctggtcatgctggccgctccggttggaccacgttgcataatcctcagtcgcatcatcacaacgtctctgagcgttttgatggggggagaaggggcagtgtagtgtgtatgggaggagaggcccagagggctctctttgcccccttacccccttttttatatcccagaggaaagtcgggggaacctggctacaccttgaaatgaggctatgtgtttcaaacctggggacggggtaagagaggatctgtgctttgagcaacctgagccagaggcagaggggtgttggaggggtaaggggaggatgcatgatgcttattgctttgtacctttcactgggaaggagggcagcagccaacagtagctcacaggtttgtaaactgagcctgttggctttaagaagggaggcaatgaaatcgaattaaatataaaagagtcatttgtgcaaaaataacttaaacaaataaaagacctggggaagggggtgttccccttagcgcctggtggggaaagggccatataccatcccccccaggccttttcagtgacatggcttcgggggggcggcaagggtggtgggggggggtgaacttc

SEQ ID NO: 282467 - DNA, 2226 bp, Homo sapiens
cggacgcgtgggtcgcggacgcgtggccttctgctgtgctactgctgtcgcgagacttcctgctcatctgccgctccctttgccgccgccttagcccgggacccgaacccagcctctcccctacccgaacaccggccccggctccaccgaggcccgggtcccccagcccgtctcgccgccgccatggcggaccctaaatacgccgaccttcccggcattgccaggaatgagccagatgtttatgaaactagcgacctacctgaggatgatcaagcggagttcgatgcggaggagctgacaagcacaagtgtggaacacatcattgtcaatcctaatgctgcctatgacaagttcaaggacaagagagtggggacaaagggacttgatttctcagatcgtattggaaaaaccaagaggacaggatatgaatctggagaatatgagatgcttggagagggtctgggagtgaaggagacaccccagcaaaagtaccagcgcctactgcatgaggtccaagagctgacaactgaagttgaaaaaatcaagacgacagtgaaggagtcagccacagaggagaagctgacccctgtgttgctggctaaacagctggcagccctgaagcagcagctggttgcttcccacctggagaagctgctgggaccagatgctgcaatcaaccttaccgaccccgatggcgccctggctaagcgcctactactgcagctggaagcaacaaagaacagcaaagggggatcagggggaaaaaccactgggacccccccagatagcagccttgtcacttatgaactacattctcggcctgagcaggacaagttctctcaagctgccaaagtcgcagaacttgaaaagcgcctgacagagctggagacagctgtacgttgtgatcaggatgctcagggtcaggtgttctcctgtacataatctgagcacatttgggagctggagaacaggggttatccctacccctgtgaactctgttaacagcttacatagggtttcccctttactataactctagcatccccatcccatttgacactgggggcaagggttcttcttgcatgtggggtttatacccctcccctgatgaatacagagtggtagctaggggttggttatcatcagaaggtggtctcccctcaggcctgggggataaggacgtgggcccagccacatgccaactcatgtccaatactgctttgcctggtgtggggaaggattgggtcttgtcccccaacacagcttctgtggctgactgtaatactgtacaactgtttctgaccattaaatgctgttgtactctgtgtggcctctgctgtgtttcctggggaggaagcagcactaggatatagatattcattcgtcataacaggcaatctaagccactctatactacaagagatggatttaaattgtaacctgttcttaccaaagaactaaataaaaaatgagtacagagccagagccagagtttcaaaatattctcatctgttaaattaagagtgtctcccatagaaaagcagtggaggccccacagggcaagtacaaaacagaattaaaactcccaagggtcttgtctttacaaaagaaaaggcaggaggcagcccctggacagctggtcatgctggccgctccggttggaccacgttgcataatcctcagtcgcatcatcacaacgtctctgagcgttttgatggggggagaaggggcagtgtagtgtgtatgggaggagaggcccagagggctctctttgcccccttacccccttttttatatcccagaggaaagtcgggggaacctggctacaccttgaaatgaggctatgtgtttcaaacctggggacggggtaagagaggatctgtgctttgagcaacctgagccagaggcagaggggtgttggaggggtaaggggaggatgcatgatgcttattgctttgtacctttcactgggaaggagggcagcagccaacagtagctcacaggtttgtaaactgagcctgttggctttaagaagggaggcaatgaaatcgaattaaatataaaagagtcatttgtgcaaaaataacttaaacaaataaaagacctggggaagggggtgttccccttagcgcctggtggggaaagggccatataccatcccccccaggccttttcagtgacatggcttcgggggggcggcaagggtggtgggggggggtgaacttc

SEQ ID NO: 282468 - DNA, 1371 bp, Homo sapiens
cggacgcgtgggtcgcggacgcgtggccttctgctgtgctactgctgtcgcgagacttcctgctcatctgccgctccctttgccgccgccttagcccgggacccgaacccagcctctcccctacccgaacaccggccccggctccaccgaggcccgggtcccccagcccgtctcgccgccgccatggcggaccctaaatacgccgaccttcccggcattgccaggaatgagccagatgtttatgaaactagcgacctacctgaggatgatcaagcggagttcgatgcggaggagctgacaagcacaagtgtggaacacatcattgtcaatcctaatgctgcctatgacaagttcaaggacaagagagtggggacaaagggacttgatttctcagatcgtattggaaaaaccaagaggacaggatatgaatctggagaatatgagatgcttggagagggtctgggagtgaaggagacaccccagcaaaagtaccagcgcctactgcatgaggtccaagagctgacaactgaagttgaaaaaatcaagacgacagtgaaggagtcagccacagaggagaagctgacccctgtgttgctggctaaacagctggcagccctgaagcagcagctggttgcttcccacctggagaagctgctgggaccagatgctgcaatcaaccttaccgaccccgatggcgccctggctaagcgcctactactgcagctggaagcaacaaagaacagcaaagggggatcagggggaaaaaccactgggacccccccagatagcagccttgtcacttatgaactacattctcggcctgagcaggacaagttctctcaagctgccaaagtcgcagaacttgaaaagcgcctgacagagctggagacagctgtacgttgtgatcaggatgctcagggtcaggtgttctcctgtacataatctgagccttagatcctgcaactctaggccttaaggtctacaacattccacataagcctgggaggagtcatcaaagggcttcagttacagggatcagctagtgggttcccagctagaaccaggaaagatgggagaagacgataatcatggagatataaggaccactcacttcttcccttcctttcccaccaaatcccctttctgcaggtctacagggagcctgtctcatggagactgtagagctgttgcaagcaaaggtgagcgccctagaccttgcagttttggatcaagtggaggctcggctacagagtgtcctgggaaaggtgaacgagattgccaagcataaagcctctgtagaagatgcagatacacaaagcaaggtcaggaagacaccttccccatctcctttccactccctcaggttctccg

SEQ ID NO: 282469 - DNA, 1030 bp, Homo sapiens
gctgtcggattcggcggctgggtggcgctggttgtggtggtcccgccgcgttgcgtctcgtgtcgtcccgttggcattgtggctgcgtcgctctgtgcggcttgtcgttgggttgttgctgcgtactccgcgctggtccctctatgtgtcgttgcgtgtggctgccttttttgggtggctctgtctttgtcatgttgtattgtgcttgtttttttttttttttttttttttgttttgttttttttttgttttgcttgtttttttgttttttttttttttttttttttttgccagagtttcaaaatattctcatctgttaaattaagagtgtctcccatagaaaagcagtggaggccccacagggcaagtacaaaacagaattaaaactcccaagggtcttgtctttacaaaagaaaaggcaggaggcagcccctggacagctggtcatgctggccgctccggttggaccacgttgcataatcctcagtcgcatcatcacaacgtctctgagcgttttgatggggggagaaggggcagtgtagtgtgtatgggaggagaggcccagagggctctctttgcccccttacccccttttttatatcccagaggaaagtcgggggaacctggctacaccttgaaatgaggctatgtgtttcaaacctggggacggggtaagagaggatctgtgctttgagcaacctgagccagaggcagaggggtgttggaggggtaaggggaggatgcatgatgcttattgctttgtacctttcactgggaaggagggcagcagccaacagtagctcacaggtttgtaaactgagcctgttggctttaagaagggaggcaatgaaatcgaattaaatataaaagagtcatttgtgcaaaaataacttaaacaaataaaagacctggggaagggggtgttccccttagcgcctggtggggaaagggccatataccatcccccccaggccttttcagtgacatggcttcgggggggcggcaagggtggtgggggggggtgaacttc

SEQ ID NO: 282470 - DNA, 736 bp, Homo sapiens
cggacgcgtgggtcgcggacgcgtggccttctgctgtgctactgctgtcgcgagacttcctgctcatctgccgctccctttgccgccgccttagcccgggacccgaacccagcctctcccctacccgaacaccggccccggctccaccgaggcccgggtcccccagcccgtctcgccgccgccatggcggaccctaaatacgccgaccttcccggcattgccaggaatgagccagatgtttatgaaactagcgacctacctgaggatgatcaagcggagttcgatgcggaggagctgacaagcacaagtgtggaacacatcattgtcaatcctaatgctgcctatgacaagttcaaggacaagagagtggggacaaagggacttgatttctcagatcgtattggaaaaaccaagaggacaggatatgaatctggagaatatgagatgcttggagagggtctgggagtgaaggagacaccccagcaaaagtaccagcgcctactgcatgaggtccaagagctgctgactgtaatactgtacaactgtttctgaccattaaatgctgttgtactctgtgtggcctctgctgtgtttcctggggaggaagcagcactaggatatagatattcattcgtcataacaggcaatctaagccactctatactacaagagatggatttaaattgtaacctgttcttaccaaagaactaaataaaaaatgagtacagagccagag

SEQ ID NO: 282471 - DNA, 2272 bp, Homo sapiens
gcttgacgcacggagcttgtctgcgccggccagcactggcttctctggactttgcacacctccaggagaagaacccagaaaattgatcagttctaaaaaaccatgccccacttgttggtgactttcagggatgtggccattgacttctctcaggaggaatgggaatgcctggaccctgctcagagggacttgtacagggatgtgatgttggagaactacagcaacctgatctcattggacttggaatccagttgtgtgaccaaaaagttatctccagaaaaggaaatttatgaaatggaatcactccagtgggagaatatggggaaacgtatcaaccatcaccttcaatacaatggtcttggagacaatatggagtgcaaaggcaacttagagggtcaagaagcaagtcaggaagggctttacatgtgtgtcaaaattacctgtgaagaaaaggccactgaaagtcattcaacctcttctacttttcatcggataattcctaccaaggaaaaattgtacaaatgtaaggaatgcagacaaggtttcagctacctgtcatgccttattcaacatgaggaaaatcataatatagaaaaatgctctgaagttaagaaacacaggaatacctttagcaaaaagccaagctatattcaacatcagagaattcagactggtgagaaaccttatgagtgtatggaatgtggaaaggcctttggtcgtacttctgatctcattcaacatcagaaaattcatactaatgaaaaaccttatcagtgtaacgcatgtgggaaagcttttattcgtggttcacagctcactgaacatcagagagttcatacaggagagaaaccatatgattgtaagaaatgtggaaaagcctttagttattgttcacaatatactcttcatcagagaattcatagtggtgaaaaaccctatgaatgtaaggattgtgggaaggcctttattcttggctctcaacttacttaccatcagagaattcatagtggtgagaaaccttatgagtgtaaggaatgtggaaaggcctttattcttggttcacaccttacataccatcagagagttcatactggtgaaaagccttacatatgtaaagaatgtgggaaagcctttttatgtgcctcccaactgaatgaacatcagagaattcatacaggagagaaaccctatgaatgtaaagaatgcgggaagaccttttttcgtggctcacaacttacttaccacctgagagttcattcaggtgagagaccttataaatgcaaagaatgtgggaaagcctttatttctaattctaatcttattcaacatcaaagaattcataccggagagaagccctacaaatgtaaggaatgtggaaaggcctttatttgtggcaaacaacttagtgaacatcagagaattcatacaggtgagaaaccctttgaatgtaaggaatgtggaaaggcctttattcgtgttgcatatcttactcaacatgagaaaattcatggtgagaaacattatgaatgtaaggaatgtgggaagacctttgtacgtgctacacaacttacatatcatcaaagaattcatacaggtgaaaagccctacaaatgtaaggaatgtgacaaggcctttatttatggctcacaacttagtgaacatcagagaattcacagaggtgaaaaaccttatgaatgtaaacagtgtgggaaggcttttattcgtggctcacaccttactgaacatctgagaactcatactggagagaaaccctatgaatgtaaggaatgtgggagggcctttagtcgtggctcagaacatactctgcatcaaaggatccatactggtgagaaaccctatacatgtgtccagtgtggtaaagactttagatgtccttcacaacttactcaacatacaaggcttcataattgagaaagccttgaatgtgattaaatttaagaaaatcttcatctatttcatatctataatgaatgtagaacatcttgcttctgctcagaatctgctcattcttagaaggcctacattaacatggatgcagaataatttcagaaaccccttaaataattccttaacatctctataaacgctagaatataatgctgaattatatcctttattaagcatcatctccatttcaccatatcctaactgaaatcctatatatttcttgtgtgttcttttctatttgtaaaatactgtaattgtattacaatgactaaattataattaaatacatataattccctttcga

SEQ ID NO: 282472 - DNA, 985 bp, Homo sapiens
attttttggtaaggaatgactttattcacaggaacactgcagtaagggaggaggtgttgtaattgggagaatactccagccataagatctgcaagcatagcaaaggtcaggcataaaggaattttcttttatagggaagagtaaacaggcaagaaagaactagattcaggggagtgggatgagactgttttggatctgttgaccctgatatgtctgtcaaaatgtctgtgagtctagctgatgttcatgacgtctgaaagaaggccacattttggtctctgaagccccttcctaagattgggagcaaagtacctgacttagtgtttgggtccaggaggatggtggggggctccctgggcatgcctctgttctactgtggaagaggagatgccatgggaaagtaacagcacctagggtcctgttcaacatggacattaaggaaaggtctgcctgaaccccttctgcagtagctggcttccattgggtttgtggaagaactgagattttttccaaattcccaaaagaggagaagtaaaggtagttctaagtagtttattttgtgggctgtgagccaagtctaatcttgtggctttttttccttgtccagcactggcttctctggactttgcacacctccaggagaagaacccagaaaattgatcagttctaaaaaaccatgccccacgtgagttgctgtttctttccttcttgaagtacaatcattttgttgtgtaatgtgaacaccagatttatcccagaatttcctgccttgtttggttccttaagggaactgcttccaaacgtctcccattctagcgagtaatagtagcaaagagcccaattcttctcaatgcttttcccctctccaaacagttttcagatattcattcagcagataattctacattgtccacaggcatagtcttctgcccagagctctgagggaacagaaatacctccttttaagattggtacacattagtac

SEQ ID NO: 282473 - DNA, 1099 bp, Homo sapiens
attttttggtaaggaatgactttattcacaggaacactgcagtaagggaggaggtgttgtaattgggagaatactccagccataagatctgcaagcatagcaaaggtcaggcataaaggaattttcttttatagggaagagtaaacaggcaagaaagaactagattcaggggagtgggatgagactgttttggatctgttgaccctgatatgtctgtcaaaatgtctgtgagtctagctgatgttcatgacgtctgaaagaaggccacattttggtctctgaagccccttcctaagattgggagcaaagtacctgacttagtgtttgggtccaggaggatggtggggggctccctgggcatgcctctgttctactgtggaagaggagatgccatgggaaagtaacagcacctagggtcctgttcaacatggacattaaggaaaggtctgcctgaaccccttctgcagtagctggcttccattgggtttgtggaagaactgagattttttccaaattcccaaaagaggagaagtaaaggtagttctaagtagtttattttgtgggctgtgagccaagtctaatcttgtggctttttttccttgtccagcactggcttctctggactttgcacacctccaggagaagaacccagaaaattgatcagttctaaaaaaccatgccccacgtgagttgctgtttctttccttcttgaagtacaatcattttgttgtgtaatgtgaacaccagatttatcccagaatttcctgccttgtttggttccttaagggaactgcttccaaacgtctcccattctagcgagtaatagtagcaaagagcccaattcttctcaatgcttttcccctctccaagatgtggctttaatgtttatagtttattatagcctaatttgattttgctgcttttaggggtgaagactctacatgagtttcttggttatagagagtctttgtatgctgactttctcagatgctgattgtagtagttttgtactcggggtgtgggcaatttcattgtctcctgtggaattggaatggcaaggatctcttgaagcttatctcatttccccgccggaaaggct

SEQ ID NO: 282474 - DNA, 2220 bp, Homo sapiens
ctcatttcacttcagaatcattcctgtagaatcatcctgtaatggatttgttgtttcagttgttggtgactttcagggatgtggccattgacttctctcaggaggaatgggaatgcctggaccctgctcagagggacttgtacagggatgtgatgttggagaactacagcaacctgatctcattggacttggaatccagttgtgtgaccaaaaagttatctccagaaaaggaaatttatgaaatggaatcactccagtgggagaatatggggaaacgtatcaaccatcaccttcaatacaatggtcttggagacaatatggagtgcaaaggcaacttagagggtcaagaagcaagtcaggaagggctttacatgtgtgtcaaaattacctgtgaagaaaaggccactgaaagtcattcaacctcttctacttttcatcggataattcctaccaaggaaaaattgtacaaatgtaaggaatgcagacaaggtttcagctacctgtcatgccttattcaacatgaggaaaatcataatatagaaaaatgctctgaagttaagaaacacaggaatacctttagcaaaaagccaagctatattcaacatcagagaattcagactggtgagaaaccttatgagtgtatggaatgtggaaaggcctttggtcgtacttctgatctcattcaacatcagaaaattcatactaatgaaaaaccttatcagtgtaacgcatgtgggaaagcttttattcgtggttcacagctcactgaacatcagagagttcatacaggagagaaaccatatgattgtaagaaatgtggaaaagcctttagttattgttcacaatatactcttcatcagagaattcatagtggtgaaaaaccctatgaatgtaaggattgtgggaaggcctttattcttggctctcaacttacttaccatcagagaattcatagtggtgagaaaccttatgagtgtaaggaatgtggaaaggcctttattcttggttcacaccttacataccatcagagagttcatactggtgaaaagccttacatatgtaaagaatgtgggaaagcctttttatgtgcctcccaactgaatgaacatcagagaattcatacaggagagaaaccctatgaatgtaaagaatgcgggaagaccttttttcgtggctcacaacttacttaccacctgagagttcattcaggtgagagaccttataaatgcaaagaatgtgggaaagcctttatttctaattctaatcttattcaacatcaaagaattcataccggagagaagccctacaaatgtaaggaatgtggaaaggcctttatttgtggcaaacaacttagtgaacatcagagaattcatacaggtgagaaaccctttgaatgtaaggaatgtggaaaggcctttattcgtgttgcatatcttactcaacatgagaaaattcatggtgagaaacattatgaatgtaaggaatgtgggaagacctttgtacgtgctacacaacttacatatcatcaaagaattcatacaggtgaaaagccctacaaatgtaaggaatgtgacaaggcctttatttatggctcacaacttagtgaacatcagagaattcacagaggtgaaaaaccttatgaatgtaaacagtgtgggaaggcttttattcgtggctcacaccttactgaacatctgagaactcatactggagagaaaccctatgaatgtaaggaatgtgggagggcctttagtcgtggctcagaacatactctgcatcaaaggatccatactggtgagaaaccctatacatgtgtccagtgtggtaaagactttagatgtccttcacaacttactcaacatacaaggcttcataattgagaaagccttgaatgtgattaaatttaagaaaatcttcatctatttcatatctataatgaatgtagaacatcttgcttctgctcagaatctgctcattcttagaaggcctacattaacatggatgcagaataatttcagaaaccccttaaataattccttaacatctctataaacgctagaatataatgctgaattatatcctttattaagcatcatctccatttcaccatatcctaactgaaatcctatatatttcttgtgtgttcttttctatttgtaaaatactgtaattgtattacaatgactaaattataattaaatacatataattccctttcga

SEQ ID NO: 282475 - DNA, 2127 bp, Homo sapiens
cgggggcggggccggcaggggcggtgcgcgggaagggaccccggacccggaggtcgcggagagctgggcagtgttggccgctggcggagcgctggggcagcatgaagtgcctggtcacgggcggcaacgtgaaggtgctcggcaaggccgtccactccctgtcccgcatcggggacgagctctacctggaacccttggaggacgggctctccctccggacggtgaactcctcccgctctgcctatgcctgctttctctttgccccgctcttcttccagcaataccaggcagccacccctggtcaggacctgctgcgctgtaagatcctgatgaagtctttcctgtctgtcttccgctcactggcgatgctggagaagacggtggaaaaatgctgcatctccctgaatggccggagcagccgcctggtggtccagctgcattgcaagttcggggtgcggaagactcacaacctgtccttccaggactgtgagtccctgcaggccgtcttcgacccagcctcgtgcccccacatgctccgcgccccagcacgggttctgggggaggctgttctgcccttctctcctgcactggctgaagtgacgctgggcattggccgtggccgcagggtcatcctgcgcagctaccacgaggaggaggcagacagcactgccaaagccatggtgactgagatgtgccttggagaggaggatttccagcagctgcaggcccaggaaggggtggccatcactttctgcctcaaggaattccgggggctcctgagctttgcagagtcagcaaacttgaatcttagcattcattttgatgctccaggcaggcccgccatcttcaccatcaaggactctttgctggacggccactttgtcttggccacactctcagacaccgactcgcactcccaggacctgggctccccagagcgtcaccagccagtgcctcagctccaggctcacagcacaccccacccggacgactttgccaatgacgacattgactcttacatgatcgccatggaaaccactataggcaatgagggctcgcgggtgctgccctccatttccctttcacctggcccccagccccccaagagccccggtccccactccgaggaggaagatgaggctgagcccagtacagtgcctgggactcccccacccaagaagttccgctcactgttcttcggctccatcctggcccctgtacgctccccccagggccccagccctgtgctggcggaagacagtgagggtgaaggctgaaccaagaacctgaagcctgtacccagaggccttggactagacgaagccccagccagtggcagaactgggtctctcagccctggggatcagaaaggtgggcttgctggagctgagctgtttcactgcctctcgcaggccccagctggctgtcactgtaaagctgtcccacagcggtcgggcctgggccgttatctccccacaacccccagccaatcaggactttccagacttggccctgaactactgacgttcctacctcttatttctcattgagcctcaggctatactccagctggccaaggctggaaacctgtctccctcaggctcaccttcctaaggaaaatgtcatagtaggtgctgctggcccctggtgatccagcttctctgccaatcatgacctgttccttcctgaagtcctgggcatgcatctgggacccccgtggagctgacaagttttccttgctttcctgatactctttggcgctgacttggaattctaagagccttggacccgagtgtgtggctagggttgccctggctggggcccggtgccgagactcccaagcggctctgtgcagaagagctgccaggcagtgtcttagatgtgagacggaggccatggcgagaatccagctttgacctttattcaagagaccagatgggttgccccaggatccggctgccagccctgaggccaagcacggctggagacccacgacctggcctgccgttgccctgagctgcagcctcggccccaggatcctgctcacagtcaccgcaggtgcaggcaggaagcagccctgggggactggacgctgctattgattcattaaaaaaagaaaagaaaaat

SEQ ID NO: 282476 - DNA, 1439 bp, Homo sapiens
gcaccggttaattatacgtggctggcttccttcagctgcgtccccgtggcgtcgacaacactttctgcctcaaggaatccgggggctcctgagctttgcagagtcagcaaacttgaatcttagcattcattttgatgctccaggcaggcccgccatcttcaccatcaaggactctttgctggacggccactttgtcttggccacactctcagacaccgactcgcactcccaggacctgggctccccagagcgtcaccagccagtgcctcagctccaggctcacagcacaccccacccggacgactttgccaatgacgacattgactcttacatgatcgccatggaaaccactataggcaatgagggctcgcgggtgctgccctccatttccctttcacctggcccccagccccccaagagccccggtccccactccgaggaggaagatgaggctgagcccagtacagtgcctgggactcccccacccaagaagttccgctcactgttcttcggctccatcctggcccctgtacgctccccccagggccccagccctgtgctggcggaagacagtgagggtgaaggctgaaccaagaacctgaagcctgtacccagaggccttggactagacgaagccccagccagtggcagaactgggtctctcagccctggggatcagaaaggtgggcttgctggagctgagctgtttcactgcctctcgcaggccccagctggctgtcactgtaaagctgtcccacagcggtcgggcctgggccgttatctccccacaacccccagccaatcaggactttccagacttggccctgaactactgacgttcctacctcttatttctcattgagcctcaggctatactccagctggccaaggctggaaacctgtctccctcaggctcaccttcctaaggaaaatgtcatagtaggtgctgctggcccctggtgatccagcttctctgccaatcatgacctgttccttcctgaagtcctgggcatgcatctgggacccccgtggagctgacaagttttccttgctttcctgatactctttggcgctgacttggaattctaagagccttggacccgagtgtgtggctagggttgccctggctggggcccggtgccgagactcccaagcggctctgtgcagaagagctgccaggcagtgtcttagatgtgagacggaggccatggcgagaatccagctttgacctttattcaagagaccagatgggttgccccaggatccggctgccagccctgaggccaagcacggctggagacccacgacctggcctgccgttgccctgagctgcagcctcggccccaggatcctgctcacagtcaccgcaggtgcaggcaggaagcagccctgggggactggacgctgctattgattcattaaaaaaagaaaagaaaaat

SEQ ID NO: 282477 - DNA, 2891 bp, Homo sapiens
cccacagctgcgtcctctctgaccttcgcaatccggtgcgcggcccgcggaacgccccgatctccaggggcacggaaggccgaggcgtgccgggggagccaggagcagctggctggcgggcgccgcgggcctccccggtcacgtgacaccccggacaacgtgcgccgtcacgtgacggcagagccttgctcggcaaggccgtccactccctgtcccgcatcggggacgagctctacctggaacccttggaggacgggctctccctccggacggtgaactcctcccgctctgcctatgcctgctttctctttgccccgctcttcttccagcaataccaggcagccacccctggtcaggacctgctgcgctgtaagatcctgatgaaggtgaggcccttccctcagcagtggcactactccaccccaggaatctccaccagctgtgcctctgccctggggtactcagtagatgctaagtggggagagagacacgtgcaagcccaatccatgcaaaacacagggagggccatggtaaaagcatcacagcggggacctgagagggtggtgacgctcaagttcgtcaagaaaggtaagcacgtcttttggccgggcgcggtggctcacgcctgtaatcccagcactttgggaggccgaggcaggcggatcacgaggtcaggagttcgagaccagcctggccaacatggcgaaaccccgtctctactaaaaatacaaaaattagctgggcgtggtggcacgcgcctgtaatcccagctactcgggaggctgaggcaggagaattgcttgaatccgggaggtggaggttgcagtgagctgagatcgcaccactgcactccagcctgggtgacagagcgagactccatctcaaaaaaaaaaaaaaaaaaggtaagcaggtctttcaaggcattccaagcataaggaagagcatgaatgaggcctagaaggatgccagtgcccgaggtgacgtgggagcccttttcccagagttacatgctgggcccatgatgggtgtgggcctgcatgggacaggagagcttgttgcagagatatgatgctaggctgaggtgtcttatcccatgcagtctttcctgtctgtcttccgctcactggcgatgctggagaagacggtggaaaaatgctgcatctccctgaatggccggagcagccgcctggtggtccagctgcattgcaagttcggggtgcggaagactcacaacctgtccttccaggactgtgagtccctgcaggccgtcttcgacccagcctcgtgcccccacatgctccgcgccccagcacgggttctgggggaggctgttctgcccttctctcctgcactggctgaagtgacgctgggcattggccgtggccgcagggtcatcctgcgcagctaccacgaggaggaggcagacagcactgccaaagccatggtgactgagatgtgccttggagaggaggatttccagcagctgcaggcccaggaaggggtggccatcactttctgcctcaaggaattccgggggctcctgagctttgcagagtcagcaaacttgaatcttagcattcattttgatgctccaggcaggcccgccatcttcaccatcaaggactctttgctggacggccactttgtcttggccacactctcagacaccgactcgcactcccaggacctgggctccccagagcgtcaccagccagtgcctcagctccaggctcacagcacaccccacccggacgactttgccaatgacgacattgactcttacatgatcgccatggaaaccactataggcaatgagggctcgcgggtgctgccctccatttccctttcacctggcccccagccccccaagagccccggtccccactccgaggaggaagatgaggctgagcccagtacagtgcctgggactcccccacccaagaagttccgctcactgttcttcggctccatcctggcccctgtacgctccccccagggccccagccctgtgctggcggaagacagtgagggtgaaggctgaaccaagaacctgaagcctgtacccagaggccttggactagacgaagccccagccagtggcagaactgggtctctcagccctggggatcagaaaggtgggcttgctggagctgagctgtttcactgcctctcgcaggccccagctggctgtcactgtaaagctgtcccacagcggtcgggcctgggccgttatctccccacaacccccagccaatcaggactttccagacttggccctgaactactgacgttcctacctcttatttctcattgagcctcaggctatactccagctggccaaggctggaaacctgtctccctcaggctcaccttcctaaggaaaatgtcatagtaggtgctgctggcccctggtgatccagcttctctgccaatcatgacctgttccttcctgaagtcctgggcatgcatctgggacccccgtggagctgacaagttttccttgctttcctgatactctttggcgctgacttggaattctaagagccttggacccgagtgtgtggctagggttgccctggctggggcccggtgccgagactcccaagcggctctgtgcagaagagctgccaggcagtgtcttagatgtgagacggaggccatggcgagaatccagctttgacctttattcaagagaccagatgggttgccccaggatccggctgccagccctgaggccaagcacggctggagacccacgacctggcctgccgttgccctgagctgcagcctcggccccaggatcctgctcacagtcaccgcaggtgcaggcaggaagcagccctgggggactggacgctgctattgattcattaaaaaaagaaaagaaaaat

SEQ ID NO: 282478 - DNA, 2214 bp, Homo sapiens
cgggggcggggccggcaggggcggtgcgcgggaagggaccccggacccggaggtcgcggagagctgggcagtgttggccgctggcggagcgctggggcagcatgaagtgcctggtcacgggcggcaacgtgaaggtgctcggcaaggccgtccactccctgtcccgcatcggggacgagctctacctggaacccttggaggacgggctctccctccggacggtgaactcctcccgctctgcctatgcctgctttctctttgccccgctcttcttccagcaataccaggcagccacccctggtcaggacctgctgcgctgtaagatcctgatgaagtctttcctgtctgtcttccgctcactggcgatgctggagaagacggtggaaaaatgctgcatctccctgaatggccggagcagccgcctggtggtccagctgcattgcaagttcggggtgcggaagactcacaacctgtccttccaggactgtgagtccctgcaggccgtcttcgacccagcctcgtgcccccacatgctccgcgccccagcacgggttctgggggaggctgttctgcccttctctcctgcactggctgaagtgacgctgggcattggccgtggccgcagggtcatcctgcgcagctaccacgaggaggaggcagacagcactgccaaagccatggtgactgagatgtgccttggagaggaggatttccagcagctgcaggcccaggaaggggtggccatcactttctgcctcaaggaattccgggggctcctgagctttgcagagtcagcaaacttgaatcttagcattcattttgatgctccaggcaggtagttcccagccttgggacagggaagggctctgggatggcaggagctgaatgggatgacctagcttgggccccctcccctgcccaggcccgccatcttcaccatcaaggactctttgctggacggccactttgtcttggccacactctcagacaccgactcgcactcccaggacctgggctccccagagcgtcaccagccagtgcctcagctccaggctcacagcacaccccacccggacgactttgccaatgacgacattgactcttacatgatcgccatggaaaccactataggcaatgagggctcgcgggtgctgccctccatttccctttcacctggcccccagccccccaagagccccggtccccactccgaggaggaagatgaggctgagcccagtacagtgcctgggactcccccacccaagaagttccgctcactgttcttcggctccatcctggcccctgtacgctccccccagggccccagccctgtgctggcggaagacagtgagggtgaaggctgaaccaagaacctgaagcctgtacccagaggccttggactagacgaagccccagccagtggcagaactgggtctctcagccctggggatcagaaaggtgggcttgctggagctgagctgtttcactgcctctcgcaggccccagctggctgtcactgtaaagctgtcccacagcggtcgggcctgggccgttatctccccacaacccccagccaatcaggactttccagacttggccctgaactactgacgttcctacctcttatttctcattgagcctcaggctatactccagctggccaaggctggaaacctgtctccctcaggctcaccttcctaaggaaaatgtcatagtaggtgctgctggcccctggtgatccagcttctctgccaatcatgacctgttccttcctgaagtcctgggcatgcatctgggacccccgtggagctgacaagttttccttgctttcctgatactctttggcgctgacttggaattctaagagccttggacccgagtgtgtggctagggttgccctggctggggcccggtgccgagactcccaagcggctctgtgcagaagagctgccaggcagtgtcttagatgtgagacggaggccatggcgagaatccagctttgacctttattcaagagaccagatgggttgccccaggatccggctgccagccctgaggccaagcacggctggagacccacgacctggcctgccgttgccctgagctgcagcctcggccccaggatcctgctcacagtcaccgcaggtgcaggcaggaagcagccctgggggactggacgctgctattgattcattaaaaaaagaaaagaaaaat

SEQ ID NO: 282479 - DNA, 2178 bp, Homo sapiens
cccacagctgcgtcctctctgaccttcgcaatccggtgcgcggcccgcggaacgccccgatctccaggggcacggaaggccgaggcgtgccgggggagccaggagcagctggctggcgggcgccgcgggcctccccggtcacgtgacaccccggacaacgtgcgccgtcacgtgacggcagagccttgctcggcaaggccgtccactccctgtcccgcatcggggacgagctctacctggaacccttggaggacgggctctccctccggacggtgaactcctcccgctctgcctatgcctgctttctctttgccccgctcttcttccagcaataccaggcagccacccctggtcaggacctgctgcgctgtaagatcctgatgaagtctttcctgtctgtcttccgctcactggcgatgctggagaagacggtggaaaaatgctgcatctccctgaatggccggagcagccgcctggtggtccagctgcattgcaagttcggggtgcggaagactcacaacctgtccttccaggactgtgagtccctgcaggccgtcttcgacccagcctcgtgcccccacatgctccgcgccccagcacgggttctgggggaggctgttctgcccttctctcctgcactggctgaagtgacgctgggcattggccgtggccgcagggtcatcctgcgcagctaccacgaggaggaggcagacagcactgccaaagccatggtgactgagatgtgccttggagaggaggatttccagcagctgcaggcccaggaaggggtggccatcactttctgcctcaaggaattccgggggctcctgagctttgcagagtcagcaaacttgaatcttagcattcattttgatgctccaggcaggcccgccatcttcaccatcaaggactctttgctggacggccactttgtcttggccacactctcagacaccgactcgcactcccaggacctgggctccccagagcgtcaccagccagtgcctcagctccaggctcacagcacaccccacccggacgactttgccaatgacgacattgactcttacatgatcgccatggaaaccactataggcaatgagggctcgcgggtgctgccctccatttccctttcacctggcccccagccccccaagagccccggtccccactccgaggaggaagatgaggctgagcccagtacagtgcctgggactcccccacccaagaagttccgctcactgttcttcggctccatcctggcccctgtacgctccccccagggccccagccctgtgctggcggaagacagtgagggtgaaggctgaaccaagaacctgaagcctgtacccagaggccttggactagacgaagccccagccagtggcagaactgggtctctcagccctggggatcagaaaggtgggcttgctggagctgagctgtttcactgcctctcgcaggccccagctggctgtcactgtaaagctgtcccacagcggtcgggcctgggccgttatctccccacaacccccagccaatcaggactttccagacttggccctgaactactgacgttcctacctcttatttctcattgagcctcaggctatactccagctggccaaggctggaaacctgtctccctcaggctcaccttcctaaggaaaatgtcatagtaggtgctgctggcccctggtgatccagcttctctgccaatcatgacctgttccttcctgaagtcctgggcatgcatctgggacccccgtggagctgacaagttttccttgctttcctgatactctttggcgctgacttggaattctaagagccttggacccgagtgtgtggctagggttgccctggctggggcccggtgccgagactcccaagcggctctgtgcagaagagctgccaggcagtgtcttagatgtgagacggaggccatggcgagaatccagctttgacctttattcaagagaccagatgggttgccccaggatccggctgccagccctgaggccaagcacggctggagacccacgacctggcctgccgttgccctgagctgcagcctcggccccaggatcctgctcacagtcaccgcaggtgcaggcaggaagcagccctgggggactggacgctgctattgattcattaaaaaaagaaaagaaaaat

SEQ ID NO: 282480 - DNA, 2971 bp, Homo sapiens
cccacagctgcgtcctctctgaccttcgcaatccggtgcgcggcccgcggaacgccccgatctccaggggcacggaaggccgaggcgtgccgggggagccaggagcagctggctggcgggcgccgcgggcctccccggtcacgtgacaccccggacaacgtgcgccgtcacgtgacggcagagccttgctcggcaaggccgtccactccctgtcccgcatcggggacgagctctacctggaacccttggaggacgggctctccctccggacggtgaactcctcccgctctgcctatgcctgctttctctttgccccgctcttcttccagcaataccaggcagccacccctggtcaggacctgctgcgctgtaagatcctgatgaaggtgaggcccttccctcagcagtggcactactccaccccaggaatctccaccagctgtgcctctgccctggggtactcagtagatgctaagtggggagagagacacgtgcaagcccaatccatgcaaaacacagggagggccatggtaaaagcatcacagcggggacctgagagggtggtgacgctcaagttcgtcaagaaaggtaagcacgtcttttggccgggcgcggtggctcacgcctgtaatcccagcactttgggaggccgaggcaggcggatcacgaggtcaggagttcgagaccagcctggccaacatggcgaaaccccgtctctactaaaaatacaaaaattagctgggcgtggtggcacgcgcctgtaatcccagctactcgggaggctgaggcaggagaattgcttgaatccgggaggtggaggttgcagtgagctgagatcgcaccactgcactccagcctgggtgacagagcgagactccatctcaaaaaaaaaaaaaaaaaaggtaagcaggtctttcaaggcattccaagcataaggaagagcatgaatgaggcctagaaggatgccagtgcccgaggtgacgtgggagcccttttcccagagttacatgctgggcccatgatgggtgtgggcctgcatgggacaggagagcttgttgcagagatatgatgctaggctgaggtgtcttatcccatgcagtctttcctgtctgtcttccgctcactggcgatgctggagaagacggtggaaaaatgctgcatctccctgaatggccggagcagccgcctggtggtccagctgcattgcaagttcggtgagtgggcagccggccagccaaggggtgcctcagcagggaggtcggcgaggcccactgagaccctatcgcccatccaggggtgcggaagactcacaacctgtccttccaggactgtgagtccctgcaggccgtcttcgacccagcctcgtgcccccacatgctccgcgccccagcacgggttctgggggaggctgttctgcccttctctcctgcactggctgaagtgacgctgggcattggccgtggccgcagggtcatcctgcgcagctaccacgaggaggaggcagacagcactgccaaagccatggtgactgagatgtgccttggagaggaggatttccagcagctgcaggcccaggaaggggtggccatcactttctgcctcaaggaattccgggggctcctgagctttgcagagtcagcaaacttgaatcttagcattcattttgatgctccaggcaggcccgccatcttcaccatcaaggactctttgctggacggccactttgtcttggccacactctcagacaccgactcgcactcccaggacctgggctccccagagcgtcaccagccagtgcctcagctccaggctcacagcacaccccacccggacgactttgccaatgacgacattgactcttacatgatcgccatggaaaccactataggcaatgagggctcgcgggtgctgccctccatttccctttcacctggcccccagccccccaagagccccggtccccactccgaggaggaagatgaggctgagcccagtacagtgcctgggactcccccacccaagaagttccgctcactgttcttcggctccatcctggcccctgtacgctccccccagggccccagccctgtgctggcggaagacagtgagggtgaaggctgaaccaagaacctgaagcctgtacccagaggccttggactagacgaagccccagccagtggcagaactgggtctctcagccctggggatcagaaaggtgggcttgctggagctgagctgtttcactgcctctcgcaggccccagctggctgtcactgtaaagctgtcccacagcggtcgggcctgggccgttatctccccacaacccccagccaatcaggactttccagacttggccctgaactactgacgttcctacctcttatttctcattgagcctcaggctatactccagctggccaaggctggaaacctgtctccctcaggctcaccttcctaaggaaaatgtcatagtaggtgctgctggcccctggtgatccagcttctctgccaatcatgacctgttccttcctgaagtcctgggcatgcatctgggacccccgtggagctgacaagttttccttgctttcctgatactctttggcgctgacttggaattctaagagccttggacccgagtgtgtggctagggttgccctggctggggcccggtgccgagactcccaagcggctctgtgcagaagagctgccaggcagtgtcttagatgtgagacggaggccatggcgagaatccagctttgacctttattcaagagaccagatgggttgccccaggatccggctgccagccctgaggccaagcacggctggagacccacgacctggcctgccgttgccctgagctgcagcctcggccccaggatcctgctcacagtcaccgcaggtgcaggcaggaagcagccctgggggactggacgctgctattgattcattaaaaaaagaaaagaaaaat

SEQ ID NO: 282481 - DNA, 1846 bp, Homo sapiens
cgggggcggggccggcaggggcggtgcgcgggaagggaccccggacccggaggtcgcggagagctgggcagtgttggccgctggcggagcgctggggcagcatgaagtgcctggtcacgggcggcaacgtgaaggctctccctccggacggtgaactcctcccgctctgcctatgcctgctttctctttgccccgctcttcttccagcaataccaggcagccacccctggtcaggacctgctgcgctgtaagatcctgatgaagtctttcctgtctgtcttccgctcactggcgatgctggagaagacggtggaaaaatgctgcatctccctgaatggccggagcagccgcctggtggtccagctgcattgcaagttcgacagcactgccaaagccatggtgactgagatgtgccttggagaggaggatttccagcagctgcaggcccaggaaggggtggccatcactttctgcctcaaggaattccgggggctcctgagctttgcagagtcagcaaacttgaatcttagcattcattttgatgctccaggcaggcccgccatcttcaccatcaaggactctttgctggacggccactttgtcttggccacactctcagacaccgactcgcactcccaggacctgggctccccagagcgtcaccagccagtgcctcagctccaggctcacagcacaccccacccggacgactttgccaatgacgacattgactcttacatgatcgccatggaaaccactataggcaatgagggctcgcgggtgctgccctccatttccctttcacctggcccccagccccccaagagccccggtccccactccgaggaggaagatgaggctgagcccagtacagtgcctgggactcccccacccaagaagttccgctcactgttcttcggctccatcctggcccctgtacgctccccccagggccccagccctgtgctggcggaagacagtgagggtgaaggctgaaccaagaacctgaagcctgtacccagaggccttggactagacgaagccccagccagtggcagaactgggtctctcagccctggggatcagaaaggtgggcttgctggagctgagctgtttcactgcctctcgcaggccccagctggctgtcactgtaaagctgtcccacagcggtcgggcctgggccgttatctccccacaacccccagccaatcaggactttccagacttggccctgaactactgacgttcctacctcttatttctcattgagcctcaggctatactccagctggccaaggctggaaacctgtctccctcaggctcaccttcctaaggaaaatgtcatagtaggtgctgctggcccctggtgatccagcttctctgccaatcatgacctgttccttcctgaagtcctgggcatgcatctgggacccccgtggagctgacaagttttccttgctttcctgatactctttggcgctgacttggaattctaagagccttggacccgagtgtgtggctagggttgccctggctggggcccggtgccgagactcccaagcggctctgtgcagaagagctgccaggcagtgtcttagatgtgagacggaggccatggcgagaatccagctttgacctttattcaagagaccagatgggttgccccaggatccggctgccagccctgaggccaagcacggctggagacccacgacctggcctgccgttgccctgagctgcagcctcggccccaggatcctgctcacagtcaccgcaggtgcaggcaggaagcagccctgggggactggacgctgctattgattcattaaaaaaagaaaagaaaaat

SEQ ID NO: 282482 - DNA, 2978 bp, Homo sapiens
cccacagctgcgtcctctctgaccttcgcaatccggtgcgcggcccgcggaacgccccgatctccaggggcacggaaggccgaggcgtgccgggggagccaggagcagctggctggcgggcgccgcgggcctccccggtcacgtgacaccccggacaacgtgcgccgtcacgtgacggcagagccttgctcggcaaggccgtccactccctgtcccgcatcggggacgagctctacctggaacccttggaggacgggctctccctccggacggtgaactcctcccgctctgcctatgcctgctttctctttgccccgctcttcttccagcaataccaggcagccacccctggtcaggacctgctgcgctgtaagatcctgatgaaggtgaggcccttccctcagcagtggcactactccaccccaggaatctccaccagctgtgcctctgccctggggtactcagtagatgctaagtggggagagagacacgtgcaagcccaatccatgcaaaacacagggagggccatggtaaaagcatcacagcggggacctgagagggtggtgacgctcaagttcgtcaagaaaggtaagcacgtcttttggccgggcgcggtggctcacgcctgtaatcccagcactttgggaggccgaggcaggcggatcacgaggtcaggagttcgagaccagcctggccaacatggcgaaaccccgtctctactaaaaatacaaaaattagctgggcgtggtggcacgcgcctgtaatcccagctactcgggaggctgaggcaggagaattgcttgaatccgggaggtggaggttgcagtgagctgagatcgcaccactgcactccagcctgggtgacagagcgagactccatctcaaaaaaaaaaaaaaaaaaggtaagcaggtctttcaaggcattccaagcataaggaagagcatgaatgaggcctagaaggatgccagtgcccgaggtgacgtgggagcccttttcccagagttacatgctgggcccatgatgggtgtgggcctgcatgggacaggagagcttgttgcagagatatgatgctaggctgaggtgtcttatcccatgcagtctttcctgtctgtcttccgctcactggcgatgctggagaagacggtggaaaaatgctgcatctccctgaatggccggagcagccgcctggtggtccagctgcattgcaagttcggggtgcggaagactcacaacctgtccttccaggactgtgagtccctgcaggccgtcttcgacccagcctcgtgcccccacatgctccgcgccccagcacgggttctgggggaggctgttctgcccttctctcctgcactggctgaagtgacgctgggcattggccgtggccgcagggtcatcctgcgcagctaccacgaggaggaggcagacagcactgccaaagccatggtgactgagatgtgccttggagaggaggatttccagcagctgcaggcccaggaaggggtggccatcactttctgcctcaaggaattccgggggctcctgagctttgcagagtcagcaaacttgaatcttagcattcattttgatgctccaggcaggtagttcccagccttgggacagggaagggctctgggatggcaggagctgaatgggatgacctagcttgggccccctcccctgcccaggcccgccatcttcaccatcaaggactctttgctggacggccactttgtcttggccacactctcagacaccgactcgcactcccaggacctgggctccccagagcgtcaccagccagtgcctcagctccaggctcacagcacaccccacccggacgactttgccaatgacgacattgactcttacatgatcgccatggaaaccactataggcaatgagggctcgcgggtgctgccctccatttccctttcacctggcccccagccccccaagagccccggtccccactccgaggaggaagatgaggctgagcccagtacagtgcctgggactcccccacccaagaagttccgctcactgttcttcggctccatcctggcccctgtacgctccccccagggccccagccctgtgctggcggaagacagtgagggtgaaggctgaaccaagaacctgaagcctgtacccagaggccttggactagacgaagccccagccagtggcagaactgggtctctcagccctggggatcagaaaggtgggcttgctggagctgagctgtttcactgcctctcgcaggccccagctggctgtcactgtaaagctgtcccacagcggtcgggcctgggccgttatctccccacaacccccagccaatcaggactttccagacttggccctgaactactgacgttcctacctcttatttctcattgagcctcaggctatactccagctggccaaggctggaaacctgtctccctcaggctcaccttcctaaggaaaatgtcatagtaggtgctgctggcccctggtgatccagcttctctgccaatcatgacctgttccttcctgaagtcctgggcatgcatctgggacccccgtggagctgacaagttttccttgctttcctgatactctttggcgctgacttggaattctaagagccttggacccgagtgtgtggctagggttgccctggctggggcccggtgccgagactcccaagcggctctgtgcagaagagctgccaggcagtgtcttagatgtgagacggaggccatggcgagaatccagctttgacctttattcaagagaccagatgggttgccccaggatccggctgccagccctgaggccaagcacggctggagacccacgacctggcctgccgttgccctgagctgcagcctcggccccaggatcctgctcacagtcaccgcaggtgcaggcaggaagcagccctgggggactggacgctgctattgattcattaaaaaaagaaaagaaaaat

SEQ ID NO: 282483 - DNA, 5630 bp, Homo sapiens
gggctcattcagcggtcgcgagctgcccgcgagggggagcggccggacggagagcgcgacccgtcccgggggtggggccgggcgcagcggcgagaggaggcgaaggtggctgcggtagcagcagcgcggcagcctcggacccagcccggagcgcagggcggccgctgcaggtccccgctcccctccccgtgcgtccgcccatggccgccgccgggcagctgtgcttgctctacctgtcggcggggctcctgtcccggctcggcgcagccttcaacttggacactcgggaggacaacgtgatccggaaatatggagaccccgggagcctcttcggcttctcgctggccatgcactggcaactgcagcccgaggacaagcggctgttgctcgtgggggccccgcgggcagaagcgcttccactgcagagagccaacagaacgggagggctgtacagctgcgacatcaccgcccgggggccatgcacgcggatcgagtttgataacgatgctgaccccacgtcagaaagcaaggaagatcagtggatgggggtcaccgtccagagccaaggtccagggggcaaggtcgtgacatgtgctcaccgatatgaaaaaaggcagcatgttaatacgaagcaggaatcccgagacatctttgggcggtgttatgtcctgagtcagaatctcaggattgaagacgatatggatgggggagattggagcttttgtgatgggcgattgagaggccatgagaaatttggctcttgccagcaaggtgtagcagctacttttactaaagactttcattacattgtatttggagccccgggtacttataactggaaagggattgttcgtgtagagcaaaagaataacactttttttgacatgaacatctttgaagatgggccttatgaagttggtggagagactgagcatgatgaaagtctcgttcctgttcctgctaacagttacttaggtttttctttggactcagggaaaggtattgtttctaaagatgagatcacttttgtatctggtgctcccagagccaatcacagtggagccgtggttttgctgaagagagacatgaagtctgcacatctcctccctgagcacatattcgatggagaaggtctggcctcttcatttggctatgatgtggcggtggtggacctcaacaaggatgggtggcaagatatagttattggagccccacagtattttgatagagatggagaagttggaggtgcagtgtatgtctacatgaaccagcaaggcagatggaataatgtgaagccaattcgtcttaatggaaccaaagattctatgtttggcattgcagtaaaaaatattggagatattaatcaagatggctacccagatattgcagttggagctccgtatgatgacttgggaaaggtttttatctatcatggatctgcaaatggaataaataccaaaccaacacaggttctcaagggtatatcaccttattttggatattcaattgctggaaacatggaccttgatcgaaattcctaccctgatgttgctgttggttccctctcagattcagtaactattttcagatcccggcctgtgattaatattcagaaaaccatcacagtaactcctaacagaattgacctccgccagaaaacagcgtgtggggcgcctagtgggatatgcctccaggttaaatcctgttttgaatatactgctaaccccgctggttataatccttcaatatcaattgtgggcacacttgaagctgaaaaagaaagaagaaaatctgggctatcctcaagagttcagtttcgaaaccaaggttctgagcccaaatatactcaagaactaactctgaagaggcagaaacagaaagtgtgcatggaggaaaccctgtggctacaggataatatcagagataaactgcgtcccattcccataactgcctcagtggagatccaagagccaagctctcgtaggcgagtgaattcacttccagaagttcttccaattctgaattcagatgaacccaagacagctcatattgatgttcacttcttaaaagagggatgtggagacgacaatgtatgtaacagcaaccttaaactagaatataaattttgcacccgagaaggaaatcaagacaaattttcttatttaccaattcaaaaaggtgtaccagaactagttctaaaagatcagaaggatattgctttagaaataacagtgacaaacagcccttccaacccaaggaatcccacaaaagatggcgatgacgcccatgaggctaaactgattgcaacgtttccagacactttaacctattctgcatatagagaactgagggctttccctgagaaacagttgagttgtgttgccaaccagaatggctcgcaagctgactgtgagctcggaaatccttttaaaagaaattcaaatgtcactttttatttggttttaagtacaactgaagtcacctttgacaccccagatctggatattaatctgaagttagaaacaacaagcaatcaagataatttggctccaattacagctaaagcaaaagtggttattgaactgcttttatcggtctcgggagttgctaaaccttcccaggtgtattttggaggtacagttgttggcgagcaagctatgaaatctgaagatgaagtgggaagtttaatagagtatgaattcagggtaataaacttaggtaaacctcttacaaacctcggcacagcaaccttgaacattcagtggccaaaagaaattagcaatgggaaatggttgctttatttggtgaaagtagaatccaaaggattggaaaaggtaacttgtgagccacaaaaggagataaactccctgaacctaacggagtctcacaactcaagaaagaaacgggaaattactgaaaaacagatagatgataacagaaaattttctttatttgctgaaagaaaataccagactcttaactgtagcgtgaacgtgaactgtgtgaacatcagatgcccgctgcgggggctggacagcaaggcgtctcttattttgcgctcgaggttatggaacagcacatttctagaggaatattccaaactgaactacttggacattctcatgcgagccttcattgatgtgactgctgctgccgaaaatatcaggctgccaaatgcaggcactcaggttcgagtgactgtgtttccctcaaagactgtagctcagtattcgggagtaccttggtggatcatcctagtggctattctcgctgggatcttgatgcttgctttattagtgtttatactatggaagtgtggtttcttcaagagaaataagaaagatcattatgatgccacatatcacaaggctgagatccatgctcagccatctgataaagagaggcttacttctgatgcatagtattgatctacttctgtaattgtgtggattctttaaacgctctaggtacgatgacagtgttccccgataccatgctgtaaggatccggaaagaagagcgagagatcaaagatgaaaagtatattgataaccttgaaaaaaaacagtggatcacaaagtggaacgaaaatgaaagctactcatagcgggggcctaaaaaaaaaaagcttcacagtacccaaactgctttttccaactcagaaattcaatttggatttaaaagcctgctcaatccctgaggactgatttcagagtgactacacacagtacgaacctacagttttaactgtggatattgttacgtagcctaaggctcctgttttgcacagccaaatttaaaactgttggaatggatttttctttaactgccgtaatttaactttctgggttgcctttgtttttggcgtggctgacttacatcatgtgttggggaagggcctgcccagttgcactcaggtgacatcctccagatagtgtagctgaggaggcacctacactcacctgcactaacagagtggccgtcctaacctcgggcctgctgcgcagacgtccatcacgttagctgtcccacatcacaagactatgccattggggtagttgtgtttcaacggaaagtgctgtcttaaactaaatgtgcaatagaaggtgatgttgccatcctaccgtcttttcctgtttcctagctgtgtgaatacctgctcacgtcaaatgcatacaagtttcattctccctttcactaaaacacacaggtgcaacagacttgaatgctagttatacttatttgtatatggtatttattttttcttttctttacaaaccattttgttattgactaacaggccaaagagtctccagtttacccttcaggttggtttaatcaatcagaattagagcatgggaggtcatcactttgacctaaattatttactgcaaaaagaaaatctttataaatgtaccagagagagttgttttaataacttatctataaactataacctctccttcatgacagcctccaccccacaacccaaaaggtttaagaaatagaattataactgtaaagatgtttatttcaggcattggatattttttactttagaagcctgcataatgtttctggatttcatactgtaacattcaggaattcttggagaaaatgggtttattcactgaactctagtgcggtttactcactgctgcaaatactgtatattcaggacttgaaagaaatggtgaatgcctatggtggatccaaactgatccagtataagactactgaatctgctaccaaaacagttaatcagtgagtcgatgttctattttttgtttgtttcctcccctatctgtattcccaaaaattactttggggctaatttaacaagaactttaaattgtgttttaattgtaaaaatggcagggggtggaattattactctatacattcaacagagactgaatagatatgaaagctgattttttttaattaccatgcttcacaatgttaagttatatggggagcaacagcaaacaggtgctaatttgttttggatatagtataagcagtgtctgtgttttgaaagaatagaacacagtttgtagtgccactgttgttttgggggggcttttttcttttcggaaatcttaaaccttaagatactaaggacgttgttttggttgtactttggaattcttagtcacaaaatatattttgtttacaaaaatttctgtaaaacaggttataacagtgtttaaagtctcagtttcttgcttggggaacttgtgtccctaatgtgtttagattgctagattgctaaggagctgatactttgacagtgtttttagacctgtgttactaaaaaaaagatgaatgtcctgaaaagggtgttgggagggtggttcaacaaagaaacaaagatgttatggtgtttagatttatggttgttaaaaatgtcatctcaagtcaagtcactggtctgtttgcatttgatacatttttgtactaactagcattgtaaaattatttcatgattagaaattacctgtggatatttgtataaaagtgtgaaataaattttttataaaagtgttcattgtttcgtaacacagcattgtatatgtgaagcaaactctaaaattataaatgacaacctgaattatctatttcatcaaa

SEQ ID NO: 282484 - DNA, 2134 bp, Homo sapiens
gggctcattcagcggtcgcgagctgcccgcgagggggagcggccggacggagagcgcgacccgtcccgggggtggggccgggcgcagcggcgagaggaggcgaaggtggctgcggtagcagcagcgcggcagcctcggacccagcccggagcgcagggcggccgctgcaggtccccgctcccctccccgtgcgtccgcccatggccgccgccgggcagctgtgcttgctctacctgtcggcggggctcctgtcccggctcggcgcagccttcaacttggacactcgggaggacaacgtgatccggaaatatggagaccccgggagcctcttcggcttctcgctggccatgcactggcaactgcagcccgaggacaagcggctgttgctcgtgggggccccgcgggcagaagcgcttccactgcagagagccaacagaacgggagggctgtacagctgcgacatcaccgcccgggggccatgcacgcggatcgagtttgataacgatgctgaccccacgtcagaaagcaaggaagatcagtggatgggggtcaccgtccagagccaaggtccagggggcaaggtcgtgacatgtgctcaccgatatgaaaaaaggcagcatgttaatacgaagcaggaatcccgagacatctttgggcggtgttatgtcctgagtcagaatctcaggattgaagacgatatggatgggggagattggagcttttgtgatgggcgattgagaggccatgagaaatttggctcttgccagcaaggtgtagcagctacttttactaaagactttcattacattgtatttggagccccgggtacttataactggaaagggattgttcgtgtagagcaaaagaataacactttttttgacatgaacatctttgaagatgggccttatgaagttggtggagagactgagcatgatgaaagtctcgttcctgttcctgctaacagttacttaggtttttctttggactcagggaaaggtattgtttctaaagatgagatcacttttgtatctggtgctcccagagccaatcacagtggagccgtggttttgctgaagagagacatgaagtctgcacatctcctccctgagcacatattcgatggagaaggtctggcctcttcatttggctatgatgtggcggtggtggacctcaacaaggatgggtggcaagatatagttattggagccccacagtattttgatagagatggagaagttggaggtgcagtgtatgtctacatgaaccagcaaggcagatggaataatgtgaagccaattcgtcttaatggaaccaaagattctatgtttggcattgcagtaaaaaatattggagatattaatcaagatggctacccagatattgcagttggagctccgtatgatgacttgggaaaggtttttatctatcatggatctgcaaatggaataaataccaaaccaacacaggttctcaagggtatatcaccttattttggatattcaattgctggaaacatggaccttgatcgaaattcctaccctgatgttgctgttggttccctctcagattcagtaactattttcagatcccggcctgtgattaatattcagaaaaccatcacagtaactcctaacagaattgacctccgccagaaaacagcgtgtggggcgcctagtgggatatgcctccaggttaaatcctgttttgaatatactgctaaccccgctggttataatccttcaatatcaattgtgggcacacttgaagctgaaaaagaaagaagaaaatctgggctatcctcaagagttcagtttcgaaaccaaggttctgagcccaaatatactcaagaactaactctgaagaggcagaaacagaaagtgtgcatggaggaaaccctgtggctacaggataatatcagagataaactgcgtcccattcccataactgcctcagtggagatccaagagccaagctctcgtaggcgagtgaattcacttccagaagttcttccaattctgaattcagatgaacccaagacagctcatattgatgttcacttcttaaaagagggatgtggagacgacaatgtatgtaacagcaaccttaaactagaatataaattttgcacccg

SEQ ID NO: 282485 - DNA, 1039 bp, Homo sapiens
attaggaaccatttattttcttttgtttcatcttcatttttttgttgtttttaccatttcattcctttagggattgttcgtgtagagcaaaagaataacactttttttgacatgaacatctttgaagatgggccttatgaagttggtggagagactgagcatgatgaaagtctcgttcctgttcctgctaacagttacttaggtaggagcaggcacagatggctgcctttgcccaccttctcagataccttgtgtgaactccctcgcagggcctatggccctggacttctaggctgagaagaggccaggtgggccgggccacttttgctggaatttgataagcttggtgatctagaggcgttaaaccgactgatgcctggatcctttccttctgactggggctcctcaaagggggaagaaacctcttatcacctaaaatcatccgtcctccctcctgctcagaagtctgtctcttgagctaatggcagcctccgtaacctgaaacaggccgctcatgcagccatgaaaacatgcatgggtgttcacagtaagctgagatctttgttcagtgcctccttccagagatactcttaagaactgcatttaataaagttactcttaagtggcaagtcaagacctccaggtcctccctctgtgattgtggttctccaaggattagccctgcttctggattgggaccccatgtcacagggccccacagatggataaaagcttcccagcggaggttgagcaggactgctaaaacggctttcaggacacccagactgtgtctaagggccaattcttaactcctaaggcttgtttgcatgactaatgggtgtcctaagttattcatgtacattatggtaattacacaaaggcttttaaaagctttaattcttggtatgagttgacaaaaagaataattactgtgcatttcttggaaaaaatgtaaaaaaaagtctaaacccaaatagtaacctgtttaaaatagaacaaagacggtgaagaaaagtacccggatgttaggatattacct

SEQ ID NO: 282486 - DNA, 464 bp, Homo sapiens
ggtcgctctagaggatccctcagacagcggacccccaaaaggtttaagaaatagaattataactgtaaagatgtttatttcaggcattggatattttttactttagaagcctgcataatgtttctggatttcatactgtaacattcaggaattcttggagaaaatgggtttattcactgaactctagtgcggtttactcactgctgcaaatactgtatattcaggacttgaaagaaatggtgaatgcctatggtggatccaaactgatccagtataagactactgaatctgctaccaaaacagttaatcagtgagtcgatgttctattttttgtttgtttcctcccctatctgtattcccaaaaattactttggggctaatttaacaagaactttaaattgtgttttaattgtaaaaatggcagggggtccggctgtctaatcaagcttataactaccctgggc

SEQ ID NO: 282487 - DNA, 223 bp, Homo sapiens
gacgagctcggtaccattatgattgctagattgctaaggagctgatactttgacagtgtttttagacctgtgttactaaaaaaaagatgaatgtcctgaaaagggtgttgggagggtggttcaacaaagaaacaaagatgttatggtgtttagatttatggttgttaaaaatgtcatctcaagtcaagtcactggtctgtcaatctaacaagtctgtcaatca

SEQ ID NO: 282488 - DNA, 1490 bp, Homo sapiens
aagacagttccatggccttatgaactagataaaagtaaataggaaaagttctctatcactgaacgaaggaaattatagtagaaagtggaattatacttttatactcatttagagtgacctaacctgaggagcattgggtccctaccatttaagggttttatggtgctcagagtttgggaaaatgacagcaatcattctttcatgatggtgtattcgaatttgtattgtgattcaccccacagatccaaaggcctcaagtaaatggcatttgttccataaaatttactgtaaaaggcagaaaaatacccatagtatatctatattttatttggatttgtgcttttatttagagaatttattttctaacctttgtctcaataaactgccgaagtcaatcttttgcctcttttggagttcatattctcctgcaggaagaaactacccaaagctacaatcagcaatgtatatacgttttccctattagaatgatttttgtccacaagatttctgttacaaagagaaaaatcaatgagctgactagtgtcatccatataatatttgaccagagatgtatggtgaagggtgtattgaatatgacaatgaaacaatgcagtggctgttcattgttggttgactgaaagtggtctgtttgtaaacaagccactagtagaaggcagattaaaatttgagatgttctgttgtttggctcttatacacaaaactgtaaaattgactaaataccttgcttccttgtagtgttgtggtttcttcaagagaaataagaaagatcattatgatgccacatatcacaaggctgagatccatgctcagccatctgataaagagaggcttacttctgatgcatagtattgatctacttctgtaattggtaattgatcaatgttttttaattgctagctgtgggacccgctatggttgtggtggctaactttaagaacaacagcttgctatgtgtgtcccattaacagatgtttccaaatgtccacactggcttgccttgcttggatttgttttattttatttcacttgaaagctcagtttttgttttttttaatgcacagtctttcgttgcaggtgagttattttatgttcttgttaaatatctaccacagcaatgaagaaaatttgcaatatttgtacacacaaaaagagacttttagccctccatagtagcccagtttgcaatgtgttattaattcggtatgtagcattccactagggaattcaaagatgcataagaaatcattctagatttcttgtccattttggaattttccacagatagaagctgtgtcgaccgcctaattaacctgttgcatgttggaaatgttgtgtttctcttggtgaggcttcctcactgtcatctttttgttctctttgctataaagtgatggggaaggcttggaatgctttttactgttgctcaggaatcgttttatgctagctaagcatgcaacttccatttcctg

SEQ ID NO: 282489 - DNA, 335 bp, Homo sapiens
ggtactgatgttatcgcccaacaccctaaaaaaaaaaagcttcacagtacccaaactgctttttccaactcagaaattcaatttggatttaaaagcctgctcaatccctgaggactgatttcagagtgactacacacagtacgaacctacagttttaactgtggatattgttacgtagcctaaggctcctgttttgcacagccaaatttaaaactgttggaatggatttttctttaactgccgtaatttaactttctgggttgcctttgtttttggcgtggctgacttacatcatgtgttgggataacatcgggatcctctagatcgcccagcag

SEQ ID NO: 282490 - DNA, 5490 bp, Homo sapiens
gggctcattcagcggtcgcgagctgcccgcgagggggagcggccggacggagagcgcgacccgtcccgggggtggggccgggcgcagcggcgagaggaggcgaaggtggctgcggtagcagcagcgcggcagcctcggacccagcccggagcgcagggcggccgctgcaggtccccgctcccctccccgtgcgtccgcccatggccgccgccgggcagctgtgcttgctctacctgtcggcggggctcctgtcccggctcggcgcagccttcaacttggacactcgggaggacaacgtgatccggaaatatggagaccccgggagcctcttcggcttctcgctggccatgcactggcaactgcagcccgaggacaagcggctgttgctcgtgggggccccgcgggcagaagcgcttccactgcagagagccaacagaacgggagggctgtacagctgcgacatcaccgcccgggggccatgcacgcggatcgagtttgataacgatgctgaccccacgtcagaaagcaaggaagatcagtggatgggggtcaccgtccagagccaaggtccagggggcaaggtcgtgacatgtgctcaccgatatgaaaaaaggcagcatgttaatacgaagcaggaatcccgagacatctttgggcggtgttatgtcctgagtcagaatctcaggattgaagacgatatggatgggggagattggagcttttgtgatgggcgattgagaggccatgagaaatttggctcttgccagcaaggtgtagcagctacttttactaaagactttcattacattgtatttggagccccgggtacttataactggaaagggattgttcgtgtagagcaaaagaataacactttttttgacatgaacatctttgaagatgggccttatgaagttggtggagagactgagcatgatgaaagtctcgttcctgttcctgctaacagttacttaggtttttctttggactcagggaaaggtattgtttctaaagatgagatcacttttgtatctggtgctcccagagccaatcacagtggagccgtggttttgctgaagagagacatgaagtctgcacatctcctccctgagcacatattcgatggagaaggtctggcctcttcatttggctatgatgtggcggtggtggacctcaacaaggatgggtggcaagatatagttattggagccccacagtattttgatagagatggagaagttggaggtgcagtgtatgtctacatgaaccagcaaggcagatggaataatgtgaagccaattcgtcttaatggaaccaaagattctatgtttggcattgcagtaaaaaatattggagatattaatcaagatggctacccagatattgcagttggagctccgtatgatgacttgggaaaggtttttatctatcatggatctgcaaatggaataaataccaaaccaacacaggttctcaagggtatatcaccttattttggatattcaattgctggaaacatggaccttgatcgaaattcctaccctgatgttgctgttggttccctctcagattcagtaactattttcagatcccggcctgtgattaatattcagaaaaccatcacagtaactcctaacagaattgacctccgccagaaaacagcgtgtggggcgcctagtgggatatgcctccaggttaaatcctgttttgaatatactgctaaccccgctggttataatccttcaatatcaattgtgggcacacttgaagctgaaaaagaaagaagaaaatctgggctatcctcaagagttcagtttcgaaaccaaggttctgagcccaaatatactcaagaactaactctgaagaggcagaaacagaaagtgtgcatggaggaaaccctgtggctacaggataatatcagagataaactgcgtcccattcccataactgcctcagtggagatccaagagccaagctctcgtaggcgagtgaattcacttccagaagttcttccaattctgaattcagatgaacccaagacagctcatattgatgttcacttcttaaaagagggatgtggagacgacaatgtatgtaacagcaaccttaaactagaatataaattttgcacccgagaaggaaatcaagacaaattttcttatttaccaattcaaaaaggtgtaccagaactagttctaaaagatcagaaggatattgctttagaaataacagtgacaaacagcccttccaacccaaggaatcccacaaaagatggcgatgacgcccatgaggctaaactgattgcaacgtttccagacactttaacctattctgcatatagagaactgagggctttccctgagaaacagttgagttgtgttgccaaccagaatggctcgcaagctgactgtgagctcggaaatccttttaaaagaaattcaaatgtcactttttatttggttttaagtacaactgaagtcacctttgacaccccagatctggatattaatctgaagttagaaacaacaagcaatcaagataatttggctccaattacagctaaagcaaaagtggttattgaactgcttttatcggtctcgggagttgctaaaccttcccaggtgtattttggaggtacagttgttggcgagcaagctatgaaatctgaagatgaagtgggaagtttaatagagtatgaattcagggtaataaacttaggtaaacctcttacaaacctcggcacagcaaccttgaacattcagtggccaaaagaaattagcaatgggaaatggttgctttatttggtgaaagtagaatccaaaggattggaaaaggtaacttgtgagccacaaaaggagataaactccctgaacctaacggagtctcacaactcaagaaagaaacgggaaattactgaaaaacagatagatgataacagaaaattttctttatttgctgaaagaaaataccagactcttaactgtagcgtgaacgtgaactgtgtgaacatcagatgcccgctgcgggggctggacagcaaggcgtctcttattttgcgctcgaggttatggaacagcacatttctagaggaatattccaaactgaactacttggacattctcatgcgagccttcattgatgtgactgctgctgccgaaaatatcaggctgccaaatgcaggcactcaggttcgagtgactgtgtttccctcaaagactgtagctcagtattcgggagtaccttggtggatcatcctagtggctattctcgctgggatcttgatgcttgctttattagtgtttatactatggaagtgtggtttcttcaagagaaataagaaagatcattatgatgccacatatcacaaggctgagatccatgctcagccatctgataaagagaggcttacttctgatgcatagtattgatctacttctgtaattgtgtggattctttaaacgctctaggtacgatgacagtgttccccgataccatgctgtaaggatccggaaagaagagcgagagatcaaagatgaaaagtatattgataaccttgaaaaaaaacagtggatcacaaagtggaacgaaaatgaaagctactcatagcgggggcctaaaaaaaaaaagcttcacagtacccaaactgctttttccaactcagaaattcaatttggatttaaaagcctgctcaatccctgaggactgatttcagagtgactacacacagtacgaacctacagttttaactgtggatattgttacgtagcctaaggctcctgttttgcacagccaaatttaaaactgttggaatggatttttctttaactgccgtaatttaactttctgggttgcctttgtttttggcgtggctgacttacatcatgtgttggggaagggcctgcccagttgcactcaggtgacatcctccagatagtgtagctgaggaggcacctacactcacctgcactaacagagtggccgtcctaacctcgggcctgctgcgcagacgtccatcacgttagctgtcccacatcacaagactatgccattggggtagttgtgtttcaacggaaagtgctgtcttaaactaaatgtgcaatagaaggtgatgttgccatcctaccgtcttttcctgtttcctagctgtgtgaatacctgctcacgtcaaatgcatacaagtttcattctccctttcactaaaacacacaggtgcaacagacttgaatgctagttatacttatttgtatatggtatttattttttcttttctttacaaaccattttgttattgactaacaggccaaagagtctccagtttacccttcaggttggtttaatcaatcagaattagagcatgggaggtcatcactttgacctaaattatttactgcatataacctctccttcatgacagcctccaccccacaacccaaaaggtttaagaaatagaattataactgtaaagatgtttatttcaggcattggatattttttactttagaagcctgcataatgtttctggatttcatactgtaacattcaggaattcttggagaaaatgggtttattcactgaactctagtgcggtttactcactgctgcaaatactgtatattcaggacttgaaagaaatggtgaatgcctatggtggatccaaactgatccagtataagactactgaatctgctaccaaaacagttaatcagtgagtcgatgttctattttttgtttgtttcctcccctatctgtattcccaaaaattactttggggctaatttaacaagaactttaaattgtgttttaattgtaaaaatggcagggggtggaattattactctatacattcaacagagactgaatagatatgaaagctgattttttttaattaccatgcttcacaatgttaagttatatggggagcaacagcaaacaggtgctaatttgttttggatatagtataagcagtgtctgtgttttgaaagaatagaacacagtttgtagtgccactgttgttttgggggggcttttttcttttcggaaatcttaaaccttaagatactaaggacgttgttttggttgtactttggaattcttagtcacaaaatatattttgtttacaaaaatttctgtaaaacaggttataacagtgtttaaagtctcagtttcttgcttggggaacttgtgtccctaatgtgtttagattgctagattgctaaggagctgatactttgacagtgtttttagacctgtgttactaaaaaaaagatgaatgtcctgaaaagggtgttgggagggtggttcaacaaagaaacaaagatgttatggtgtttagatttatggttgttaaaaatgtcatctcaagtcaagtcactggtctgtttgcatttgatacatttttgtactaactagcattgtaaaattatttcatgattagaaattacctgtggatatttgtataaaagtgtgaaataaattttttataaaagtgtt

SEQ ID NO: 282491 - DNA, 5992 bp, Homo sapiens
gggctcattcagcggtcgcgagctgcccgcgagggggagcggccggacggagagcgcgacccgtcccgggggtggggccgggcgcagcggcgagaggaggcgaaggtggctgcggtagcagcagcgcggcagcctcggacccagcccggagcgcagggcggccgctgcaggtccccgctcccctccccgtgcgtccgcccatggccgccgccgggcagctgtgcttgctctacctgtcggcggggctcctgtcccggctcggcgcagccttcaacttggacactcgggaggacaacgtgatccggaaatatggagaccccgggagcctcttcggcttctcgctggccatgcactggcaactgcagcccgaggacaagcggctgttgctcgtgggggccccgcgggcagaagcgcttccactgcagagagccaacagaacgggagggctgtacagctgcgacatcaccgcccgggggccatgcacgcggatcgagtttgataacgatgctgaccccacgtcagaaagcaaggaagatcagtggatgggggtcaccgtccagagccaaggtccagggggcaaggtcgtgacatgtgctcaccgatatgaaaaaaggcagcatgttaatacgaagcaggaatcccgagacatctttgggcggtgttatgtcctgagtcagaatctcaggattgaagacgatatggatgggggagattggagcttttgtgatgggcgattgagaggccatgagaaatttggctcttgccagcaaggtgtagcagctacttttactaaagactttcattacattgtatttggagccccgggtacttataactggaaagggattgttcgtgtagagcaaaagaataacactttttttgacatgaacatctttgaagatgggccttatgaagttggtggagagactgagcatgatgaaagtctcgttcctgttcctgctaacagttacttaggtttttctttggactcagggaaaggtattgtttctaaagatgagatcacttttgtatctggtgctcccagagccaatcacagtggagccgtggttttgctgaagagagacatgaagtctgcacatctcctccctgagcacatattcgatggagaaggtctggcctcttcatttggctatgatgtggcggtggtggacctcaacaaggatgggtggcaagatatagttattggagccccacagtattttgatagagatggagaagttggaggtgcagtgtatgtctacatgaaccagcaaggcagatggaataatgtgaagccaattcgtcttaatggaaccaaagattctatgtttggcattgcagtaaaaaatattggagatattaatcaagatggctacccagatattgcagttggagctccgtatgatgacttgggaaaggtttttatctatcatggatctgcaaatggaataaataccaaaccaacacaggttctcaagggtatatcaccttattttggatattcaattgctggaaacatggaccttgatcgaaattcctaccctgatgttgctgttggttccctctcagattcagtaactattttcagatcccggcctgtgattaatattcagaaaaccatcacagtaactcctaacagaattgacctccgccagaaaacagcgtgtggggcgcctagtgggatatgcctccaggttaaatcctgttttgaatatactgctaaccccgctggttataatccttcaatatcaattgtgggcacacttgaagctgaaaaagaaagaagaaaatctgggctatcctcaagagttcagtttcgaaaccaaggttctgagcccaaatatactcaagaactaactctgaagaggcagaaacagaaagtgtgcatggaggaaaccctgtggctacaggataatatcagagataaactgcgtcccattcccataactgcctcagtggagatccaagagccaagctctcgtaggcgagtgaattcacttccagaagttcttccaattctgaattcagatgaacccaagacagctcatattgatgttcacttcttaaaagagggatgtggagacgacaatgtatgtaacagcaaccttaaactagaatataaattttgcacccgagaaggaaatcaagacaaattttcttatttaccaattcaaaaaggtgtaccagaactagttctaaaagatcagaaggatattgctttagaaataacagtgacaaacagcccttccaacccaaggaatcccacaaaagatggcgatgacgcccatgaggctaaactgattgcaacgtttccagacactttaacctattctgcatatagagaactgagggctttccctgagaaacagttgagttgtgttgccaaccagaatggctcgcaagctgactgtgagctcggaaatccttttaaaagaaattcaaatgtcactttttatttggttttaagtacaactgaagtcacctttgacaccccagatctggatattaatctgaagttagaaacaacaagcaatcaagataatttggctccaattacagctaaagcaaaagtggttattgaactgcttttatcggtctcgggagttgctaaaccttcccaggtgtattttggaggtacagttgttggcgagcaagctatgaaatctgaagatgaagtgggaagtttaatagagtatgaattcagggtaataaacttaggtaaacctcttacaaacctcggcacagcaaccttgaacattcagtggccaaaagaaattagcaatgggaaatggttgctttatttggtgaaagtagaatccaaaggattggaaaaggtaacttgtgagccacaaaaggagataaactccctgaacctaacggagtctcacaactcaagaaagaaacgggaaattactgaaaaacagatagatgataacagaaaattttctttatttgctgaaagaaaataccagactcttaactgtagcgtgaacgtgaactgtgtgaacatcagatgcccgctgcgggggctggacagcaaggcgtctcttattttgcgctcgaggttatggaacagcacatttctagaggaatattccaaactgaactacttggacattctcatgcgagccttcattgatgtgactgctgctgccgaaaatatcaggctgccaaatgcaggcactcaggttcgagtgactgtgtttccctcaaagactgtagctcagtattcgggagtaccttggtggatcatcctagtggctattctcgctgggatcttgatgcttgctttattagtgtttatactatggaagtgtggtttcttcaagagaaataagaaagatcattatgatgccacatatcacaaggctgagatccatgctcagccatctgataaagagaggcttacttctgatgcatagtattgatctacttctgtaattgtgtggattctttaaacgctctaggtacgatgacagtgttccccgataccatgctgtaaggatccggaaagaagagcgagagatcaaagatgaaaagtatattgataaccttgaaaaaaaacagtggatcacaaagtggaacgaaaatgaaagctactcatagcgggggcctaaaaaaaaaaagcttcacagtacccaaactgctttttccaactcagaaattcaatttggatttaaaagcctgctcaatccctgaggactgatttcagagtgactacacacagtacgaacctacagttttaactgtggatattgttacgtagcctaaggctcctgttttgcacagccaaatttaaaactgttggaatggatttttctttaactgccgtaatttaactttctgggttgcctttgtttttggcgtggctgacttacatcatgtgttggggaagggcctgcccagttgcactcaggtgacatcctccagatagtgtagctgaggaggcacctacactcacctgcactaacagagtggccgtcctaacctcgggcctgctgcgcagacgtccatcacgttagctgtcccacatcacaagactatgccattggggtagttgtgtttcaacggaaagtgctgtcttaaactaaatgtgcaatagaaggtgatgttgccatcctaccgtcttttcctgtttcctagctgtgtgaatacctgctcacgtcaaatgcatacaagtttcattctccctttcactaaaacacacaggtgcaacagacttgaatgctagttatacttatttgtatatggtatttattttttcttttctttacaaaccattttgttattgactaacaggccaaagagtctccagtttacccttcaggttggtttaatcaatcagaattagagcatgggaggtcatcactttgacctaaattatttactgcaaaaagaaaatctttataaatgtaccagagagagttgttttaataacttatctataaactataacctctccttcatgacagcctccaccccacaacccaaaaggtttaagaaatagaattataactgtaaagatgtttatttcaggcattggatattttttactttagaagcctgcataatgtttctggatttcatactgtaacattcaggaattcttggagaaaatgggtttattcactgaactctagtgcggtttactcactgctgcaaatactgtatattcaggacttgaaagaaatggtgaatgcctatggtggatccaaactgatccagtataagactactgaatctgctaccaaaacagttaatcagtgagtcgatgttctattttttgtttgtttcctcccctatctgtattcccaaaaattactttggggctaatttaacaagaactttaaattgtgttttaattgtaaaaatggcagggggtggaattattactctatacattcaacagagactgaatagatatgaaagctgattttttttaattaccatgcttcacaatgttaagttatatggggagcaacagcaaacaggtgctaatttgttttggatatagtataagcagtgtctgtgttttgaaagaatagaacacagtttgtagtgccactgttgttttgggggggcttttttcttttcggaaatcttaaaccttaagatactaaggacgttgttttggttgtactttggaattcttagtcacaaaatatattttgtttacaaaaatttctgtaaaacaggttataacagtgtttaaagtctcagtttcttgcttggggaacttgtgtccctaatgtgtttagattgctagattgctaaggagctgatactttgacagtgtttttagacctgtgttactaaaaaaaagatgaatgtcctgaaaagggtgttgggagggtggttcaacaaagaaacaaagatgttatggtgtttagatttatggttgttaaaaatgtcatctcaagtcaagtcactggtctgtttgcatttgatacatttttgtactaactagcattgtaaaattatttcatgattagaaattacctgtggatatttgtataaaagtgtgaaataaattttttataaaagtgttcattgtttcgtaacacagcattgtatatgtgaagcaaactctaaaattataaatgacaacctgaattatctatttcatcaaaaacccacacccacaacaaaaaaaaaacaaacaacaacaaacgacaaacaaaaacaacaagcacaacacaaaaaaaacagtctgtgggcggcggcgcgcgcgcccacaagaagactagacctaaagcaggcagtgggggggcgggcggccccaaggaggaaggaacagcggagcgcagcaggtcgcccaaggcacacctgggaaaaaacagcgggggggggagaatgagcgacgcaaaaagaaacacacgcggggcgggcaccccaagcgggtgggagacacaccgtcggcagagaagaacagggggggacacaacggggtataccaaaaggaggggaagcacgggggcgcgcgaaaaagccg

SEQ ID NO: 282492 - DNA, 5947 bp, Homo sapiens
gggctcattcagcggtcgcgagctgcccgcgagggggagcggccggacggagagcgcgacccgtcccgggggtggggccgggcgcagcggcgagaggaggcgaaggtggctgcggtagcagcagcgcggcagcctcggacccagcccggagcgcagggcggccgctgcaggtccccgctcccctccccgtgcgtccgcccatggccgccgccgggcagctgtgcttgctctacctgtcggcggggctcctgtcccggctcggcgcagccttcaacttggacactcgggaggacaacgtgatccggaaatatggagaccccgggagcctcttcggcttctcgctggccatgcactggcaactgcagcccgaggacaagcggctgttgctcgtgggggccccgcgggcagaagcgcttccactgcagagagccaacagaacgggagggctgtacagctgcgacatcaccgcccgggggccatgcacgcggatcgagtttgataacgatgctgaccccacgtcagaaagcaaggaagatcagtggatgggggtcaccgtccagagccaaggtccagggggcaaggtcgtgacatgtgctcaccgatatgaaaaaaggcagcatgttaatacgaagcaggaatcccgagacatctttgggcggtgttatgtcctgagtcagaatctcaggattgaagacgatatggatgggggagattggagcttttgtgatgggcgattgagaggccatgagaaatttggctcttgccagcaaggtgtagcagctacttttactaaagactttcattacattgtatttggagccccgggtacttataactggaaagggattgttcgtgtagagcaaaagaataacactttttttgacatgaacatctttgaagatgggccttatgaagttggtggagagactgagcatgatgaaagtctcgttcctgttcctgctaacagttacttaggtttttctttggactcagggaaaggtattgtttctaaagatgagatcacttttgtatctggtgctcccagagccaatcacagtggagccgtggttttgctgaagagagacatgaagtctgcacatctcctccctgagcacatattcgatggagaaggtctggcctcttcatttggctatgatgtggcggtggtggacctcaacaaggatgggtggcaagatatagttattggagccccacagtattttgatagagatggagaagttggaggtgcagtgtatgtctacatgaaccagcaaggcagatggaataatgtgaagccaattcgtcttaatggaaccaaagattctatgtttggcattgcagtaaaaaatattggagatattaatcaagatggctacccagatattgcagttggagctccgtatgatgacttgggaaaggtttttatctatcatggatctgcaaatggaataaataccaaaccaacacaggttctcaagggtatatcaccttattttggatattcaattgctggaaacatggaccttgatcgaaattcctaccctgatgttgctgttggttccctctcagattcagtaactattttcagatcccggcctgtgattaatattcagaaaaccatcacagtaactcctaacagaattgacctccgccagaaaacagcgtgtggggcgcctagtgggatatgcctccaggttaaatcctgttttgaatatactgctaaccccgctggttataatccttcaatatcaattgtgggcacacttgaagctgaaaaagaaagaagaaaatctgggctatcctcaagagttcagtttcgaaaccaaggttctgagcccaaatatactcaagaactaactctgaagaggcagaaacagaaagtgtgcatggaggaaaccctgtggctacaggataatatcagagataaactgcgtcccattcccataactgcctcagtggagatccaagagccaagctctcgtaggcgagtgaattcacttccagaagttcttccaattctgaattcagatgaacccaagacagctcatattgatgttcacttcttaaaagagggatgtggagacgacaatgtatgtaacagcaaccttaaactagaatataaattttgcacccgagaaggaaatcaagacaaattttcttatttaccaattcaaaaaggtgtaccagaactagttctaaaagatcagaaggatattgctttagaaataacagtgacaaacagcccttccaacccaaggaatcccacaaaagatggcgatgacgcccatgaggctaaactgattgcaacgtttccagacactttaacctattctgcatatagagaactgagggctttccctgagaaacagttgagttgtgttgccaaccagaatggctcgcaagctgactgtgagctcggaaatccttttaaaagaaattcaaatgtcactttttatttggttttaagtacaactgaagtcacctttgacaccccagatctggatattaatctgaagttagaaacaacaagcaatcaagataatttggctccaattacagctaaagcaaaagtggttattgaactgcttttatcggtctcgggagttgctaaaccttcccaggtgtattttggaggtacagttgttggcgagcaagctatgaaatctgaagatgaagtgggaagtttaatagagtatgaattcagggtaataaacttaggtaaacctcttacaaacctcggcacagcaaccttgaacattcagtggccaaaagaaattagcaatgggaaatggttgctttatttggtgaaagtagaatccaaaggattggaaaaggtaacttgtgagccacaaaaggagataaactccctgaacctaacggagtctcacaactcaagaaagaaacgggaaattactgaaaaacagatagatgataacagaaaattttctttatttgctgaaagaaaataccagactcttaactgtagcgtgaacgtgaactgtgtgaacatcagatgcccgctgcgggggctggacagcaaggcgtctcttattttgcgctcgaggttatggaacagcacatttctagaggaatattccaaactgaactacttggacattctcatgcgagccttcattgatgtgactgctgctgccgaaaatatcaggctgccaaatgcaggcactcaggttcgagtgactgtgtttccctcaaagactgtagctcagtattcgggagtaccttggtggatcatcctagtggctattctcgctgggatcttgatgcttgctttattagtgtttatactatggaagtgtggtttcttcaagagaaataagaaagatcattatgatgccacatatcacaaggctgagatccatgctcagccatctgataaagagaggcttacttctgatgcatagtattgatctacttctgtaattgtgtggattctttaaacgctctaggtacgatgacagtgttccccgataccatgctgtaaggatccggaaagaagagcgagagatcaaagatgaaaagtatattgataaccttgaaaaaaaacagtggatcacaaagtggaacgaaaatgaaagctactcatagcgggggcctaaaaaaaaaaagcttcacagtacccaaactgctttttccaactcagaaattcaatttggatttaaaagcctgctcaatccctgaggactgatttcagagtgactacacacagtacgaacctacagttttaactgtggatattgttacgtagcctaaggctcctgttttgcacagccaaatttaaaactgttggaatggatttttctttaactgccgtaatttaactttctgggttgcctttgtttttggcgtggctgacttacatcatgtgttggggaagggcctgcccagttgcactcaggtgacatcctccagatagtgtagctgaggaggcacctacactcacctgcactaacagagtggccgtcctaacctcgggcctgctgcgcagacgtccatcacgttagctgtcccacatcacaagactatgccattggggtagttgtgtttcaacggaaagtgctgtcttaaactaaatgtgcaatagaaggtgatgttgccatcctaccgtcttttcctgtttcctagctgtgtgaatacctgctcacgtcaaatgcatacaagtttcattctccctttcactaaaacacacaggtgcaacagacttgaatgctagttatacttatttgtatatggtatttattttttcttttctttacaaaccattttgttattgactaacaggccaaagagtctccagtttacccttcaggttggtttaatcaatcagaattagagcatgggaggtcatcactttgacctaaattatttactgcaaaaagaaaatctttataaatgtaccagagagagttgttttaataacttatctataaactataacctctccttcatgacagcctccaccccacaacccaaaaggtttaagaaatagaattataactgtaaagatgtttatttcaggcattggatattttttactttagaagcctgcataatgtttctggatttcatactgtaacattcaggaattcttggagaaaatgggtttattcactgaactctagtgcggtttactcactgctgcaaatactgtatattcaggacttgaaagaaatggtgaatgcctatggtggatccaaactgatccagtataagactactgaatctgctaccaaaacagttaatcagtgagtcgatgttctattttttgtttgtttcctcccctatctgtattcccaaaaattactttggggctaatttaacaagaactttaaattgtgttttaattgtaaaaatggcagggggtggaattattactctatacattcaacagagactgaatagatatgaaagctgattttttttaattaccatgcttcacaatgttaagttatatggggagcaacagcaaacaggtgctaatttgttttggatatagtataagcagtgtctgtgttttgaaagaatagaacacagtttgtagtgccactgttgttttgggggggcttttttcttttcggaaatcttaaaccttaagatactaaggacgttgttttggttgtactttggaattcttagtcacaaaatatattttgtttacaaaaatttctgtaaaacaggttataacagtgtttaaagtctcagtttcttgcttggggaacttgtgtccctaatgtgtttagattgctagattgctaaggagctgatactttgacagtgtttttagacctgtgttactaaaaaaaagatgaatgtcctgaaaagggtgttgggagggtggttcaacaaagaaacaaagatgttatggtgtttagatttatggttgttaaaaatgtcatctcaagtcaagtcactggtctgtttgcatttgatacatttttgtactaactagcattgtaaaattatttcatgattagaaattacctgtggatatttgtataaaagtgtgaaataaattttttataaaagtgttcattgtttcgtaacacagcattgtatatgtgaagcaaactctaaaattataaatgacaacctgaattatctatttcatcaaaaaaaaaaaaaaaaaaaaaaaaaaaaaaaaaaaaaaaaaaaaaaaaaaaaaaaaaattaaaaaaaaaaaaaaaaaaaaaaaaaaaaaaacatgccgcccgcttggcccaagccaatttaaaattggacaaagttaatccatgcgcccgaatttggacctaattggccaaattcccctaaaagggggccgttttaaaatcaatggcccgtgttttaaaaacgtcgtaactggaaaaaccttggggtacccaacttaaatccctttgaagaaaatccccttttcccaagttgggaaaccggcccccaaccccgcctttcc

SEQ ID NO: 282493 - DNA, 3952 bp, Homo sapiens
actgacctacctatactacctatctatactgacttatttatactacttatctatactgacctacctatactacctatctatactgacttatttatactacttatctatactacctatctatactgacctacctatactacctatctatactgacttatctatactgacctatctatactacctatctatactgacctgggctatcctcaagagttcagtttcgaaaccaaggttctgagcccaaatatactcaagaactaactctgaagaggcagaaacagaaagtgtgcatggaggaaaccctgtggctacaggataatatcagagataaactgcgtcccattcccataactgcctcagtggagatccaagagccaagctctcgtaggcgagtgaattcacttccagaagttcttccaattctgaattcagatgaacccaagacagctcatattgatgttcacttcttaaaagagggatgtggagacgacaatgtatgtaacagcaaccttaaactagaatataaattttgcacccgagaaggaaatcaagacaaattttcttatttaccaattcaaaaaggtgtaccagaactagttctaaaagatcagaaggatattgctttagaaataacagtgacaaacagcccttccaacccaaggaatcccacaaaagatggcgatgacgcccatgaggctaaactgattgcaacgtttccagacactttaacctattctgcatatagagaactgagggctttccctgagaaacagttgagttgtgttgccaaccagaatggctcgcaagctgactgtgagctcggaaatccttttaaaagaaattcaaatgtcactttttatttggttttaagtacaactgaagtcacctttgacaccccagatctggatattaatctgaagttagaaacaacaagcaatcaagataatttggctccaattacagctaaagcaaaagtggttattgaactgcttttatcggtctcgggagttgctaaaccttcccaggtgtattttggaggtacagttgttggcgagcaagctatgaaatctgaagatgaagtgggaagtttaatagagtatgaattcagggtaataaacttaggtaaacctcttacaaacctcggcacagcaaccttgaacattcagtggccaaaagaaattagcaatgggaaatggttgctttatttggtgaaagtagaatccaaaggattggaaaaggtaacttgtgagccacaaaaggagataaactccctgaacctaacggagtctcacaactcaagaaagaaacgggaaattactgaaaaacagatagatgataacagaaaattttctttatttgctgaaagaaaataccagactcttaactgtagcgtgaacgtgaactgtgtgaacatcagatgcccgctgcgggggctggacagcaaggcgtctcttattttgcgctcgaggttatggaacagcacatttctagaggaatattccaaactgaactacttggacattctcatgcgagccttcattgatgtgactgctgctgccgaaaatatcaggctgccaaatgcaggcactcaggttcgagtgactgtgtttccctcaaagactgtagctcagtattcgggagtaccttggtggatcatcctagtggctattctcgctgggatcttgatgcttgctttattagtgtttatactatggaagtgtggtttcttcaagagaaataagaaagatcattatgatgccacatatcacaaggctgagatccatgctcagccatctgataaagagaggcttacttctgatgcatagtattgatctacttctgtaattgtgtggattctttaaacgctctaggtacgatgacagtgttccccgataccatgctgtaaggatccggaaagaagagcgagagatcaaagatgaaaagtatattgataaccttgaaaaaaaacagtggatcacaaagtggaacgaaaatgaaagctactcatagcgggggcctaaaaaaaaaaagcttcacagtacccaaactgctttttccaactcagaaattcaatttggatttaaaagcctgctcaatccctgaggactgatttcagagtgactacacacagtacgaacctacagttttaactgtggatattgttacgtagcctaaggctcctgttttgcacagccaaatttaaaactgttggaatggatttttctttaactgccgtaatttaactttctgggttgcctttgtttttggcgtggctgacttacatcatgtgttggggaagggcctgcccagttgcactcaggtgacatcctccagatagtgtagctgaggaggcacctacactcacctgcactaacagagtggccgtcctaacctcgggcctgctgcgcagacgtccatcacgttagctgtcccacatcacaagactatgccattggggtagttgtgtttcaacggaaagtgctgtcttaaactaaatgtgcaatagaaggtgatgttgccatcctaccgtcttttcctgtttcctagctgtgtgaatacctgctcacgtcaaatgcatacaagtttcattctccctttcactaaaacacacaggtgcaacagacttgaatgctagttatacttatttgtatatggtatttattttttcttttctttacaaaccattttgttattgactaacaggccaaagagtctccagtttacccttcaggttggtttaatcaatcagaattagagcatgggaggtcatcactttgacctaaattatttactgcaaaaagaaaatctttataaatgtaccagagagagttgttttaataacttatctataaactataacctctccttcatgacagcctccaccccacaacccaaaaggtttaagaaatagaattataactgtaaagatgtttatttcaggcattggatattttttactttagaagcctgcataatgtttctggatttcatactgtaacattcaggaattcttggagaaaatgggtttattcactgaactctagtgcggtttactcactgctgcaaatactgtatattcaggacttgaaagaaatggtgaatgcctatggtggatccaaactgatccagtataagactactgaatctgctaccaaaacagttaatcagtgagtcgatgttctattttttgtttgtttcctcccctatctgtattcccaaaaattactttggggctaatttaacaagaactttaaattgtgttttaattgtaaaaatggcagggggtggaattattactctatacattcaacagagactgaatagatatgaaagctgattttttttaattaccatgcttcacaatgttaagttatatggggagcaacagcaaacaggtgctaatttgttttggatatagtataagcagtgtctgtgttttgaaagaatagaacacagtttgtagtgccactgttgttttgggggggcttttttcttttcggaaatcttaaaccttaagatactaaggacgttgttttggttgtactttggaattcttagtcacaaaatatattttgtttacaaaaatttctgtaaaacaggttataacagtgtttaaagtctcagtttcttgcttggggaacttgtgtccctaatgtgtttagattgctagattgctaaggagctgatactttgacagtgtttttagacctgtgttactaaaaaaaagatgaatgtcctgaaaagggtgttgggagggtggttcaacaaagaaacaaagatgttatggtgtttagatttatggttgttaaaaatgtcatctcaagtcaagtcactggtctgtttgcatttgatacatttttgtactaactagcattgtaaaattatttcatgattagaaattacctgtggatatttgtataaaagtgtgaaataaattttttataaaagtgtt

SEQ ID NO: 282494 - DNA, 3202 bp, Homo sapiens
taaaaatcaagataatcggttattactaatctttgctataaggaaaatgcaattttaaaagttcttgtatggcttagttttcattgctctgctctgaatgagctatataatgggtctttttgcttctttctctgttcttcagtgtcacttattccttcaagatgtgctgactaccatgttttaggaacagagctggaggctagggatacaggaataagatttgatctctgatctcagtatgcccacagtttggtggggatacagaggaacaaagaaagcatatttctctttctctgagttttaaggtcagagtgggaatgaattacttagtcctatgagtaaatcaataaacttgaatttagagtgataatacttgctggttttacacttacttctgtgcctttggcaggagagaggcaaatattgttgattatgtgaatctggcactgtttgggaggatatgctcaagaggcttgtatggtaatgacaaagaattacataaattggaactattttggatataattttttcaggagtctcacaactcaagaaagaaacgggaaattactgaaaaacagatagatgataacagaaaattttctttatttgctgaaagaaaataccagactcttaactgtagcgtgaacgtgaactgtgtgaacatcagatgcccgctgcgggggctggacagcaaggcgtctcttattttgcgctcgaggttatggaacagcacatttctagaggaatattccaaactgaactacttggacattctcatgcgagccttcattgatgtgactgctgctgccgaaaatatcaggctgccaaatgcaggcactcaggttcgagtgactgtgtttccctcaaagactgtagctcagtattcgggagtaccttggtggatcatcctagtggctattctcgctgggatcttgatgcttgctttattagtgtttatactatggaagtgtggtttcttcaagagaaataagaaagatcattatgatgccacatatcacaaggctgagatccatgctcagccatctgataaagagaggcttacttctgatgcatagtattgatctacttctgtaattgtgtggattctttaaacgctctaggtacgatgacagtgttccccgataccatgctgtaaggatccggaaagaagagcgagagatcaaagatgaaaagtatattgataaccttgaaaaaaaacagtggatcacaaagtggaacgaaaatgaaagctactcatagcgggggcctaaaaaaaaaaagcttcacagtacccaaactgctttttccaactcagaaattcaatttggatttaaaagcctgctcaatccctgaggactgatttcagagtgactacacacagtacgaacctacagttttaactgtggatattgttacgtagcctaaggctcctgttttgcacagccaaatttaaaactgttggaatggatttttctttaactgccgtaatttaactttctgggttgcctttgtttttggcgtggctgacttacatcatgtgttggggaagggcctgcccagttgcactcaggtgacatcctccagatagtgtagctgaggaggcacctacactcacctgcactaacagagtggccgtcctaacctcgggcctgctgcgcagacgtccatcacgttagctgtcccacatcacaagactatgccattggggtagttgtgtttcaacggaaagtgctgtcttaaactaaatgtgcaatagaaggtgatgttgccatcctaccgtcttttcctgtttcctagctgtgtgaatacctgctcacgtcaaatgcatacaagtttcattctccctttcactaaaacacacaggtgcaacagacttgaatgctagttatacttatttgtatatggtatttattttttcttttctttacaaaccattttgttattgactaacaggccaaagagtctccagtttacccttcaggttggtttaatcaatcagaattagagcatgggaggtcatcactttgacctaaattatttactgcaaaaagaaaatctttataaatgtaccagagagagttgttttaataacttatctataaactataacctctccttcatgacagcctccaccccacaacccaaaaggtttaagaaatagaattataactgtaaagatgtttatttcaggcattggatattttttactttagaagcctgcataatgtttctggatttcatactgtaacattcaggaattcttggagaaaatgggtttattcactgaactctagtgcggtttactcactgctgcaaatactgtatattcaggacttgaaagaaatggtgaatgcctatggtggatccaaactgatccagtataagactactgaatctgctaccaaaacagttaatcagtgagtcgatgttctattttttgtttgtttcctcccctatctgtattcccaaaaattactttggggctaatttaacaagaactttaaattgtgttttaattgtaaaaatggcagggggtggaattattactctatacattcaacagagactgaatagatatgaaagctgattttttttaattaccatgcttcacaatgttaagttatatggggagcaacagcaaacaggtgctaatttgttttggatatagtataagcagtgtctgtgttttgaaagaatagaacacagtttgtagtgccactgttgttttgggggggcttttttcttttcggaaatcttaaaccttaagatactaaggacgttgttttggttgtactttggaattcttagtcacaaaatatattttgtttacaaaaatttctgtaaaacaggttataacagtgtttaaagtctcagtttcttgcttggggaacttgtgtccctaatgtgtttagattgctagattgctaaggagctgatactttgacagtgtttttagacctgtgttactaaaaaaaagatgaatgtcctgaaaagggtgttgggagggtggttcaacaaagaaacaaagatgttatggtgtttagatttatggttgttaaaaatgtcatctcaagtcaagtcactggtctgtttgcatttgatacatttttgtactaactagcattgtaaaattatttcatgattagaaattacctgtggatatttgtataaaagtgtgaaataaattttttataaaagtgtt

SEQ ID NO: 282495 - DNA, 2262 bp, Homo sapiens
cagaggatccctacctaaatggctgtagtgtggtttcttcaagagaaataagaaagatcattatgatgccacatatcacaaggctgagatccatgctcagccatctgataaagagaggcttacttctgatgcatagtattgatctacttctgtaattgtgtggattctttaaacgctctaggtacgatgacagtgttccccgataccatgctgtaaggatccggaaagaagagcgagagatcaaagatgaaaagtatattgataaccttgaaaaaaaacagtggatcacaaagtggaacgaaaatgaaagctactcatagcgggggcctaaaaaaaaaaagcttcacagtacccaaactgctttttccaactcagaaattcaatttggatttaaaagcctgctcaatccctgaggactgatttcagagtgactacacacagtacgaacctacagttttaactgtggatattgttacgtagcctaaggctcctgttttgcacagccaaatttaaaactgttggaatggatttttctttaactgccgtaatttaactttctgggttgcctttgtttttggcgtggctgacttacatcatgtgttggggaagggcctgcccagttgcactcaggtgacatcctccagatagtgtagctgaggaggcacctacactcacctgcactaacagagtggccgtcctaacctcgggcctgctgcgcagacgtccatcacgttagctgtcccacatcacaagactatgccattggggtagttgtgtttcaacggaaagtgctgtcttaaactaaatgtgcaatagaaggtgatgttgccatcctaccgtcttttcctgtttcctagctgtgtgaatacctgctcacgtcaaatgcatacaagtttcattctccctttcactaaaacacacaggtgcaacagacttgaatgctagttatacttatttgtatatggtatttattttttcttttctttacaaaccattttgttattgactaacaggccaaagagtctccagtttacccttcaggttggtttaatcaatcagaattagagcatgggaggtcatcactttgacctaaattatttactgcaaaaagaaaatctttataaatgtaccagagagagttgttttaataacttatctataaactataacctctccttcatgacagcctccaccccacaacccaaaaggtttaagaaatagaattataactgtaaagatgtttatttcaggcattggatattttttactttagaagcctgcataatgtttctggatttcatactgtaacattcaggaattcttggagaaaatgggtttattcactgaactctagtgcggtttactcactgctgcaaatactgtatattcaggacttgaaagaaatggtgaatgcctatggtggatccaaactgatccagtataagactactgaatctgctaccaaaacagttaatcagtgagtcgatgttctattttttgtttgtttcctcccctatctgtattcccaaaaattactttggggctaatttaacaagaactttaaattgtgttttaattgtaaaaatggcagggggtggaattattactctatacattcaacagagactgaatagatatgaaagctgattttttttaattaccatgcttcacaatgttaagttatatggggagcaacagcaaacaggtgctaatttgttttggatatagtataagcagtgtctgtgttttgaaagaatagaacacagtttgtagtgccactgttgttttgggggggcttttttcttttcggaaatcttaaaccttaagatactaaggacgttgttttggttgtactttggaattcttagtcacaaaatatattttgtttacaaaaatttctgtaaaacaggttataacagtgtttaaagtctcagtttcttgcttggggaacttgtgtccctaatgtgtttagattgctagattgctaaggagctgatactttgacagtgtttttagacctgtgttactaaaaaaaagatgaatgtcctgaaaagggtgttgggagggtggttcaacaaagaaacaaagatgttatggtgtttagatttatggttgttaaaaatgtcatctcaagtcaagtcactggtctgtttgcatttgatacatttttgtactaactagcattgtaaaattatttcatgattagaaattacctgtggatatttgtataaaagtgtgaaataaattttttataaaagtgtt

SEQ ID NO: 282496 - DNA, 2993 bp, Homo sapiens
aagacagttccatggccttatgaactagataaaagtaaataggaaaagttctctatcactgaacgaaggaaattatagtagaaagtggaattatacttttatactcatttagagtgacctaacctgaggagcattgggtccctaccatttaagggttttatggtgctcagagtttgggaaaatgacagcaatcattctttcatgatggtgtattcgaatttgtattgtgattcaccccacagatccaaaggcctcaagtaaatggcatttgttccataaaatttactgtaaaaggcagaaaaatacccatagtatatctatattttatttggatttgtgcttttatttagagaatttattttctaacctttgtctcaataaactgccgaagtcaatcttttgcctcttttggagttcatattctcctgcaggaagaaactacccaaagctacaatcagcaatgtatatacgttttccctattagaatgatttttgtccacaagatttctgttacaaagagaaaaatcaatgagctgactagtgtcatccatataatatttgaccagagatgtatggtgaagggtgtattgaatatgacaatgaaacaatgcagtggctgttcattgttggttgactgaaagtggtctgtttgtaaacaagccactagtagaaggcagattaaaatttgagatgttctgttgtttggctcttatacacaaaactgtaaaattgactaaataccttgcttccttgtagtgttgtggtttcttcaagagaaataagaaagatcattatgatgccacatatcacaaggctgagatccatgctcagccatctgataaagagaggcttacttctgatgcatagtattgatctacttctgtaattgtgtggattctttaaacgctctaggtacgatgacagtgttccccgataccatgctgtaaggatccggaaagaagagcgagagatcaaagatgaaaagtatattgataaccttgaaaaaaaacagtggatcacaaagtggaacgaaaatgaaagctactcatagcgggggcctaaaaaaaaaaagcttcacagtacccaaactgctttttccaactcagaaattcaatttggatttaaaagcctgctcaatccctgaggactgatttcagagtgactacacacagtacgaacctacagttttaactgtggatattgttacgtagcctaaggctcctgttttgcacagccaaatttaaaactgttggaatggatttttctttaactgccgtaatttaactttctgggttgcctttgtttttggcgtggctgacttacatcatgtgttggggaagggcctgcccagttgcactcaggtgacatcctccagatagtgtagctgaggaggcacctacactcacctgcactaacagagtggccgtcctaacctcgggcctgctgcgcagacgtccatcacgttagctgtcccacatcacaagactatgccattggggtagttgtgtttcaacggaaagtgctgtcttaaactaaatgtgcaatagaaggtgatgttgccatcctaccgtcttttcctgtttcctagctgtgtgaatacctgctcacgtcaaatgcatacaagtttcattctccctttcactaaaacacacaggtgcaacagacttgaatgctagttatacttatttgtatatggtatttattttttcttttctttacaaaccattttgttattgactaacaggccaaagagtctccagtttacccttcaggttggtttaatcaatcagaattagagcatgggaggtcatcactttgacctaaattatttactgcaaaaagaaaatctttataaatgtaccagagagagttgttttaataacttatctataaactataacctctccttcatgacagcctccaccccacaacccaaaaggtttaagaaatagaattataactgtaaagatgtttatttcaggcattggatattttttactttagaagcctgcataatgtttctggatttcatactgtaacattcaggaattcttggagaaaatgggtttattcactgaactctagtgcggtttactcactgctgcaaatactgtatattcaggacttgaaagaaatggtgaatgcctatggtggatccaaactgatccagtataagactactgaatctgctaccaaaacagttaatcagtgagtcgatgttctattttttgtttgtttcctcccctatctgtattcccaaaaattactttggggctaatttaacaagaactttaaattgtgttttaattgtaaaaatggcagggggtggaattattactctatacattcaacagagactgaatagatatgaaagctgattttttttaattaccatgcttcacaatgttaagttatatggggagcaacagcaaacaggtgctaatttgttttggatatagtataagcagtgtctgtgttttgaaagaatagaacacagtttgtagtgccactgttgttttgggggggcttttttcttttcggaaatcttaaaccttaagatactaaggacgttgttttggttgtactttggaattcttagtcacaaaatatattttgtttacaaaaatttctgtaaaacaggttataacagtgtttaaagtctcagtttcttgcttggggaacttgtgtccctaatgtgtttagattgctagattgctaaggagctgatactttgacagtgtttttagacctgtgttactaaaaaaaagatgaatgtcctgaaaagggtgttgggagggtggttcaacaaagaaacaaagatgttatggtgtttagatttatggttgttaaaaatgtcatctcaagtcaagtcactggtctgtttgcatttgatacatttttgtactaactagcattgtaaaattatttcatgattagaaattacctgtggatatttgtataaaagtgtgaaataaattttttataaaagtgtt

SEQ ID NO: 282497 - DNA, 2850 bp, Homo sapiens
acacacattaacagtttaaaggtaaatgtatttttgcaaaagaagagaaattagggagtgctctgaaattcagtgtagtgatgcacttctgaagtcctatgcagcacatgatttttattgcaggaaacagttactatgtgattaatgaaatagcttaattagaagcacaatagcaaatccaggcaacataaatgacctcctggctaatgagagaagtgatatgtgtactagagcctcagaggagagaaaaagattataaagttgacctgttggaacactggcatattcaaatagtaatttgtaaaatacttgtgacatgatttgcattttattagtgggaaaggggcatgaaataatctttggtttatgccatttaaaaattattcttaatctaatctgataatcagatattttacatatcatattgtgattatttttaaatatggaagcactgttttcataaactcttaaattgttagtaaagaggtagcctacatttgttataaaatgtaaagagaagatgaaaatggacttttcttccagttttacagctgttctcttccgttgatccccactggctcttctttcatttcagcctcttggttctttcttaaaagaaaaccatgtctttttccccttagtccagaggtagacatagctgaacagaaagcttagacattcccatttagtgtatttgcttctttgtgagattaatttgtttctctttctctttccctcttctctagtgtggattctttaaacgctctaggtacgatgacagtgttccccgataccatgctgtaaggatccggaaagaagagcgagagatcaaagatgaaaagtatattgataaccttgaaaaaaaacagtggatcacaaagtggaacgaaaatgaaagctactcatagcgggggcctaaaaaaaaaaagcttcacagtacccaaactgctttttccaactcagaaattcaatttggatttaaaagcctgctcaatccctgaggactgatttcagagtgactacacacagtacgaacctacagttttaactgtggatattgttacgtagcctaaggctcctgttttgcacagccaaatttaaaactgttggaatggatttttctttaactgccgtaatttaactttctgggttgcctttgtttttggcgtggctgacttacatcatgtgttggggaagggcctgcccagttgcactcaggtgacatcctccagatagtgtagctgaggaggcacctacactcacctgcactaacagagtggccgtcctaacctcgggcctgctgcgcagacgtccatcacgttagctgtcccacatcacaagactatgccattggggtagttgtgtttcaacggaaagtgctgtcttaaactaaatgtgcaatagaaggtgatgttgccatcctaccgtcttttcctgtttcctagctgtgtgaatacctgctcacgtcaaatgcatacaagtttcattctccctttcactaaaacacacaggtgcaacagacttgaatgctagttatacttatttgtatatggtatttattttttcttttctttacaaaccattttgttattgactaacaggccaaagagtctccagtttacccttcaggttggtttaatcaatcagaattagagcatgggaggtcatcactttgacctaaattatttactgcaaaaagaaaatctttataaatgtaccagagagagttgttttaataacttatctataaactataacctctccttcatgacagcctccaccccacaacccaaaaggtttaagaaatagaattataactgtaaagatgtttatttcaggcattggatattttttactttagaagcctgcataatgtttctggatttcatactgtaacattcaggaattcttggagaaaatgggtttattcactgaactctagtgcggtttactcactgctgcaaatactgtatattcaggacttgaaagaaatggtgaatgcctatggtggatccaaactgatccagtataagactactgaatctgctaccaaaacagttaatcagtgagtcgatgttctattttttgtttgtttcctcccctatctgtattcccaaaaattactttggggctaatttaacaagaactttaaattgtgttttaattgtaaaaatggcagggggtggaattattactctatacattcaacagagactgaatagatatgaaagctgattttttttaattaccatgcttcacaatgttaagttatatggggagcaacagcaaacaggtgctaatttgttttggatatagtataagcagtgtctgtgttttgaaagaatagaacacagtttgtagtgccactgttgttttgggggggcttttttcttttcggaaatcttaaaccttaagatactaaggacgttgttttggttgtactttggaattcttagtcacaaaatatattttgtttacaaaaatttctgtaaaacaggttataacagtgtttaaagtctcagtttcttgcttggggaacttgtgtccctaatgtgtttagattgctagattgctaaggagctgatactttgacagtgtttttagacctgtgttactaaaaaaaagatgaatgtcctgaaaagggtgttgggagggtggttcaacaaagaaacaaagatgttatggtgtttagatttatggttgttaaaaatgtcatctcaagtcaagtcactggtctgtttgcatttgatacatttttgtactaactagcattgtaaaattatttcatgattagaaattacctgtggatatttgtataaaagtgtgaaataaattttttataaaagtgtt

SEQ ID NO: 282498 - DNA, 2600 bp, Homo sapiens
ttctcctctctttgctttgtcccccccactctgatacgattcgagctcgtaccccaacgatgtcctcagctcacttccctattagtgggaaaggggcatgaaataatctttggtttatgccatttaaaaattattcttaatctaatctgataatcagatattttacatatcatattgtgattatttttaaatatggaagcactgttttcataaactcttaaattgttagtaaagaggtagcctacatttgttataaaatgtaaagagaagatgaaaatggacttttcttccagttttacagctgttctcttccgttgatccccactggctcttctttcatttcagcctcttggttctttcttaaaagaaaaccatgtctttttccccttagtccagaggtagacatagctgaacagaaagcttagacattcccatttagtgtatttgcttctttgtgagattaatttgtttctctttctctttccctcttctctagtgtggattctttaaacgctctaggtacgatgacagtgttccccgataccatgctgtaaggatccggaaagaagagcgagagatcaaagatgaaaagtatattgataaccttgaaaaaaaacagtggatcacaaagtggaacgaaaatgaaagctactcatagcgggggcctaaaaaaaaaaagcttcacagtacccaaactgctttttccaactcagaaattcaatttggatttaaaagcctgctcaatccctgaggactgatttcagagtgactacacacagtacgaacctacagttttaactgtggatattgttacgtagcctaaggctcctgttttgcacagccaaatttaaaactgttggaatggatttttctttaactgccgtaatttaactttctgggttgcctttgtttttggcgtggctgacttacatcatgtgttggggaagggcctgcccagttgcactcaggtgacatcctccagatagtgtagctgaggaggcacctacactcacctgcactaacagagtggccgtcctaacctcgggcctgctgcgcagacgtccatcacgttagctgtcccacatcacaagactatgccattggggtagttgtgtttcaacggaaagtgctgtcttaaactaaatgtgcaatagaaggtgatgttgccatcctaccgtcttttcctgtttcctagctgtgtgaatacctgctcacgtcaaatgcatacaagtttcattctccctttcactaaaacacacaggtgcaacagacttgaatgctagttatacttatttgtatatggtatttattttttcttttctttacaaaccattttgttattgactaacaggccaaagagtctccagtttacccttcaggttggtttaatcaatcagaattagagcatgggaggtcatcactttgacctaaattatttactgcaaaaagaaaatctttataaatgtaccagagagagttgttttaataacttatctataaactataacctctccttcatgacagcctccaccccacaacccaaaaggtttaagaaatagaattataactgtaaagatgtttatttcaggcattggatattttttactttagaagcctgcataatgtttctggatttcatactgtaacattcaggaattcttggagaaaatgggtttattcactgaactctagtgcggtttactcactgctgcaaatactgtatattcaggacttgaaagaaatggtgaatgcctatggtggatccaaactgatccagtataagactactgaatctgctaccaaaacagttaatcagtgagtcgatgttctattttttgtttgtttcctcccctatctgtattcccaaaaattactttggggctaatttaacaagaactttaaattgtgttttaattgtaaaaatggcagggggtggaattattactctatacattcaacagagactgaatagatatgaaagctgattttttttaattaccatgcttcacaatgttaagttatatggggagcaacagcaaacaggtgctaatttgttttggatatagtataagcagtgtctgtgttttgaaagaatagaacacagtttgtagtgccactgttgttttgggggggcttttttcttttcggaaatcttaaaccttaagatactaaggacgttgttttggttgtactttggaattcttagtcacaaaatatattttgtttacaaaaatttctgtaaaacaggttataacagtgtttaaagtctcagtttcttgcttggggaacttgtgtccctaatgtgtttagattgctagattgctaaggagctgatactttgacagtgtttttagacctgtgttactaaaaaaaagatgaatgtcctgaaaagggtgttgggagggtggttcaacaaagaaacaaagatgttatggtgtttagatttatggttgttaaaaatgtcatctcaagtcaagtcactggtctgtttgcatttgatacatttttgtactaactagcattgtaaaattatttcatgattagaaattacctgtggatatttgtataaaagtgtgaaataaattttttataaaagtgtt

SEQ ID NO: 282499 - DNA, 1095 bp, Homo sapiens
ggtcgctctagaggatccctcagacagcggacccccaaaaggtttaagaaatagaattataactgtaaagatgtttatttcaggcattggatattttttactttagaagcctgcataatgtttctggatttcatactgtaacattcaggaattcttggagaaaatgggtttattcactgaactctagtgcggtttactcactgctgcaaatactgtatattcaggacttgaaagaaatggtgaatgcctatggtggatccaaactgatccagtataagactactgaatctgctaccaaaacagttaatcagtgagtcgatgttctattttttgtttgtttcctcccctatctgtattcccaaaaattactttggggctaatttaacaagaactttaaattgtgttttaattgtaaaaatggcagggggtggaattattactctatacattcaacagagactgaatagatatgaaagctgattttttttaattaccatgcttcacaatgttaagttatatggggagcaacagcaaacaggtgctaatttgttttggatatagtataagcagtgtctgtgttttgaaagaatagaacacagtttgtagtgccactgttgttttgggggggcttttttcttttcggaaatcttaaaccttaagatactaaggacgttgttttggttgtactttggaattcttagtcacaaaatatattttgtttacaaaaatttctgtaaaacaggttataacagtgtttaaagtctcagtttcttgcttggggaacttgtgtccctaatgtgtttagattgctagattgctaaggagctgatactttgacagtgtttttagacctgtgttactaaaaaaaagatgaatgtcctgaaaagggtgttgggagggtggttcaacaaagaaacaaagatgttatggtgtttagatttatggttgttaaaaatgtcatctcaagtcaagtcactggtctgtttgcatttgatacatttttgtactaactagcattgtaaaattatttcatgattagaaattacctgtggatatttgtataaaagtgtgaaataaattttttataaaagtgtt

SEQ ID NO: 282500 - DNA, 1114 bp, Homo sapiens
cccgggctgcaggaattcggcacaggtggggtggaggctgtcatgaaggagacccaaaaggtttaagaaatagaattataactgtaaagatgtttatttcaggcattggatattttttactttagaagcctgcataatgtttctggatttcatactgtaacattcaggaattcttggagaaaatgggtttattcactgaactctagtgcggtttactcactgctgcaaatactgtatattcaggacttgaaagaaatggtgaatgcctatggtggatccaaactgatccagtataagactactgaatctgctaccaaaacagttaatcagtgagtcgatgttctattttttgtttgtttcctcccctatctgtattcccaaaaattactttggggctaatttaacaagaactttaaattgtgttttaattgtaaaaatggcagggggtggaattattactctatacattcaacagagactgaatagatatgaaagctgattttttttaattaccatgcttcacaatgttaagttatatggggagcaacagcaaacaggtgctaatttgttttggatatagtataagcagtgtctgtgttttgaaagaatagaacacagtttgtagtgccactgttgttttgggggggcttttttcttttcggaaatcttaaaccttaagatactaaggacgttgttttggttgtactttggaattcttagtcacaaaatatattttgtttacaaaaatttctgtaaaacaggttataacagtgtttaaagtctcagtttcttgcttggggaacttgtgtccctaatgtgtttagattgctagattgctaaggagctgatactttgacagtgtttttagacctgtgttactaaaaaaaagatgaatgtcctgaaaagggtgttgggagggtggttcaacaaagaaacaaagatgttatggtgtttagatttatggttgttaaaaatgtcatctcaagtcaagtcactggtctgtttgcatttgatacatttttgtactaactagcattgtaaaattatttcatgattagaaattacctgtggatatttgtataaaagtgtgaaataaattttttataaaagtgtt

SEQ ID NO: 282501 - DNA, 590 bp, Homo sapiens
ctagaggatcccccggaagcacactgcaaacaggtgctaatttgttttggatatagtataagcagtgtctgtgttttgaaagaatagaacacagtttgtagtgccactgttgttttgggggggcttttttcttttcggaaatcttaaaccttaagatactaaggacgttgttttggttgtactttggaattcttagtcacaaaatatattttgtttacaaaaatttctgtaaaacaggttataacagtgtttaaagtctcagtttcttgcttggggaacttgtgtccctaatgtgtttagattgctagattgctaaggagctgatactttgacagtgtttttagacctgtgttactaaaaaaaagatgaatgtcctgaaaagggtgttgggagggtggttcaacaaagaaacaaagatgttatggtgtttagatttatggttgttaaaaatgtcatctcaagtcaagtcactggtctgtttgcatttgatacatttttgtactaactagcattgtaaaattatttcatgattagaaattacctgtggatatttgtataaaagtgtgaaataaattttttataaaagtgtt

SEQ ID NO: 282502 - DNA, 4045 bp, Homo sapiens
gggctcattcagcggtcgcgagctgcccgcgagggggagcggccggacggagagcgcgacccgtcccgggggtggggccgggcgcagcggcgagaggaggcgaaggtggctgcggtagcagcagcgcggcagcctcggacccagcccggagcgcagggcggccgctgcaggtccccgctcccctccccgtgcgtccgcccatggccgccgccgggcagctgtgcttgctctacctgtcggcggggctcctgtcccggctcggcgcagccttcaacttggacactcgggaggacaacgtgatccggaaatatggagaccccgggagcctcttcggcttctcgctggccatgcactggcaactgcagcccgaggacaagcggctgttgctcgtgggggccccgcgggcagaagcgcttccactgcagagagccaacagaacgggagggctgtacagctgcgacatcaccgcccgggggccatgcacgcggatcgagtttgataacgatgctgaccccacgtcagaaagcaaggaagatcagtggatgggggtcaccgtccagagccaaggtccagggggcaaggtcgtgacatgtgctcaccgatatgaaaaaaggcagcatgttaatacgaagcaggaatcccgagacatctttgggcggtgttatgtcctgagtcagaatctcaggattgaagacgatatggatgggggagattggagcttttgtgatgggcgattgagaggccatgagaaatttggctcttgccagcaaggtgtagcagctacttttactaaagactttcattacattgtatttggagccccgggtacttataactggaaagggattgttcgtgtagagcaaaagaataacactttttttgacatgaacatctttgaagatgggccttatgaagttggtggagagactgagcatgatgaaagtctcgttcctgttcctgctaacagttacttaggtttttctttggactcagggaaaggtattgtttctaaagatgagatcacttttgtatctggtgctcccagagccaatcacagtggagccgtggttttgctgaagagagacatgaagtctgcacatctcctccctgagcacatattcgatggagaaggtctggcctcttcatttggctatgatgtggcggtggtggacctcaacaaggatgggtggcaagatatagttattggagccccacagtattttgatagagatggagaagttggaggtgcagtgtatgtctacatgaaccagcaaggcagatggaataatgtgaagccaattcgtcttaatggaaccaaagattctatgtttggcattgcagtaaaaaatattggagatattaatcaagatggctacccagatattgcagttggagctccgtatgatgacttgggaaaggtttttatctatcatggatctgcaaatggaataaataccaaaccaacacaggttctcaagggtatatcaccttattttggatattcaattgctggaaacatggaccttgatcgaaattcctaccctgatgttgctgttggttccctctcagattcagtaactattttcagatcccggcctgtgattaatattcagaaaaccatcacagtaactcctaacagaattgacctccgccagaaaacagcgtgtggggcgcctagtgggatatgcctccaggttaaatcctgttttgaatatactgctaaccccgctggttataatccttcaatatcaattgtgggcacacttgaagctgaaaaagaaagaagaaaatctgggctatcctcaagagttcagtttcgaaaccaaggttctgagcccaaatatactcaagaactaactctgaagaggcagaaacagaaagtgtgcatggaggaaaccctgtggctacaggataatatcagagataaactgcgtcccattcccataactgcctcagtggagatccaagagccaagctctcgtaggcgagtgaattcacttccagaagttcttccaattctgaattcagatgaacccaagacagctcatattgatgttcacttcttaaaagagggatgtggagacgacaatgtatgtaacagcaaccttaaactagaatataaattttgcacccgagaaggaaatcaagacaaattttcttatttaccaattcaaaaaggtgtaccagaactagttctaaaagatcagaaggatattgctttagaaataacagtgacaaacagcccttccaacccaaggaatcccacaaaagatggcgatgacgcccatgaggctaaactgattgcaacgtttccagacactttaacctattctgcatatagagaactgagggctttccctgagaaacagttgagttgtgttgccaaccagaatggctcgcaagctgactgtgagctcggaaatccttttaaaagaaattcaaatgtcactttttatttggttttaagtacaactgaagtcacctttgacaccccagatctggatattaatctgaagttagaaacaacaagcaatcaagataatttggctccaattacagctaaagcaaaagtggttattgaactgcttttatcggtctcgggagttgctaaaccttcccaggtgtattttggaggtacagttgttggcgagcaagctatgaaatctgaagatgaagtgggaagtttaatagagtatgaattcagggtaataaacttaggtaaacctcttacaaacctcggcacagcaaccttgaacattcagtggccaaaagaaattagcaatgggaaatggttgctttatttggtgaaagtagaatccaaaggattggaaaaggtaacttgtgagccacaaaaggagataaactccctgaacctaacggagtctcacaactcaagaaagaaacgggaaattactgaaaaacagatagatgataacagaaaattttctttatttgctgaaagaaaataccagactcttaactgtagcgtgaacgtgaactgtgtgaacatcagatgcccgctgcgggggctggacagcaaggcgtctcttattttgcgctcgaggttatggaacagcacatttctagaggaatattccaaactgaactacttggacattctcatgcgagccttcattgatgtgactgctgctgccgaaaatatcaggctgccaaatgcaggcactcaggttcgagtgactgtgtttccctcaaagactgtagctcagtattcgggagtaccttggtggatcatcctagtggctattctcgctgggatcttgatgcttgctttattagtgtttatactatggaagtgtggtttcttcaagagaaataagaaagatcattatgatgccacatatcacaaggctgagatccatgctcagccatctgataaagagaggcttacttctgatgcatagtattgatctacttctgtaattggtaattgatcaatgttttttaattgctagctgtgggacccgctatggttgtggtggctaactttaagaacaacagcttgctatgtgtgtcccattaacagatgtttccaaatgtccacactggcttgccttgcttggatttgttttattttatttcacttgaaagctcagtttttgttttttttaatgcacagtctttcgttgcaggtgagttattttatgttcttgttaaatatctaccacagcaatgaagaaaatttgcaatatttgtacacacaaaaagagacttttagccctccatagtagcccagtttgcaatgtgttattaattcggtatgtagcattccactagggaattcaaagatgcataagaaatcattctagatttcttgtccattttggaattttccacagatagaagctgtgtcgaccgcctaattaacctgttgcatgttggaaatgttgtgtttctcttggtgaggcttcctcactgtcatctttttgttctctttgctataaagtgatggggaaggcttggaatgctttttactgttgctcaggaatcgttttatgctagctaagcatgcaacttccatttcctg

SEQ ID NO: 282503 - DNA, 2780 bp, Homo sapiens
gggctcattcagcggtcgcgagctgcccgcgagggggagcggccggacggagagcgcgacccgtcccgggggtggggccgggcgcagcggcgagaggaggcgaaggtggctgcggtagcagcagcgcggcagcctcggacccagcccggagcgcagggcggccgctgcaggtccccgctcccctccccgtgcgtccgcccatggccgccgccgggcagctgtgcttgctctacctgtcggcggggctcctgtcccggctcggcgcagccttcaacttggacactcgggaggacaacgtgatccggaaatatggagaccccgggagcctcttcggcttctcgctggccatgcactggcaactgcagcccgaggacaagcggctgttgctcgtgggggccccgcgggcagaagcgcttccactgcagagagccaacagaacgggagggctgtacagctgcgacatcaccgcccgggggccatgcacgcggatcgagtttgataacgatgctgaccccacgtcagaaagcaaggaagatcagtggatgggggtcaccgtccagagccaaggtccagggggcaaggtcgtgacatgtgctcaccgatatgaaaaaaggcagcatgttaatacgaagcaggaatcccgagacatctttgggcggtgttatgtcctgagtcagaatctcaggattgaagacgatatggatgggggagattggagcttttgtgatgggcgattgagaggccatgagaaatttggctcttgccagcaaggtgtagcagctacttttactaaagactttcattacattgtatttggagccccgggtacttataactggaaagggattgttcgtgtagagcaaaagaataacactttttttgacatgaacatctttgaagatgggccttatgaagttggtggagagactgagcatgatgaaagtctcgttcctgttcctgctaacagttacttaggtttttctttggactcagggaaaggtattgtttctaaagatgagatcacttttgtatctggtgctcccagagccaatcacagtggagccgtggttttgctgaagagagacatgaagtctgcacatctcctccctgagcacatattcgatggagaaggtctggcctcttcatttggctatgatgtggcggtggtggacctcaacaaggatgggtggcaagatatagttattggagccccacagtattttgatagagatggagaagttggaggtgcagtgtatgtctacatgaaccagcaaggcagatggaataatgtgaagccaattcgtcttaatggaaccaaagattctatgtttggcattgcagtaaaaaatattggagatattaatcaagatggctacccagatattgcagttggagctccgtatgatgacttgggaaaggtttttatctatcatggatctgcaaatggaataaataccaaaccaacacaggttctcaagggtatatcaccttattttggatattcaattgctggaaacatggaccttgatcgaaattcctaccctgatgttgctgttggttccctctcagattcagtaactattttcagatcccggcctgtgattaatattcagaaaaccatcacagtaactcctaacagaattgacctccgccagaaaacagcgtgtggggcgcctagtgggatatgcctccaggttaaatcctgttttgaatatactgctaaccccgctggttataatccttcaatatcaattgtgggcacacttgaagctgaaaaagaaagaagaaaatctgggctatcctcaagagttcagtttcgaaaccaaggttctgagcccaaatatactcaagaactaactctgaagaggcagaaacagaaagtgtgcatggaggaaaccctgtggctacaggataatatcagagataaactgcgtcccattcccataactgcctcagtggagatccaagagccaagctctcgtaggcgagtgaattcacttccagaagttcttccaattctgaattcagatgaacccaagacagctcatattgatgttcacttcttaaaagagggatgtggagacgacaatgtatgtaacagcaaccttaaactagaatataaattttgcacccgagaaggaaatcaagacaaattttcttatttaccaattcaaaaaggtgtaccagaactagttctaaaagatcagaaggatattgctttagaaataacagtgacaaacagcccttccaacccaaggaatcccacaaaagatggcgatgacgcccatgaggctaaactgattgcaacgtttccagacactttaacctattctgcatatagagaactgagggctttccctgagaaacagttgagttgtgttgccaaccagaatggctcgcaagctgactgtgagctcggaaatccttttaaaagaaattcaaatgtcactttttatttggttttaagtacaactgaagtcacctttgacaccccagatctggatattaatctgaagttagaaacaacaagcaatcaagataatttggctccaattacagctaaagcaaaagtggttattgaactgcttttatcggtctcgggagttgctaaaccttcccaggtgtattttggaggtacagttgttggcgagcaagctatgaaatctgaagatgaagtgggaagtttaatagagtatgaattcaggttaataaacttaggtaaacctcttacaaacctcggctctaccttgtctaattcattaggataacacgttcgcgag

SEQ ID NO: 282504 - DNA, 1812 bp, Homo sapiens
gggctcattcagcggtcgcgagctgcccgcgagggggagcggccggacggagagcgcgacccgtcccgggggtggggccgggcgcagcggcgagaggaggcgaaggtggctgcggtagcagcagcgcggcagcctcggacccagcccggagcgcagggcggccgctgcaggtccccgctcccctccccgtgcgtccgcccatggccgccgccgggcagctgtgcttgctctacctgtcggcggggctcctgtcccggctcggcgcagccttcaacttggacactcgggaggacaacgtgatccggaaatatggagaccccgggagcctcttcggcttctcgctggccatgcactggcaactgcagcccgaggacaagcggctgttgctcgtgggggccccgcgggcagaagcgcttccactgcagagagccaacagaacgggagggctgtacagctgcgacatcaccgcccgggggccatgcacgcggatcgagtttgataacgatgctgaccccacgtcagaaagcaaggaagatcagtggatgggggtcaccgtccagagccaaggtccagggggcaaggtcgtgacatgtgctcaccgatatgaaaaaaggcagcatgttaatacgaagcaggaatcccgagacatctttgggcggtgttatgtcctgagtcagaatctcaggattgaagacgatatggatgggggagattggagcttttgtgatgggcgattgagaggccatgagaaatttggctcttgccagcaaggtgtagcagctacttttactaaagactttcattacattgtatttggagccccgggtacttataactggaaagggattgttcgtgtagagcaaaagaataacactttttttgacatgaacatctttgaagatgggccttatgaagttggtggagagactgagcatgatgaaagtctcgttcctgttcctgctaacagttacttaggtaggagcaggcacagatggctgcctttgcccaccttctcagataccttgtgtgaactccctcgcagggcctatggccctggacttctaggctgagaagaggccaggtgggccgggccacttttgctggaatttgataagcttggtgatctagaggcgttaaaccgactgatgcctggatcctttccttctgactggggctcctcaaagggggaagaaacctcttatcacctaaaatcatccgtcctccctcctgctcagaagtctgtctcttgagctaatggcagcctccgtaacctgaaacaggccgctcatgcagccatgaaaacatgcatgggtgttcacagtaagctgagatctttgttcagtgcctccttccagagatactcttaagaactgcatttaataaagttactcttaagtggcaagtcaagacctccaggtcctccctctgtgattgtggttctccaaggattagccctgcttctggattgggaccccatgtcacagggccccacagatggataaaagcttcccagcggaggttgagcaggactgctaaaacggctttcaggacacccagactgtgtctaagggccaattcttaactcctaaggcttgtttgcatgactaatgggtgtcctaagttattcatgtacattatggtaattacacaaaggcttttaaaagctttaattcttggtatgagttgacaaaaagaataattactgtgcatttcttggaaaaaatgtaaaaaaaagtctaaacccaaatagtaacctgtttaaaatagaacaaagacggtgaagaaaagtacccggatgttaggatattacct

SEQ ID NO: 282505 - DNA, 578 bp, Homo sapiens
gacgagctcggtaccattatgattgctagattgctaaggagctgatactttgacagtgtttttagacctgtgttactaaaaaaaagatgaatgtcctgaaaagggtgttgggagggtggttcaacaaagaaacaaagatgttatggtgtttagatttatggttgttaaaaatgtcatctcaagtcaagtcactggtctgtttgcatttgatacatttttgtactaactagcattgtaaaattatttcatgattagaaattacctgtggatatttgtataaaagtgtgaaataaattttttataaaagtgttcattgtttcgtaacacagcattgtatatgtgaagcaaactctaaaattataaatgacaacctgaattatctatttcatcaaaccaaagttcagtgtttttatttttggtgtctcatgtaatctcagatcagccaaagatactagtgccaaagcaatgggattcggggtttttttctgttttcgctctatgtaggtgatcctcaagtctttcattttccttctttatgattaaaagaaacctacaggtatttaacaacctaaaaaaaa

SEQ ID NO: 282506 - DNA, 687 bp, Homo sapiens
  misc_feature (36)..(36): n is a, c, g, or t
  misc_feature (110)..(110): n is a, c, g, or t
  misc_feature (151)..(151): n is a, c, g, or t
  misc_feature (172)..(172): n is a, c, g, or t
aaaaactatccaagttgtaggtatggttatatgggncaatgaacattctccatacacttggtgaaaatacagttatgaaggcctttgggaagactgaaggtggacagagnacaaaccctttgaaccaaaaatccaccttactggactccangactctgccgaattcggcacnagtgtttgcatttgatacatttttgtactaactagcattgtaaaattatttcatgattagaaattacctgtggatatttgtataaaagtgtgaaataaattttttataaaagtgttcattgtttcgtaacacagcattgtatatgtgaagcaaactctaaaattataaatgacaacctgaattatctatttcatcaaaaaaaaaaaaaaaaaaaaaaaaaaaaaaaaaaaaaaaaaaaaaaaaaaaaaaaaaattaaaaaaaaaaaaaaaaaaaaaaaaaaaaaaacatgccgcccgcttggcccaagccaatttaaaattggacaaagttaatccatgcgcccgaatttggacctaattggccaaattcccctaaaagggggccgttttaaaatcaatggcccgtgttttaaaaacgtcgtaactggaaaaaccttggggtacccaacttaaatccctttgaagaaaatccccttttcccaagttgggaaaccggcccccaaccccgcctttcc

SEQ ID NO: 282507 - DNA, 541 bp, Homo sapiens
tagatgataacagaaaattttctttatttgctgaaagaaaataccagactcttgtaagtatttttcaagagctgtgaatatttgagaggatgaggggaaggatttcttcagaacaatgtcttttgatgaccattcttctttttctctctagaactgtagcgtgaacgtgaactgtgtgaacatcagatgcccgctgcgggggctggacagcaaggcgtctcttattttgcgctcgaggttatggaacagcacatttctagaggtatgaccttggcttgaggctgtcccatggaagtaatttgcctttgcctaggacacttttcacttccctaatgcattcactgtctccaaacaggaatattccaaactgaactacttggacattctcatgcgagccttcattgatgtgactgctgctgccgaaaatatcaggctgccaaatgcaggcactcaggtgagaggttccccagcttcattcaggttcagaacatgtctcttttccctgtaccccacactcatgtcctgaagtcatgtgctttgg

SEQ ID NO: 282508 - DNA, 5548 bp, Homo sapiens
gggctcattcagcggtcgcgagctgcccgcgagggggagcggccggacggagagcgcgacccgtcccgggggtggggccgggcgcagcggcgagaggaggcgaaggtggctgcggtagcagcagcgcggcagcctcggacccagcccggagcgcagggcggccgctgcaggtccccgctcccctccccgtgcgtccgcccatggccgccgccgggcagctgtgcttgctctacctgtcggcggggctcctgtcccggctcggcgcagccttcaacttggacactcgggaggacaacgtgatccggaaatatggagaccccgggagcctcttcggcttctcgctggccatgcactggcaactgcagcccgaggacaagcggctgttgctcgtgggggccccgcgggcagaagcgcttccactgcagagagccaacagaacgggagggctgtacagctgcgacatcaccgcccgggggccatgcacgcggatcgagtttgataacgatgctgaccccacgtcagaaagcaaggaagatcagtggatgggggtcaccgtccagagccaaggtccagggggcaaggtcgtgacatgtgctcaccgatatgaaaaaaggcagcatgttaatacgaagcaggaatcccgagacatctttgggcggtgttatgtcctgagtcagaatctcaggattgaagacgatatggatgggggagattggagcttttgtgatgggcgattgagaggccatgagaaatttggctcttgccagcaaggtgtagcagctacttttactaaagactttcattacattgtatttggagccccgggtacttataactggaaagggattgttcgtgtagagcaaaagaataacactttttttgacatgaacatctttgaagatgggccttatgaagttggtggagagactgagcatgatgaaagtctcgttcctgttcctgctaacagttacttaggtttttctttggactcagggaaaggtattgtttctaaagatgagatcacttttgtatctggtgctcccagagccaatcacagtggagccgtggttttgctgaagagagacatgaagtctgcacatctcctccctgagcacatattcgatggagaaggtctggcctcttcatttggctatgatgtggcggtggtggacctcaacaaggatgggtggcaagatatagttattggagccccacagtattttgatagagatggagaagttggaggtgcagtgtatgtctacatgaaccagcaaggcagatggaataatgtgaagccaattcgtcttaatggaaccaaagattctatgtttggcattgcagtaaaaaatattggagatattaatcaagatggctacccagatattgcagttggagctccgtatgatgacttgggaaaggtttttatctatcatggatctgcaaatggaataaataccaaaccaacacaggttctcaagggtatatcaccttattttggatattcaattgctggaaacatggaccttgatcgaaattcctaccctgatgttgctgttggttccctctcagattcagtaactattttcagatcccggcctgtgattaatattcagaaaaccatcacagtaactcctaacagaattgacctccgccagaaaacagcgtgtggggcgcctagtgggatatgcctccaggttaaatcctgttttgaatatactgctaaccccgctggttataatccttcaatatcaattgtgggcacacttgaagctgaaaaagaaagaagaaaatctgggctatcctcaagagttcagtttcgaaaccaaggttctgagcccaaatatactcaagaactaactctgaagaggcagaaacagaaagtgtgcatggaggaaaccctgtggctacaggataatatcagagataaactgcgtcccattcccataactgcctcagtggagatccaagagccaagctctcgtaggcgagtgaattcacttccagaagttcttccaattctgaattcagatgaacccaagacagctcatattgatgttcacttcttaaaagagggatgtggagacgacaatgtatgtaacagcaaccttaaactagaatataaattttgcacccgagaaggaaatcaagacaaattttcttatttaccaattcaaaaaggtgtaccagaactagttctaaaagatcagaaggatattgctttagaaataacagtgacaaacagcccttccaacccaaggaatcccacaaaagatggcgatgacgcccatgaggctaaactgattgcaacgtttccagacactttaacctattctgcatatagagaactgagggctttccctgagaaacagttgagttgtgttgccaaccagaatggctcgcaagctgactgtgagctcggaaatccttttaaaagaaattcaaatgtcactttttatttggttttaagtacaactgaagtcacctttgacaccccagatctggatattaatctgaagttagaaacaacaagcaatcaagataatttggctccaattacagctaaagcaaaagtggttattgaactgcttttatcggtctcgggagttgctaaaccttcccaggtgtattttggaggtacagttgttggcgagcaagctatgaaatctgaagatgaagtgggaagtttaatagagtatgaattcagggtaataaacttaggtaaacctcttacaaacctcggcacagcaaccttgaacattcagtggccaaaagaaattagcaatgggaaatggttgctttatttggtgaaagtagaatccaaaggattggaaaaggtaacttgtgagccacaaaaggagataaactccctgaacctaacggagtctcacaactcaagaaagaaacgggaaattactgaaaaacagatagatgataacagaaaattttctttatttgctgaaagaaaataccagactcttaactgtagcgtgaacgtgaactgtgtgaacatcagatgcccgctgcgggggctggacagcaaggcgtctcttattttgcgctcgaggttatggaacagcacatttctagaggaatattccaaactgaactacttggacattctcatgcgagccttcattgatgtgactgctgctgccgaaaatatcaggctgccaaatgcaggcactcaggttcgagtgactgtgtttccctcaaagactgtagctcagtattcgggagtaccttggtggatcatcctagtggctattctcgctgggatcttgatgcttgctttattagtgtttatactatggaagtgtggtttcttcaagagaaataagaaagatcattatgatgccacatatcacaaggctgagatccatgctcagccatctgataaagagaggcttacttctgatgcatagtattgatctacttctgtaattgtgtggattctttaaacgctctaggtacgatgacagtgttccccgataccatgctgtaaggatccggaaagaagagcgagagatcaaagatgaaaagtatattgataaccttgaaaaaaaacagtggatcacaaagtggaacgaaaatgaaagctactcatagcgggggcctaaaaaaaaaaagcttcacagtacccaaactgctttttccaactcagaaattcaatttggatttaaaagcctgctcaatccctgaggactgatttcagagtgactacacacagtacgaacctacagttttaactgtggatattgttacgtagcctaaggctcctgttttgcacagccaaatttaaaactgttggaatggatttttctttaactgccgtaatttaactttctgggttgcctttgtttttggcgtggctgacttacatcatgtgttggggaagggcctgcccagttgcactcaggtgacatcctccagatagtgtagctgaggaggcacctacactcacctgcactaacagagtggccgtcctaacctcgggcctgctgcgcagacgtccatcacgttagctgtcccacatcacaagactatgccattggggtagttgtgtttcaacggaaagtgctgtcttaaactaaatgtgcaatagaaggtgatgttgccatcctaccgtcttttcctgtttcctagctgtgtgaatacctgctcacgtcaaatgcatacaagtttcattctccctttcactaaaacacacaggtgcaacagacttgaatgctagttatacttatttgtatatggtatttattttttcttttctttacaaaccattttgttattgactaacaggccaaagagtctccagtttacccttcaggttggtttaatcaatcagaattagagcatgggaggtcatcactttgacctaaattatttactgcaaaaagaaaatctttataaatgtaccagagagagttgttttaataacttatctataaactataacctctccttcatgacagcctccaccccacaacccaaaaggtttaagaaatagaattataactgtaaagatgtttatttcaggcattggatattttttactttagaagcctgcataatgtttctggatttcatactgtaacattcaggaattcttggagaaaatgggtttattcactgaactctagtgcggtttactcactgctgcaaatactgtatattcaggacttgaaagaaatggtgaatgcctatggtggatccaaactgatccagtataagactactgaatctgctaccaaaacagttaatcagtgagtcgatgttctattttttgtttgtttcctcccctatctgtattcccaaaaattactttggggctaatttaacaagaactttaaattgtgttttaattgtaaaaatggcagggggtggaattattactctatacattcaacagagactgaatagatatgaaagctgattttttttaattaccatgcttcacaatgttaagttatatggggagcaacagcaaacaggtgctaatttgttttggatatagtataagcagtgtctgtgttttgaaagaatagaacacagtttgtagtgccactgttgttttgggggggcttttttcttttcggaaatcttaaaccttaagatactaaggacgttgttttggttgtactttggaattcttagtcacaaaatatattttgtttacaaaaatttctgtaaaacaggttataacagtgtttaaagtctcagtttcttgcttggggaacttgtgtccctaatgtgtttagattgctagattgctaaggagctgatactttgacagtgtttttagacctgtgttactaaaaaaaagatgaatgtcctgaaaagggtgttgggagggtggttcaacaaagaaacaaagatgttatggtgtttagatttatggttgttaaaaatgtcatctcaagtcaagtcactggtctgtttgcatttgatacatttttgtactaactagcattgtaaaattatttcatgattagaaattacctgtggatatttgtataaaagtgtgaaataaattttttataaaagtgtt

SEQ ID NO: 282509 - DNA, 5418 bp, Homo sapiens
gggctcattcagcggtcgcgagctgcccgcgagggggagcggccggacggagagcgcgacccgtcccgggggtggggccgggcgcagcggcgagaggaggcgaaggtggctgcggtagcagcagcgcggcagcctcggacccagcccggagcgcagggcggccgctgcaggtccccgctcccctccccgtgcgtccgcccatggccgccgccgggcagctgtgcttgctctacctgtcggcggggctcctgtcccggctcggcgcagccttcaacttggacactcgggaggacaacgtgatccggaaatatggagaccccgggagcctcttcggcttctcgctggccatgcactggcaactgcagcccgaggacaagcggctgttgctcgtgggggccccgcgggcagaagcgcttccactgcagagagccaacagaacgggagggctgtacagctgcgacatcaccgcccgggggccatgcacgcggatcgagtttgataacgatgctgaccccacgtcagaaagcaaggaagatcagtggatgggggtcaccgtccagagccaaggtccagggggcaaggtcgtgacatgtgctcaccgatatgaaaaaaggcagcatgttaatacgaagcaggaatcccgagacatctttgggcggtgttatgtcctgagtcagaatctcaggattgaagacgatatggatgggggagattggagcttttgtgatgggcgattgagaggccatgagaaatttggctcttgccagcaaggtgtagcagctacttttactaaagactttcattacattgtatttggagccccgggtacttataactggaaagggattgttcgtgtagagcaaaagaataacactttttttgacatgaacatctttgaagatgggccttatgaagttggtggagagactgagcatgatgaaagtctcgttcctgttcctgctaacagttacttaggtttttctttggactcagggaaaggtattgtttctaaagatgagatcacttttgtatctggtgctcccagagccaatcacagtggagccgtggttttgctgaagagagacatgaagtctgcacatctcctccctgagcacatattcgatggagaaggtctggcctcttcatttggctatgatgtggcggtggtggacctcaacaaggatgggtggcaagatatagttattggagccccacagtattttgatagagatggagaagttggaggtgcagtgtatgtctacatgaaccagcaaggcagatggaataatgtgaagccaattcgtcttaatggaaccaaagattctatgtttggcattgcagtaaaaaatattggagatattaatcaagatggctacccagatattgcagttggagctccgtatgatgacttgggaaaggtttttatctatcatggatctgcaaatggaataaataccaaaccaacacaggttctcaagggtatatcaccttattttggatattcaattgctggaaacatggaccttgatcgaaattcctaccctgatgttgctgttggttccctctcagattcagtaactattttcagatcccggcctgtgattaatattcagaaaaccatcacagtaactcctaacagaattgacctccgccagaaaacagcgtgtggggcgcctagtgggatatgcctccaggttaaatcctgttttgaatatactgctaaccccgctggttataatccttcaatatcaattgtgggcacacttgaagctgaaaaagaaagaagaaaatctgggctatcctcaagagttcagtttcgaaaccaaggttctgagcccaaatatactcaagaactaactctgaagaggcagaaacagaaagtgtgcatggaggaaaccctgtggctacaggataatatcagagataaactgcgtcccattcccataactgcctcagtggagatccaagagccaagctctcgtaggcgagtgaattcacttccagaagttcttccaattctgaattcagatgaacccaagacagctcatattgatgttcacttcttaaaagagggatgtggagacgacaatgtatgtaacagcaaccttaaactagaatataaattttgcacccgagaaggaaatcaagacaaattttcttatttaccaattcaaaaaggtgtaccagaactagttctaaaagatcagaaggatattgctttagaaataacagtgacaaacagcccttccaacccaaggaatcccacaaaagatggcgatgacgcccatgaggctaaactgattgcaacgtttccagacactttaacctattctgcatatagagaactgagggctttccctgagaaacagttgagttgtgttgccaaccagaatggctcgcaagctgactgtgagctcggaaatccttttaaaagaaattcaaatgtcactttttatttggttttaagtacaactgaagtcacctttgacaccccagatctggatattaatctgaagttagaaacaacaagcaatcaagataatttggctccaattacagctaaagcaaaagtggttattgaactgcttttatcggtctcgggagttgctaaaccttcccaggtgtattttggaggtacagttgttggcgagcaagctatgaaatctgaagatgaagtgggaagtttaatagagtatgaattcagggtaataaacttaggtaaacctcttacaaacctcggcacagcaaccttgaacattcagtggccaaaagaaattagcaatgggaaatggttgctttatttggtgaaagtagaatccaaaggattggaaaaggtaacttgtgagccacaaaaggagataaactccctgaacctaacggagtctcacaactcaagaaagaaacgggaaattactgaaaaacagatagatgataacagaaaattttctttatttgctgaaagaaaataccagactcttaactgtagcgtgaacgtgaactgtgtgaacatcagatgcccgctgcgggggctggacagcaaggcgtctcttattttgcgctcgaggttatggaacagcacatttctagaggaatattccaaactgaactacttggacattctcatgcgagccttcattgatgtgactgctgctgccgaaaatatcaggctgccaaatgcaggcactcaggttcgagtgactgtgtttccctcaaagactgtagctcagtattcgggagtaccttggtggatcatcctagtggctattctcgctgggatcttgatgcttgctttattagtgtttatactatggaagtgtggattctttaaacgctctaggtacgatgacagtgttccccgataccatgctgtaaggatccggaaagaagagcgagagatcaaagatgaaaagtatattgataaccttgaaaaaaaacagtggatcacaaagtggaacgaaaatgaaagctactcatagcgggggcctaaaaaaaaaaagcttcacagtacccaaactgctttttccaactcagaaattcaatttggatttaaaagcctgctcaatccctgaggactgatttcagagtgactacacacagtacgaacctacagttttaactgtggatattgttacgtagcctaaggctcctgttttgcacagccaaatttaaaactgttggaatggatttttctttaactgccgtaatttaactttctgggttgcctttgtttttggcgtggctgacttacatcatgtgttggggaagggcctgcccagttgcactcaggtgacatcctccagatagtgtagctgaggaggcacctacactcacctgcactaacagagtggccgtcctaacctcgggcctgctgcgcagacgtccatcacgttagctgtcccacatcacaagactatgccattggggtagttgtgtttcaacggaaagtgctgtcttaaactaaatgtgcaatagaaggtgatgttgccatcctaccgtcttttcctgtttcctagctgtgtgaatacctgctcacgtcaaatgcatacaagtttcattctccctttcactaaaacacacaggtgcaacagacttgaatgctagttatacttatttgtatatggtatttattttttcttttctttacaaaccattttgttattgactaacaggccaaagagtctccagtttacccttcaggttggtttaatcaatcagaattagagcatgggaggtcatcactttgacctaaattatttactgcaaaaagaaaatctttataaatgtaccagagagagttgttttaataacttatctataaactataacctctccttcatgacagcctccaccccacaacccaaaaggtttaagaaatagaattataactgtaaagatgtttatttcaggcattggatattttttactttagaagcctgcataatgtttctggatttcatactgtaacattcaggaattcttggagaaaatgggtttattcactgaactctagtgcggtttactcactgctgcaaatactgtatattcaggacttgaaagaaatggtgaatgcctatggtggatccaaactgatccagtataagactactgaatctgctaccaaaacagttaatcagtgagtcgatgttctattttttgtttgtttcctcccctatctgtattcccaaaaattactttggggctaatttaacaagaactttaaattgtgttttaattgtaaaaatggcagggggtggaattattactctatacattcaacagagactgaatagatatgaaagctgattttttttaattaccatgcttcacaatgttaagttatatggggagcaacagcaaacaggtgctaatttgttttggatatagtataagcagtgtctgtgttttgaaagaatagaacacagtttgtagtgccactgttgttttgggggggcttttttcttttcggaaatcttaaaccttaagatactaaggacgttgttttggttgtactttggaattcttagtcacaaaatatattttgtttacaaaaatttctgtaaaacaggttataacagtgtttaaagtctcagtttcttgcttggggaacttgtgtccctaatgtgtttagattgctagattgctaaggagctgatactttgacagtgtttttagacctgtgttactaaaaaaaagatgaatgtcctgaaaagggtgttgggagggtggttcaacaaagaaacaaagatgttatggtgtttagatttatggttgttaaaaatgtcatctcaagtcaagtcactggtctgtttgcatttgatacatttttgtactaactagcattgtaaaattatttcatgattagaaattacctgtggatatttgtataaaagtgtgaaataaattttttataaaagtgtt

SEQ ID NO: 282510 - DNA, 5815 bp, Homo sapiens
gggctcattcagcggtcgcgagctgcccgcgagggggagcggccggacggagagcgcgacccgtcccgggggtggggccgggcgcagcggcgagaggaggcgaaggtggctgcggtagcagcagcgcggcagcctcggacccagcccggagcgcagggcggccgctgcaggtccccgctcccctccccgtgcgtccgcccatggccgccgccgggcagctgtgcttgctctacctgtcggcggggctcctgtcccggctcggcgcagccttcaacttggacactcgggaggacaacgtgatccggaaatatggagaccccgggagcctcttcggcttctcgctggccatgcactggcaactgcagcccgaggacaagcggctgttgctcgtgggggccccgcgggcagaagcgcttccactgcagagagccaacagaacgggagggctgtacagctgcgacatcaccgcccgggggccatgcacgcggatcgagtttgataacgatgctgaccccacgtcagaaagcaaggaagatcagtggatgggggtcaccgtccagagccaaggtccagggggcaaggtcgtgacatgtgctcaccgatatgaaaaaaggcagcatgttaatacgaagcaggaatcccgagacatctttgggcggtgttatgtcctgagtcagaatctcaggattgaagacgatatggatgggggagattggagcttttgtgatgggcgattgagaggccatgagaaatttggctcttgccagcaaggtgtagcagctacttttactaaagactttcattacattgtatttggagccccgggtacttataactggaaagggattgttcgtgtagagcaaaagaataacactttttttgacatgaacatctttgaagatgggccttatgaagttggtggagagactgagcatgatgaaagtctcgttcctgttcctgctaacagttacttaggtttttctttggactcagggaaaggtattgtttctaaagatgagatcacttttgtatctggtgctcccagagccaatcacagtggagccgtggttttgctgaagagagacatgaagtctgcacatctcctccctgagcacatattcgatggagaaggtctggcctcttcatttggctatgatgtggcggtggtggacctcaacaaggatgggtggcaagatatagttattggagccccacagtattttgatagagatggagaagttggaggtgcagtgtatgtctacatgaaccagcaaggcagatggaataatgtgaagccaattcgtcttaatggaaccaaagattctatgtttggcattgcagtaaaaaatattggagatattaatcaagatggctacccagatattgcagttggagctccgtatgatgacttgggaaaggtttttatctatcatggatctgcaaatggaataaataccaaaccaacacaggttctcaagggtatatcaccttattttggatattcaattgctggaaacatggaccttgatcgaaattcctaccctgatgttgctgttggttccctctcagattcagtaactattttcagatcccggcctgtgattaatattcagaaaaccatcacagtaactcctaacagaattgacctccgccagaaaacagcgtgtggggcgcctagtgggatatgcctccaggttaaatcctgttttgaatatactgctaaccccgctggttataatccttcaatatcaattgtgggcacacttgaagctgaaaaagaaagaagaaaatctgggctatcctcaagagttcagtttcgaaaccaaggttctgagcccaaatatactcaagaactaactctgaagaggcagaaacagaaagtgtgcatggaggaaaccctgtggctacaggataatatcagagataaactgcgtcccattcccataactgcctcagtggagatccaagagccaagctctcgtaggcgagtgaattcacttccagaagttcttccaattctgaattcagatgaacccaagacagctcatattgatgttcacttcttaaaagagggatgtggagacgacaatgtatgtaacagcaaccttaaactagaatataaattttgcacccgagaaggaaatcaagacaaattttcttatttaccaattcaaaaaggtgtaccagaactagttctaaaagatcagaaggatattgctttagaaataacagtgacaaacagcccttccaacccaaggaatcccacaaaagatggcgatgacgcccatgaggctaaactgattgcaacgtttccagacactttaacctattctgcatatagagaactgagggctttccctgagaaacagttgagttgtgttgccaaccagaatggctcgcaagctgactgtgagctcggaaatccttttaaaagaaattcaaatgtcactttttatttggttttaagtacaactgaagtcacctttgacaccccagatctggatattaatctgaagttagaaacaacaagcaatcaagataatttggctccaattacagctaaagcaaaagtggttattgaactgcttttatcggtctcgggagttgctaaaccttcccaggtgtattttggaggtacagttgttggcgagcaagctatgaaatctgaagatgaagtgggaagtttaatagagtatgaattcagggtaataaacttaggtaaacctcttacaaacctcggcacagcaaccttgaacattcagtggccaaaagaaattagcaatgggaaatggttgctttatttggtgaaagtagaatccaaaggattggaaaaggtaacttgtgagccacaaaaggagataaactccctgaacctaacggagtctcacaactcaagaaagaaacgggaaattactgaaaaacagatagatgataacagaaaattttctttatttgctgaaagaaaataccagactcttaactgtagcgtgaacgtgaactgtgtgaacatcagatgcccgctgcgggggctggacagcaaggcgtctcttattttgcgctcgaggttatggaacagcacatttctagaggaatattccaaactgaactacttggacattctcatgcgagccttcattgatgtgactgctgctgccgaaaatatcaggctgccaaatgcaggcactcaggttcgagtgactgtgtttccctcaaagactgtagctcagtattcgggagtaccttggtggatcatcctagtggctattctcgctgggatcttgatgcttgctttattagtgtttatactatggaagtgtggtttcttcaagagaaataagaaagatcattatgatgccacatatcacaaggctgagatccatgctcagccatctgataaagagaggcttacttctgatgcatagtattgatctacttctgtaattgtgtggattctttaaacgctctaggtacgatgacagtgttccccgataccatgctgtaaggatccggaaagaagagcgagagatcaaagatgaaaagtatattgataaccttgaaaaaaaacagtggatcacaaagtggaacgaaaatgaaagctactcatagcgggggcctaaaaaaaaaaagcttcacagtacccaaactgctttttccaactcagaaattcaatttggatttaaaagcctgctcaatccctgaggactgatttcagagtgactacacacagtacgaacctacagttttaactgtggatattgttacgtagcctaaggctcctgttttgcacagccaaatttaaaactgttggaatggatttttctttaactgccgtaatttaactttctgggttgcctttgtttttggcgtggctgacttacatcatgtgttggggaagggcctgcccagttgcactcaggtgacatcctccagatagtgtagctgaggaggcacctacactcacctgcactaacagagtggccgtcctaacctcgggcctgctgcgcagacgtccatcacgttagctgtcccacatcacaagactatgccattggggtagttgtgtttcaacggaaagtgctgtcttaaactaaatgtgcaatagaaggtgatgttgccatcctaccgtcttttcctgtttcctagctgtgtgaatacctgctcacgtcaaatgcatacaagtttcattctccctttcactaaaacacacaggtgcaacagacttgaatgctagttatacttatttgtatatggtatttattttttcttttctttacaaaccattttgttattgactaacaggccaaagagtctccagtttacccttcaggttggtttaatcaatcagaattagagcatgggaggtcatcactttgacctaaattatttactgcaaaaagaaaatctttataaatgtaccagagagagttgttttaataacttatctataaactataacctctccttcatgacagcctccaccccacaacccaaaaggtttaagaaatagaattataactgtaaagatgtttatttcaggcattggatattttttactttagaagcctgcataatgtttctggatttcatactgtaacattcaggaattcttggagaaaatgggtttattcactgaactctagtgcggtttactcactgctgcaaatactgtatattcaggacttgaaagaaatggtgaatgcctatggtggatccaaactgatccagtataagactactgaatctgctaccaaaacagttaatcagtgagtcgatgttctattttttgtttgtttcctcccctatctgtattcccaaaaattactttggggctaatttaacaagaactttaaattgtgttttaattgtaaaaatggcagggggtggaattattactctatacattcaacagagactgaatagatatgaaagctgattttttttaattaccatgcttcacaatgttaagttatatggggagcaacagcaaacaggtgctaatttgttttggatatagtataagcagtgtctgtgttttgaaagaatagaacacagtttgtagtgccactgttgttttgggggggcttttttcttttcggaaatcttaaaccttaagatactaaggacgttgttttggttgtactttggaattcttagtcacaaaatatattttgtttacaaaaatttctgtaaaacaggttataacagtgtttaaagtctcagtttcttgcttggggaacttgtgtccctaatgtgtttagattgctagattgctaaggagctgatactttgacagtgtttttagacctgtgttactaaaaaaaagatgaatgtcctgaaaagggtgttgggagggtggttcaacaaagaaacaaagatgttatggtgtttagatttatggttgttaaaaatgtcatctcaagtcaagtcactggtctgtttgcatttgatacatttttgtactaactagcattgtaaaattatttcatgattagaaattacctgtggatatttgtataaaagtgtgaaataaattttttataaaagtgttcattgtttcgtaacacagcattgtatatgtgaagcaaactctaaaattataaatgacaacctgaattatctatttcatcaaaccaaagttcagtgtttttatttttggtgtctcatgtaatctcagatcagccaaagatactagtgccaaagcaatgggattcggggtttttttctgttttcgctctatgtaggtgatcctcaagtctttcattttccttctttatgattaaaagaaacctacaggtatttaacaacctaaaaaaaa

SEQ ID NO: 282511 - DNA, 3564 bp, Homo sapiens
aattggaagtggagttgtcttggttcttccaattctgaattcagatgaacccaagacagctcatattgatgttcacttcttaaaagagggatgtggagacgacaatgtatgtaacagcaaccttaaactagaatataaattttgcacccgagaaggaaatcaagacaaattttcttatttaccaattcaaaaaggtgtaccagaactagttctaaaagatcagaaggatattgctttagaaataacagtgacaaacagcccttccaacccaaggaatcccacaaaagatggcgatgacgcccatgaggctaaactgattgcaacgtttccagacactttaacctattctgcatatagagaactgagggctttccctgagaaacagttgagttgtgttgccaaccagaatggctcgcaagctgactgtgagctcggaaatccttttaaaagaaattcaaatgtcactttttatttggttttaagtacaactgaagtcacctttgacaccccagatctggatattaatctgaagttagaaacaacaagcaatcaagataatttggctccaattacagctaaagcaaaagtggttattgaactgcttttatcggtctcgggagttgctaaaccttcccaggtgtattttggaggtacagttgttggcgagcaagctatgaaatctgaagatgaagtgggaagtttaatagagtatgaattcagggtaataaacttaggtaaacctcttacaaacctcggcacagcaaccttgaacattcagtggccaaaagaaattagcaatgggaaatggttgctttatttggtgaaagtagaatccaaaggattggaaaaggtaacttgtgagccacaaaaggagataaactccctgaacctaacggagtctcacaactcaagaaagaaacgggaaattactgaaaaacagatagatgataacagaaaattttctttatttgctgaaagaaaataccagactcttaactgtagcgtgaacgtgaactgtgtgaacatcagatgcccgctgcgggggctggacagcaaggcgtctcttattttgcgctcgaggttatggaacagcacatttctagaggaatattccaaactgaactacttggacattctcatgcgagccttcattgatgtgactgctgctgccgaaaatatcaggctgccaaatgcaggcactcaggttcgagtgactgtgtttccctcaaagactgtagctcagtattcgggagtaccttggtggatcatcctagtggctattctcgctgggatcttgatgcttgctttattagtgtttatactatggaagtgtggtttcttcaagagaaataagaaagatcattatgatgccacatatcacaaggctgagatccatgctcagccatctgataaagagaggcttacttctgatgcatagtattgatctacttctgtaattgtgtggattctttaaacgctctaggtacgatgacagtgttccccgataccatgctgtaaggatccggaaagaagagcgagagatcaaagatgaaaagtatattgataaccttgaaaaaaaacagtggatcacaaagtggaacgaaaatgaaagctactcatagcgggggcctaaaaaaaaaaagcttcacagtacccaaactgctttttccaactcagaaattcaatttggatttaaaagcctgctcaatccctgaggactgatttcagagtgactacacacagtacgaacctacagttttaactgtggatattgttacgtagcctaaggctcctgttttgcacagccaaatttaaaactgttggaatggatttttctttaactgccgtaatttaactttctgggttgcctttgtttttggcgtggctgacttacatcatgtgttggggaagggcctgcccagttgcactcaggtgacatcctccagatagtgtagctgaggaggcacctacactcacctgcactaacagagtggccgtcctaacctcgggcctgctgcgcagacgtccatcacgttagctgtcccacatcacaagactatgccattggggtagttgtgtttcaacggaaagtgctgtcttaaactaaatgtgcaatagaaggtgatgttgccatcctaccgtcttttcctgtttcctagctgtgtgaatacctgctcacgtcaaatgcatacaagtttcattctccctttcactaaaacacacaggtgcaacagacttgaatgctagttatacttatttgtatatggtatttattttttcttttctttacaaaccattttgttattgactaacaggccaaagagtctccagtttacccttcaggttggtttaatcaatcagaattagagcatgggaggtcatcactttgacctaaattatttactgcaaaaagaaaatctttataaatgtaccagagagagttgttttaataacttatctataaactataacctctccttcatgacagcctccaccccacaacccaaaaggtttaagaaatagaattataactgtaaagatgtttatttcaggcattggatattttttactttagaagcctgcataatgtttctggatttcatactgtaacattcaggaattcttggagaaaatgggtttattcactgaactctagtgcggtttactcactgctgcaaatactgtatattcaggacttgaaagaaatggtgaatgcctatggtggatccaaactgatccagtataagactactgaatctgctaccaaaacagttaatcagtgagtcgatgttctattttttgtttgtttcctcccctatctgtattcccaaaaattactttggggctaatttaacaagaactttaaattgtgttttaattgtaaaaatggcagggggtggaattattactctatacattcaacagagactgaatagatatgaaagctgattttttttaattaccatgcttcacaatgttaagttatatggggagcaacagcaaacaggtgctaatttgttttggatatagtataagcagtgtctgtgttttgaaagaatagaacacagtttgtagtgccactgttgttttgggggggcttttttcttttcggaaatcttaaaccttaagatactaaggacgttgttttggttgtactttggaattcttagtcacaaaatatattttgtttacaaaaatttctgtaaaacaggttataacagtgtttaaagtctcagtttcttgcttggggaacttgtgtccctaatgtgtttagattgctagattgctaaggagctgatactttgacagtgtttttagacctgtgttactaaaaaaaagatgaatgtcctgaaaagggtgttgggagggtggttcaacaaagaaacaaagatgttatggtgtttagatttatggttgttaaaaatgtcatctcaagtcaagtcactggtctgtttgcatttgatacatttttgtactaactagcattgtaaaattatttcatgattagaaattacctgtggatatttgtataaaagtgtgaaataaattttttataaaagtgtt

SEQ ID NO: 282512 - DNA, 2540 bp, Homo sapiens
tgagcggttctctgacttggaaaaacctgcggtagcgtatctatttagcgctcgagattatggaacagcacatttctagaggaatattccaaactgaactacttggacattctcatgcgagccttcattgatgtgactgctgctgccgaaaatatcaggctgccaaatgcaggcactcaggttcgagtgactgtgtttccctcaaagactgtagctcagtattcgggagtaccttggtggatcatcctagtggctattctcgctgggatcttgatgcttgctttattagtgtttatactatggaagtgtggtttcttcaagagaaataagaaagatcattatgatgccacatatcacaaggctgagatccatgctcagccatctgataaagagaggcttacttctgatgcatagtattgatctacttctgtaattgtgtggattctttaaacgctctaggtacgatgacagtgttccccgataccatgctgtaaggatccggaaagaagagcgagagatcaaagatgaaaagtatattgataaccttgaaaaaaaacagtggatcacaaagtggaacgaaaatgaaagctactcatagcgggggcctaaaaaaaaaaagcttcacagtacccaaactgctttttccaactcagaaattcaatttggatttaaaagcctgctcaatccctgaggactgatttcagagtgactacacacagtacgaacctacagttttaactgtggatattgttacgtagcctaaggctcctgttttgcacagccaaatttaaaactgttggaatggatttttctttaactgccgtaatttaactttctgggttgcctttgtttttggcgtggctgacttacatcatgtgttggggaagggcctgcccagttgcactcaggtgacatcctccagatagtgtagctgaggaggcacctacactcacctgcactaacagagtggccgtcctaacctcgggcctgctgcgcagacgtccatcacgttagctgtcccacatcacaagactatgccattggggtagttgtgtttcaacggaaagtgctgtcttaaactaaatgtgcaatagaaggtgatgttgccatcctaccgtcttttcctgtttcctagctgtgtgaatacctgctcacgtcaaatgcatacaagtttcattctccctttcactaaaacacacaggtgcaacagacttgaatgctagttatacttatttgtatatggtatttattttttcttttctttacaaaccattttgttattgactaacaggccaaagagtctccagtttacccttcaggttggtttaatcaatcagaattagagcatgggaggtcatcactttgacctaaattatttactgcaaaaagaaaatctttataaatgtaccagagagagttgttttaataacttatctataaactataacctctccttcatgacagcctccaccccacaacccaaaaggtttaagaaatagaattataactgtaaagatgtttatttcaggcattggatattttttactttagaagcctgcataatgtttctggatttcatactgtaacattcaggaattcttggagaaaatgggtttattcactgaactctagtgcggtttactcactgctgcaaatactgtatattcaggacttgaaagaaatggtgaatgcctatggtggatccaaactgatccagtataagactactgaatctgctaccaaaacagttaatcagtgagtcgatgttctattttttgtttgtttcctcccctatctgtattcccaaaaattactttggggctaatttaacaagaactttaaattgtgttttaattgtaaaaatggcagggggtggaattattactctatacattcaacagagactgaatagatatgaaagctgattttttttaattaccatgcttcacaatgttaagttatatggggagcaacagcaaacaggtgctaatttgttttggatatagtataagcagtgtctgtgttttgaaagaatagaacacagtttgtagtgccactgttgttttgggggggcttttttcttttcggaaatcttaaaccttaagatactaaggacgttgttttggttgtactttggaattcttagtcacaaaatatattttgtttacaaaaatttctgtaaaacaggttataacagtgtttaaagtctcagtttcttgcttggggaacttgtgtccctaatgtgtttagattgctagattgctaaggagctgatactttgacagtgtttttagacctgtgttactaaaaaaaagatgaatgtcctgaaaagggtgttgggagggtggttcaacaaagaaacaaagatgttatggtgtttagatttatggttgttaaaaatgtcatctcaagtcaagtcactggtctgtttgcatttgatacatttttgtactaactagcattgtaaaattatttcatgattagaaattacctgtggatatttgtataaaagtgtgaaataaattttttataaaagtgtt

SEQ ID NO: 282513 - DNA, 3393 bp, Homo sapiens
gggctcattcagcggtcgcgagctgcccgcgagggggagcggccggacggagagcgcgacccgtcccgggggtggggccgggcgcagcggcgagaggaggcgaaggtggctgcggtagcagcagcgcggcagcctcggacccagcccggagcgcagggcggccgctgcaggtccccgctcccctccccgtgcgtccgcccatggccgccgccgggcagctgtgcttgctctacctgtcggcggggctcctgtcccggctcggcgcagccttcaacttggacactcgggaggacaacgtgatccggaaatatggagaccccgggagcctcttcggcttctcgctggccatgcactggcaactgcagcccgaggacaagcggctgttgctcgtgggggccccgcgggcagaagcgcttccactgcagagagccaacagaacgggagggctgtacagctgcgacatcaccgcccgggggccatgcacgcggatcgagtttgataacgatgctgaccccacgtcagaaagcaaggaagatcagtggatgggggtcaccgtccagagccaaggtccagggggcaaggtcgtgacatgtgctcaccgatatgaaaaaaggcagcatgttaatacgaagcaggaatcccgagacatctttgggcggtgttatgtcctgagtcagaatctcaggattgaagacgatatggatgggggagattggagcttttgtgatgggcgattgagaggccatgagaaatttggctcttgccagcaaggtgtagcagctacttttactaaagactttcattacattgtatttggagccccgggtacttataactggaaagggattgttcgtgtagagcaaaagaataacactttttttgacatgaacatctttgaagatgggccttatgaagttggtggagagactgagcatgatgaaagtctcgttcctgttcctgctaacagttacttaggtttttctttggactcagggaaaggtattgtttctaaagatgagatcacttttgtatctggtgctcccagagccaatcacagtggagccgtggttttgctgaagagagacatgaagtctgcacatctcctccctgagcacatattcgatggagaaggtctggcctcttcatttggctatgatgtggcggtggtggacctcaacaaggatgggtggcaagatatagttattggagccccacagtattttgatagagatggagaagttggaggtgcagtgtatgtctacatgaaccagcaaggcagatggaataatgtgaagccaattcgtcttaatggaaccaaagattctatgtttggcattgcagtaaaaaatattggagatattaatcaagatggctacccagatattgcagttggagctccgtatgatgacttgggaaaggtttttatctatcatggatctgcaaatggaataaataccaaaccaacacaggttctcaagggtatatcaccttattttggatattcaattgctggaaacatggaccttgatcgaaattcctaccctgatgttgctgttggttccctctcagattcagtaactattttcagatcccggcctgtgattaatattcagaaaaccatcacagtaactcctaacagaattgacctccgccagaaaacagcgtgtggggcgcctagtgggatatgcctccaggttaaatcctgttttgaatatactgctaaccccgctggttataatccttcaatatcaattgtgggcacacttgaagctgaaaaagaaagaagaaaatctgggctatcctcaagagttcagtttcgaaaccaaggttctgagcccaaatatactcaagaactaactctgaagaggcagaaacagaaagtgtgcatggaggaaaccctgtggctacaggataatatcagagataaactgcgtcccattcccataactgcctcagtggagatccaagagccaagctctcgtaggcgagtgaattcacttccagaagttcttccaattctgaattcagatgaacccaagacagctcatattgatgttcacttcttaaaagagggatgtggagacgacaatgtatgtaacagcaaccttaaactagaatataaattttgcacccgagaaggaaatcaagacaaattttcttatttaccaattcaaaaaggtgtaccagaactagttctaaaagatcagaaggatattgctttagaaataacagtgacaaacagcccttccaacccaaggaatcccacaaaagatggcgatgacgcccatgaggctaaactgattgcaacgtttccagacactttaacctattctgcatatagagaactgagggctttccctgagaaacagttgagttgtgttgccaaccagaatggctcgcaagctgactgtgagctcggaaatccttttaaaagaaattcaaatgtcactttttatttggttttaagtacaactgaagtcacctttgacaccccagatctggatattaatctgaagttagaaacaacaagcaatcaagataatttggctccaattacagctaaagcaaaagtggttattgaactgcttttatcggtctcgggagttgctaaaccttcccaggtgtattttggaggtacagttgttggcgagcaagctatgaaatctgaagatgaagtgggaagtttaatagagtatgaattcagggtaataaacttaggtaaacctcttacaaacctcggcacagcaaccttgaacattcagtggccaaaagaaattagcaatgggaaatggttgctttatttggtgaaagtagaatccaaaggattggaaaaggtaacttgtgagccacaaaaggagataaactccctgaacctaacggagtctcacaactcaagaaagaaacgggaaattactgaaaaacagatagatgataacagaaaattttctttatttgctgaaagaaaataccagactcttaactgtagcgtgaacgtgaactgtgtgaacatcagatgcccgctgcgggggctggacagcaaggcgtctcttattttgcgctcgaggttatggaacagcacatttctagaggaatattccaaactgaactacttggacattctcatgcgagccttcattgatgtgactgctgctgccgaaaatatcaggctgccaaatgcaggcactcaggtgagaggttccccagcttcattcaggttcagaacatgtctcttttccctgtaccccacactcatgtcctgaagtcatgtgctttggtgctcatttccctcatagccccattacggagaaaactgtcttaaggtactggcactgcaagctgtattttaatagaatcattgaaaaaaagaagtaaatctagggtcatccagttcag

SEQ ID NO: 282514 - DNA, 428 bp, Homo sapiens
gagcactcccggtgaccacctagtctccattttatttcctcggaaactgccgggcaggcgggggaccggccgcagggcggggtttctcttggcgaattgtttcctgccagcggcagccgagctgcgttcacgcgctgatcggagaatgagtgacagtcccagcctcagcacactcgcaactcggagatccttgcgctggcccggagagacatacaacacccttcagcagatcccctgggaaggaggtgggaagagacttaagttagaagaaaactccgatgtttggaagagatttccagaaataacccgaagaaaatgttttcctgtttataaattctgaaatctgtggtctctttattaaaatagccaggcttttatataggtattatgatatagaagcgtcattaaataatattttcttacatggg

SEQ ID NO: 282515 - DNA, 1599 bp, Homo sapiens
agatgcggtggtggccgccgagcgcctggaaggagctgctggacaggccgagggagcctccgcccgagaccgcgcagccgccgccgccatggctacaaaagaccccacagctgtagagagagcaaacttgttaaacatggctaaactgagtatcaaaggactcattgaatctgctctgagctttggccgcactttggattctgactatccccccttgcagcaattctttgttgttatggaacattgcctgaaacacggtcttaaagtaagaaaatcatttttgagttacaacaaaaccatctggggccctttggaactggtggagaagctgtaccccgaagcagaggaaataggagctagtgtccgggatctacctggtctgaagacccctctgggtcgagcaagagcgtggcttcgattagccctcatgcaaaaaaaaatggccgattacttacgttgcttaattattcagagggatctcttgagtgagttttatgagtatcacgcactaatgatggaagaagaaggagcagtaattgttgggctgctggttggcctgaatgtgatcgatgctaatctgtgtgtgaagggagaggatttagactcacaagttggagtgattgatttttctatgtatttaaagaatgaagaagatattggaaataaagaaaggtatgattttcataagttatttcacatattgggttttttatatagctctttacaaatcattataagatccatctatttacagtgtggttttattttgttgttttcccccctgtgacttcttcatttcattttcacttccattacaagctttacaaagcagattatggaaaatcacttaggagaaggaggttttattaatagtatgaagtgggacctttggttatacctgtagttactgagacccattttaatagtggttttttggaataaaagagatgaaagcttattattcacaagtttgcaaatactggggaggctgaggcaggagaatcgcttgaacccgggaagcagaggttgcagtgagccgagatcgcaccactgcactccaacctgggtgacagagcaagactccatctcaaaaacaaagaaacactgaacagttatcctatctgatctttttatatgcaggatagtgattaaatcactctacaaccactttcctctaatttctcctcataagcctaatcaaatgtatttgccttacttcctaccattctgttgaagattctccgaaaattggagaaagcactaaatatggtaggaagattctcttgaagttcctgtgatcttttgaaactgcattcctgagttctatccttacttccttaaagcagcatgcacttttggtttgttgttaatcaggggtctcctgtgcttggtgtgtggggtaggaaggcaggtgatcacctgcaacaattcttcacagattggaagttaaacatgaaaagcccccggagaccccacgaactagatgccagaaagttctgcagtcattgactgttaactgcaattccaactatacggtcagccctccatatccatgggttccatatccgtggattcaaccaacatggattgaaatattcc

SEQ ID NO: 282516 - DNA, 969 bp, Homo sapiens
acattccttcagtcattataaagttcttaaaatacaaaagaaattaaatctgtaagaaagtctagtagaccagatgctgttgtcaagacttgtatgttggtgtttttgctttcagtacatcccacgccatccacctccactcatgccgccttgcccatagtaacctccactgcctccaccaccacggccataaccacccaaaccatcaggagtaccatatcctccactgtaattgttccccattcccattcttccaactgatccatagcctccctgattatctttaaaaagaaaaaagaaaaaaaattgagactcatcgataagcagctaaccctgcatattttaaaaactttacatacccattccatctcttccgtagcctcccattccagaacctcccatgccagagccgcctccaggagtagaattcaagaagagttcaatatatcgatgttctttaagaaaaaaagaaagagtaacaggggagaaaggaatgatggataaaattcatcaatacaagctttgtaaaaaagatcaattaagtaatattaaacaaagtatgcttattaattactagtacagcgatatataaagcccacagaaagccattatagaggtcaaatggttttaaatcccaacaactgccaagcgttacctacagatcttagagcctcttattttataaattcacgtttaggaaataagattgtgtgccaaagacaccacttacgcatgttatttttatctttagacatggcagctactgcatcttcatgtgtcacaaactctacatctgcttctcctgtggctctgccatcagctccaatatcaatatgaactcgtattggatttagtggtgagaagaactaaataaaaggaaacacttatttacttttctattgagaatattaaagtaaattaccacataccttgatttttcctcatcaattaaaacaaacccttccactg

SEQ ID NO: 282517 - DNA, 642 bp, Homo sapiens
tcgtgatccgcgggcctcggcctcccaaagtgctgggattacaggcatgagccaccgcacccagccgaaaatgccaatatttcttaaaaagcaagttttaaatctaaaatatttttgctttaggacatttagaaaatataggaaaatatgaaatattccactagccagagaaggccataaaaatcatatactatacataattttatatcctatgaaataccaatacctactgaaatactaagtgttctatatttaaatatgtgtactgaaatttggacctatttgtaatctttttagatcaaaacttaaaattgaagacataaaagaagccaacaaagcattgcagggactggtttggctgaaagacaaagaagcaacacattgtaaactttgtgaaaaggaattctcactctctaagagaaagacatggcagctactgcatcttcatgtgtcacaaactctacatctgcttctcctgtggctctgccatcagctccaatatcaatatgaactcgtattggatttagtggtgagaagaactaaataaaaggaaacacttatttacttttctattgagaatattaaagtaaattaccacataccttgatttttcctcatcaattaaaacaaacccttccactg

SEQ ID NO: 282518 - DNA, 4344 bp, Homo sapiens
gagggctcgaggtgccacggcgtccaggagcgaggacagggccagctacaaaagaccccacagctgtagagagagcaaacttgttaaacatggctaaactgagtatcaaaggactcattgaatctgctctgagctttggccgcactttggattctgactatccccccttgcagcaattctttgttgttatggaacattgcctgaaacacggtcttaaagtaagaaaatcatttttgagttacaacaaaaccatctggggccctttggaactggtggagaagctgtaccccgaagcagaggaaataggagctagtgtccgggatctacctggtctgaagacccctctgggtcgagcaagagcgtggcttcgattagccctcatgcaaaaaaaaatggccgattacttacgttgcttaattattcagagggatctcttgagtgagttttatgagtatcacgcactaatgatggaagaagaaggagcagtaattgttgggctgctggttggcctgaatgtgatcgatgctaatctgtgtgtgaagggagaggatttagactcacaagttggagtgattgatttttctatgtatttaaagaatgaagaagatattggaaataaagaaaggaatgttcaaattgctgccatattagaccaaaagaattatgttgaagaattaaatagacaactgaacagcacagtcagcagcctccattcaagagttgattcattagaaaagtcaaatactaagctgattgaagagttagcaatagcaaagaataacatcattaaactccaggaagaaaatcatcaattacgaagtgaaaataaattgattttaatgaaaacacagcagcacctagaggttaccaaagtagatgtggaaactgagcttcaaacatataagcattctcgtcaggggctagatgaaatgtacaatgaagccagaaggcagcttcgagatgaatctcagttacgacaggatgtagagaatgagctagcagtacaagttagtatgaagcatgagattgaacttgccatgaagttgctggagaaagatatccatgagaaacaagatactctgataggccttcgacaacaactagaggaagttaaagcaattaacatagagatgtatcaaaagttgcagggttctgaagatggcttgaaagaaaaaaatgaaataattgcccgactagaagaaaaaaccaataaaattactgcagccatgaggcagctggaacaaagttctagcctcagttttacccaaagttgatttgaattacaccagattgcagcaagcagagaaggcgcaaatggaagctgaagatgaggatgagaaatatctacaagaatgtctcagtaaatctgatagtctgcagaaacaaatctcccaaaaggagaaacagctggtgcaactggaaactgacttgaagattgagaaggaatggaggcagactttgcaggaagatcttcaaaaggagaaagatgccttatctcatcttagaaatgagactcaacaaatcattagtcttaaaaaagagttccttaacctccaggatgaaaatcagcagttgaaaaaaatatatcatgaacaagagcaagctcttcaagaactcggcaacaagcttagcgaatcaaaacttaaaattgaagacataaaagaagccaacaaagcattgcagggactggtttggctgaaagacaaagaagcaacacattgtaaactttgtgaaaaggaattctcactctctaagagaaagcaccactgtagaaattgtggggaaattttctgtaatgcctgctctgacaacgaactacctttgccttcttcaccaaaaccagtacgggtttgtgattcctgtcatgcattgctcattcagagatgctcatctaacttgccctgagactccagaactaaatccttatgtatgaaattacctacaatgaatgttatgatgttgtatacaaaggtaaccagacagctctccttaagcggctttcggtcagtatttggtaccagtttatcttctacatattcagctcatggaaattacaagttatatatttccttccccattgtttttcaaaatgtattttcaacagagcatgcttaaaaatcatgtaactcattaaaaggccagagagcagagctaacacaacttgccttatcttgtaaaggccttaaaaataaggcttcagattgtttttttcttctgaattctgtcaatttggtatttgatggtgcctgcagttctcttaatgcactttaaagcttcacagttctgaaactggaaacgcataaaacttttaaaattattaatattctaattcaacagattttcattatctttgtaagatttcaactatatttatttgccctttcttctccccctctccctttgcctcttgcattagacagggccaatattttgtcctacaaaatttcctcttggtctctttaaaaatcagttattgtcgtgcttgctgaagattttcagctacagtggattaaattaaagggggcattatttggcctcggcctctacttttttccttttaatcttgaaaggaagttacatataaccatctttcttttcctgatttataaatcttcccatatgctgtttcactaaattgctgtttttttaaggggtgactcagaccccaattcaaagatgaaaacacaaatccttccccagaaaaaaaagtatgtaatagtaggggatgttacaggctccttataaaggtcctctcctctaagcattaaaagtgagaaaaaaatcaggactttgctttggtaatgtattagagttcagttcaaaaaattttgtattaacattttcattggagtaaattttaggaagtatcacattgtagtggcctacctgtatacatccacagtaaaatttcaccatgtccattgagcacctctatgccaagggtgttgagatgatgaaatatacacttgacctatttctttttttttcgagatggagtttcactcttgttgcctaggctggagtgcaatggcacgatctccacctcctgggttcaagcaattctcctgcctcagcctcccaagtagctgggattacaggcgtgagccacagcacctggccagtacacttgacctatttcaagctgactcaatgaacactaatccaagttatattgcttatggcatactaagaatttaacttgtataaattacctctgaatagttacataaacactatcaccattcagtatcctattttttacattaatttttaaccatgcactttaagtttgtgagcctataaaaaatacatagaaaatttatggattaagagcattatatttagtggttaatcctaggtacctccctgcctacaaaggagttcttattaatactgcaggatcttttcttcatgaatatatgcttccatgaaatttaaatttttctgaatagcctaagtatgaaatgaatattttacttgaagatctattttttccaaaacccgtaaatttccagtcagcttttgaggtgtcagatgtgacacagatttctagatggtctttcttgaatactgacagaaatgtcctcaagagaggattatattcttgaaccattttgtattgataggtgggatgggctaacatttttatgattactgaataaacaaaaaatgaaattttcaaatatgcttttttattactgtgcttagaacaaattttaaaatgtgacttaagttgcttaaattccaaggctaatttcattcaacaaaccatgattttgtcatcctttaagtaagtttctcacttttcaaaactcatgtatcaacactgacttacttgcttttttttttttttttttaaggcagcttttatgacagcaacttgctccatgtagttttggcttatttaaaaactatactaactttggatttttctgttacaagacttttaacaatctgtatttcgtgattgtgaactcgtattcattttacttttcaaaaacagacttaacataccattccctcacctagcagtactaccacaataatgctatcatggtgccagggaattacaattgtaattcttctaacctataatgtttaaaaaataaaatgtgaattttatgaactaaataaatatttggaaaattagcctgctttaaaagggcaattttggtttcattaatactgtatacttttactgctttaagatgttaagagagtaatcctgggaaaataaaacacatacaactttcaaaaaagacaggtggtgtatgccctaatatttaaattgctcattaaaggaagtggatacaagcattaagatgaatcatagcttcagtcaag

SEQ ID NO: 282519 - DNA, 3349 bp, Homo sapiens
  misc_feature (8)..(8): n is a, c, g, or t
tttgaacntagatagcctgtctccagcctgggcgacagagtgagactgtctcaaaaaaaaaaaaaaaatgactaatagcactgctttatatcacacacacacaaacacacacacacaaatcaaaaccaccatagcttttgtttttataaatagggttctgaagatggcttgaaagaaaaaaatgaaataattgcccgactagaagaaaaaaccaataaaattactgcagccatgaggcagctggaacaaagttctagcctcagttttacccaaagttgatttgaattacaccagattgcagcaagcagagaaggcgcaaatggaagctgaagatgaggatgagaaatatctacaagaatgtctcagtaaatctgatagtctgcagaaacaaatctcccaaaaggagaaacagctggtgcaactggaaactgacttgaagattgagaaggaatggaggcagactttgcaggaagatcttcaaaaggagaaagatgccttatctcatcttagaaatgagactcaacaaatcattagtcttaaaaaagagttccttaacctccaggatgaaaatcagcagttgaaaaaaatatatcatgaacaagagcaagctcttcaagaactcggcaacaagcttagcgaatcaaaacttaaaattgaagacataaaagaagccaacaaagcattgcagggactggtttggctgaaagacaaagaagcaacacattgtaaactttgtgaaaaggaattctcactctctaagagaaagcaccactgtagaaattgtggggaaattttctgtaatgcctgctctgacaacgaactacctttgccttcttcaccaaaaccagtacgggtttgtgattcctgtcatgcattgctcattcagagatgctcatctaacttgccctgagactccagaactaaatccttatgtatgaaattacctacaatgaatgttatgatgttgtatacaaaggtaaccagacagctctccttaagcggctttcggtcagtatttggtaccagtttatcttctacatattcagctcatggaaattacaagttatatatttccttccccattgtttttcaaaatgtattttcaacagagcatgcttaaaaatcatgtaactcattaaaaggccagagagcagagctaacacaacttgccttatcttgtaaaggccttaaaaataaggcttcagattgtttttttcttctgaattctgtcaatttggtatttgatggtgcctgcagttctcttaatgcactttaaagcttcacagttctgaaactggaaacgcataaaacttttaaaattattaatattctaattcaacagattttcattatctttgtaagatttcaactatatttatttgccctttcttctccccctctccctttgcctcttgcattagacagggccaatattttgtcctacaaaatttcctcttggtctctttaaaaatcagttattgtcgtgcttgctgaagattttcagctacagtggattaaattaaagggggcattatttggcctcggcctctacttttttccttttaatcttgaaaggaagttacatataaccatctttcttttcctgatttataaatcttcccatatgctgtttcactaaattgctgtttttttaaggggtgactcagaccccaattcaaagatgaaaacacaaatccttccccagaaaaaaaagtatgtaatagtaggggatgttacaggctccttataaaggtcctctcctctaagcattaaaagtgagaaaaaaatcaggactttgctttggtaatgtattagagttcagttcaaaaaattttgtattaacattttcattggagtaaattttaggaagtatcacattgtagtggcctacctgtatacatccacagtaaaatttcaccatgtccattgagcacctctatgccaagggtgttgagatgatgaaatatacacttgacctatttctttttttttcgagatggagtttcactcttgttgcctaggctggagtgcaatggcacgatctccacctcctgggttcaagcaattctcctgcctcagcctcccaagtagctgggattacaggcgtgagccacagcacctggccagtacacttgacctatttcaagctgactcaatgaacactaatccaagttatattgcttatggcatactaagaatttaacttgtataaattacctctgaatagttacataaacactatcaccattcagtatcctattttttacattaatttttaaccatgcactttaagtttgtgagcctataaaaaatacatagaaaatttatggattaagagcattatatttagtggttaatcctaggtacctccctgcctacaaaggagttcttattaatactgcaggatcttttcttcatgaatatatgcttccatgaaatttaaatttttctgaatagcctaagtatgaaatgaatattttacttgaagatctattttttccaaaacccgtaaatttccagtcagcttttgaggtgtcagatgtgacacagatttctagatggtctttcttgaatactgacagaaatgtcctcaagagaggattatattcttgaaccattttgtattgataggtgggatgggctaacatttttatgattactgaataaacaaaaaatgaaattttcaaatatgcttttttattactgtgcttagaacaaattttaaaatgtgacttaagttgcttaaattccaaggctaatttcattcaacaaaccatgattttgtcatcctttaagtaagtttctcacttttcaaaactcatgtatcaacactgacttacttgcttttttttttttttttttaaggcagcttttatgacagcaacttgctccatgtagttttggcttatttaaaaactatactaactttggatttttctgttacaagacttttaacaatctgtatttcgtgattgtgaactcgtattcattttacttttcaaaaacagacttaacataccattccctcacctagcagtactaccacaataatgctatcatggtgccagggaattacaattgtaattcttctaacctataatgtttaaaaaataaaatgtgaattttatgaactaaataaatatttggaaaattagcctgctttaaaagggcaattttggtttcattaatactgtatacttttactgctttaagatgttaagagagtaatcctgggaaaataaaacacatacaactttcaaaaaagacaggtggtgtatgccctaatatttaaattgctcattaaaggaagtggatacaagcattaagatgaatcatagcttcagtcaag

SEQ ID NO: 282520 - DNA, 3007 bp, Homo sapiens
tcgtgatccgcgggcctcggcctcccaaagtgctgggattacaggcatgagccaccgcacccagccgaaaatgccaatatttcttaaaaagcaagttttaaatctaaaatatttttgctttaggacatttagaaaatataggaaaatatgaaatattccactagccagagaaggccataaaaatcatatactatacataattttatatcctatgaaataccaatacctactgaaatactaagtgttctatatttaaatatgtgtactgaaatttggacctatttgtaatctttttagatcaaaacttaaaattgaagacataaaagaagccaacaaagcattgcagggactggtttggctgaaagacaaagaagcaacacattgtaaactttgtgaaaaggaattctcactctctaagagaaagcaccactgtagaaattgtggggaaattttctgtaatgcctgctctgacaacgaactacctttgccttcttcaccaaaaccagtacgggtttgtgattcctgtcatgcattgctcattcagagatgctcatctaacttgccctgagactccagaactaaatccttatgtatgaaattacctacaatgaatgttatgatgttgtatacaaaggtaaccagacagctctccttaagcggctttcggtcagtatttggtaccagtttatcttctacatattcagctcatggaaattacaagttatatatttccttccccattgtttttcaaaatgtattttcaacagagcatgcttaaaaatcatgtaactcattaaaaggccagagagcagagctaacacaacttgccttatcttgtaaaggccttaaaaataaggcttcagattgtttttttcttctgaattctgtcaatttggtatttgatggtgcctgcagttctcttaatgcactttaaagcttcacagttctgaaactggaaacgcataaaacttttaaaattattaatattctaattcaacagattttcattatctttgtaagatttcaactatatttatttgccctttcttctccccctctccctttgcctcttgcattagacagggccaatattttgtcctacaaaatttcctcttggtctctttaaaaatcagttattgtcgtgcttgctgaagattttcagctacagtggattaaattaaagggggcattatttggcctcggcctctacttttttccttttaatcttgaaaggaagttacatataaccatctttcttttcctgatttataaatcttcccatatgctgtttcactaaattgctgtttttttaaggggtgactcagaccccaattcaaagatgaaaacacaaatccttccccagaaaaaaaagtatgtaatagtaggggatgttacaggctccttataaaggtcctctcctctaagcattaaaagtgagaaaaaaatcaggactttgctttggtaatgtattagagttcagttcaaaaaattttgtattaacattttcattggagtaaattttaggaagtatcacattgtagtggcctacctgtatacatccacagtaaaatttcaccatgtccattgagcacctctatgccaagggtgttgagatgatgaaatatacacttgacctatttctttttttttcgagatggagtttcactcttgttgcctaggctggagtgcaatggcacgatctccacctcctgggttcaagcaattctcctgcctcagcctcccaagtagctgggattacaggcgtgagccacagcacctggccagtacacttgacctatttcaagctgactcaatgaacactaatccaagttatattgcttatggcatactaagaatttaacttgtataaattacctctgaatagttacataaacactatcaccattcagtatcctattttttacattaatttttaaccatgcactttaagtttgtgagcctataaaaaatacatagaaaatttatggattaagagcattatatttagtggttaatcctaggtacctccctgcctacaaaggagttcttattaatactgcaggatcttttcttcatgaatatatgcttccatgaaatttaaatttttctgaatagcctaagtatgaaatgaatattttacttgaagatctattttttccaaaacccgtaaatttccagtcagcttttgaggtgtcagatgtgacacagatttctagatggtctttcttgaatactgacagaaatgtcctcaagagaggattatattcttgaaccattttgtattgataggtgggatgggctaacatttttatgattactgaataaacaaaaaatgaaattttcaaatatgcttttttattactgtgcttagaacaaattttaaaatgtgacttaagttgcttaaattccaaggctaatttcattcaacaaaccatgattttgtcatcctttaagtaagtttctcacttttcaaaactcatgtatcaacactgacttacttgcttttttttttttttttttaaggcagcttttatgacagcaacttgctccatgtagttttggcttatttaaaaactatactaactttggatttttctgttacaagacttttaacaatctgtatttcgtgattgtgaactcgtattcattttacttttcaaaaacagacttaacataccattccctcacctagcagtactaccacaataatgctatcatggtgccagggaattacaattgtaattcttctaacctataatgtttaaaaaataaaatgtgaattttatgaactaaataaatatttggaaaattagcctgctttaaaagggcaattttggtttcattaatactgtatacttttactgctttaagatgttaagagagtaatcctgggaaaataaaacacatacaactttcaaaaaagacaggtggtgtatgccctaatatttaaattgctcattaaaggaagtggatacaagcattaagatgaatcatagcttcagtcaag

SEQ ID NO: 282521 - DNA, 2017 bp, Homo sapiens
gagggctcgaggtgccacggcgtccaggagcgaggacagggccagctacaaaagaccccacagctgtagagagagcaaacttgttaaacatggctaaactgagtatcaaaggactcattgaatctgctctgagctttggccgcactttggattctgactatccccccttgcagcaattctttgttgttatggaacattgcctgaaacacggtcttaaagtaagaaaatcatttttgagttacaacaaaaccatctggggccctttggaactggtggagaagctgtaccccgaagcagaggaaataggagctagtgtccgggatctacctggtctgaagacccctctgggtcgagcaagagcgtggcttcgattagccctcatgcaaaaaaaaatggccgattacttacgttgcttaattattcagagggatctcttgagtgagttttatgagtatcacgcactaatgatggaagaagaaggagcagtaattgttgggctgctggttggcctgaatgtgatcgatgctaatctgtgtgtgaagggagaggatttagactcacaagttggagtgattgatttttctatgtatttaaagaatgaagaagatattggaaataaagaaaggaatgttcaaattgctgccatattagaccaaaagaattatgttgaagaattaaatagacaactgaacagcacagtcagcagcctccattcaagagttgattcattagaaaagtcaaatactaagctgattgaagagttagcaatagcaaagaataacatcattaaactccaggaagaaaatcatcaattacgaagtgaaaataaattgattttaatgaaaacacagcagcacctagaggttaccaaagtagatgtggaaactgagcttcaaacatataagcattctcgtcaggggctagatgaaatgtacaatgaagccagaaggcagcttcgagatgaatctcagttacgacaggatgtagagaatgagctagcagtacaagttagtatgaagcatgagattgaacttgccatgaagttgctggagaaagatatccatgagaaacaagatactctgataggccttcgacaacaactagaggaagttaaagcaattaacatagagatgtatcaaaagttgcagggttctgaagatggcttgaaagaaaaaaatgaaataattgcccgactagaagaaaaaaccaataaaattactgcagccatgaggcagctggaacaaagattgcagcaagcagagaaggcgcaaatggaagctgaagatgaggatgagaaatatctacaagaatgtctcagtaaatctgatagtctgcagaaacaaatctcccaaaaggagaaacagctggtgcaactggaaactgacttgaagattgagaaggaatggaggcagactttgcaggaagatcttcaaaaggagaaagatgccttatctcatcttagaaatgagactcaacaaatcattagtcttaaaaaagagttccttaacctccaggatgaaaatcagcagttgaaaaaaatatatcatgaacaagagcaagctcttcaagaactcggcaacaagcttagcgaatcaaaacttaaaattgaagacataaaagaagccaacaaagcattgcagggactggtttggctgaaagacaaagaagcaacacattgtaaactttgtgaaaaggaattctcactctctaagagaaagcaccactgtagaaattgtggggaaattttctgtaatgcctgctctgacaacgaactacctttgccttcttcaccaaaaccaacatggcagctactgcatcttcatgtgtcacaaactctacatctgcttctcctgtggctctgccatcagctccaatatcaatatgaactcgtattggatttagtggtgagaagaactaaataaaaggaaacacttatttacttttctattgagaatattaaagtaaattaccacataccttgatttttcctcatcaattaaaacaaacccttccactg

SEQ ID NO: 282522 - DNA, 1653 bp, Homo sapiens
tcgtgatccgcgggcctcggcctcccaaagtgctgggattacaggcatgagccaccgcacccagccgaaaatgccaatatttcttaaaaagcaagttttaaatctaaaatatttttgctttaggacatttagaaaatataggaaaatatgaaatattccactagccagagaaggccataaaaatcatatactatacataattttatatcctatgaaataccaatacctactgaaatactaagtgttctatatttaaatatgtgtactgaaatttggacctatttgtaatctttttagatcaaaacttaaaattgaagacataaaagaagccaacaaagcattgcaggtgagtagaacgttttcctaaagtgggaaggtatgtgaaagtctccaatggaaggtaatgccctgtgtgaatctaatgtattattaaccccaggatatatagaggccgaagcactgaatgaggagcttggatgctgggggttcagctcttccctgtacccctagagtcacattattaataaccttcctttagaaactgaccttagaggccgggcgcagtggctcacgcccgtaatccgagctctttgggaggccgaggcaggtgggtcatttgaggtcaggagtttgaaaccagcctggccagcatggtgaaatcccatctctactaaaaatacaaacatttgttgagtgtggtagtgggtgcctgtaatcccagccactcgggaggctgaggcaggagaattgcttgagcccggaaggtggaggttgcagtgagccgagatcgcgccactgcactctagcctgggcgacagagcaagactctgtctcaaaaaagaaaacaaaacaaaaaacggtacaacaaaagacaccagcacaaaatggtatagtcatcaccattctatgctgatcagtctttcattatactcttaactggacttcacgaatgtagctttttacttgtttgaatcctatgtaggttgacacacaatggatacaaaaatatccatcagtgattagaattaaaggtagatctaattagccaggcgtggtggcgggcacctatagttccagctactcgggaggctgaggcaggacaatggcgtgaacctgggaggcagagcttgcagtgagccgagatcacaccactgcactcagcctgggggacagagcaagactccatctcaaaaaaagaattaaaggtagatctatttttatattcaagggattttggtattaagctataaacatgagaacattaagaatgcttaaagatttagacaccaggataagtataaaaccactaatagttattaaaaattactcacattagcaatgtcattttcagttgcacgaaaaggcaaccctctcatatgtacgaaatgaccaccatgaaaacctgaacttgcatcaccagctccaccatagccatgtcctcccatacctggaaaacacaatttgccaagattataaactattacagatacaagtagggaagtatacatacatactatacaaggtataaagctctatataggaatgcactgaaatttgtctgaattaactttatacaagtttcctatattaccactaagagcttgcaaagcaaatactaaaatttacctatgaataaaaatgtctttaatattt

SEQ ID NO: 282523 - DNA, 1936 bp, Homo sapiens
gagggctcgaggtgccacggcgtccaggagcgaggacagggccagctacaaaagaccccacagctgtagagagagcaaacttgttaaacatggctaaactgagtatcaaaggactcattgaatctgctctgagctttggccgcactttggattctgactatccccccttgcagcaattctttgttgttatggaacattgcctgaaacacggtcttaaagtaagaaaatcatttttgagttacaacaaaaccatctggggccctttggaactggtggagaagctgtaccccgaagcagaggaaataggagctagtgtccgggatctacctggtctgaagacccctctgggtcgagcaagagcgtggcttcgattagccctcatgcaaaaaaaaatggccgattacttacgttgcttaattattcagagggatctcttgagtgagttttatgagtatcacgcactaatgatggaagaagaaggagcagtaattgttgggctgctggttggcctgaatgtgatcgatgctaatctgtgtgtgaagggagaggatttagactcacaagttggagtgattgatttttctatgtatttaaagaatgaagaagatattggaaataaagaaaggaatgttcaaattgctgccatattagaccaaaagaattatgttgaagaattaaatagacaactgaacagcacagtcagcagcctccattcaagagttgattcattagaaaagtcaaatactaagctgattgaagagttagcaatagcaaagaataacatcattaaactccaggaagaaaatcatcaattacgaagtgaaaataaattgattttaatgaaaacacagcagcacctagaggttaccaaagtagatgtggaaactgagcttcaaacatataagcattctcgtcaggggctagatgaaatgtacaatgaagccagaaggcagcttcgagatgaatctcagttacgacaggatgtagagaatgagctagcagtacaagttagtatgaagcatgagattgaacttgccatgaagttgctggagaaagatatccatgagaaacaagatactctgataggccttcgacaacaactagaggaagttaaagcaattaacatagagatgtatcaaaagttgcagggttctgaagatggcttgaaagaaaaaaatgaaataattgcccgactagaagaaaaaaccaataaaattactgcagccatgaggcagctggaacaaagattgcagcaagcagagaaggcgcaaatggaagctgaagatgaggatgagaaatatctacaagaatgtctcagtaaatctgatagtctgcagaaacaaatctcccaaaaggagaaacagctggtgcaactggaaactgacttgaagattgagaaggaatggaggcagactttgcaggaagatcttcaaaaggagaaagatgccttatctcatcttagaaatgagactcaacaaatcattagtcttaaaaaagagttccttaacctccaggatgaaaatcagcagttgaaaaaaatatatcatgaacaagagcaagctcttcaagaactcggcaacaagcttagcgaatcaaaacttaaaattgaagacataaaagaagccaacaaagcattgcagggactggtttggctgaaagacaaagaagcaacacattgtaaactttgtgaaaaggaattctcactctctaagagaaagacatggcagctactgcatcttcatgtgtcacaaactctacatctgcttctcctgtggctctgccatcagctccaatatcaatatgaactcgtattggatttagtggtgagaagaactaaataaaaggaaacacttatttacttttctattgagaatattaaagtaaattaccacataccttgatttttcctcatcaattaaaacaaacccttccactg

SEQ ID NO: 282524 - DNA, 216 bp, Homo sapiens
caaacatataagcattctcgtcaggggctagatgaaatgtacaatgaagccagaaggcagcttcgagatgaatctcagttacgacaggtaggttatattaaaaattacattagcaagatcatcctgggagtaatttaccctcaagcaagcaccatttaaaatctttttcagccttatcctttttggtgtggtatgtagcaagctcaccccttaatc

SEQ ID NO: 282525 - DNA, 429 bp, Homo sapiens
tgggcgacagagtgagactgtctcaaaaaaaaaaaaaaaatgactaatagcactgctttatatcacacaattattttaatgtataaagtaactctgttcatttcaaagtaacagtcccatagcaaaatggtgtaagaaacttataaatactcaggttaacagatcagaactctacttgggaggctgagaggtgggatagcttgagcccagaagttcaaatccaacctgggctgcatagtgataccctatctattaaaaacacgcacacacacacacacacaaacacacacacacaaatcaaaaccaccatagcttttgtttttataaatagggttctgaagatggcttgaaagaaaaaaatgaaataattgcccgactagaagaaaaaaccaataaaattactgcagccatgaggcagctggaacaaag

SEQ ID NO: 282526 - DNA, 2146 bp, Homo sapiens
gagggctcgaggtgccacggcgtccaggagcgaggacagggccagctacaaaagaccccacagctgtagagagagcaaacttgttaaacatggctaaactgagtatcaaaggactcattgaatctgctctgagctttggccgcactttggattctgactatccccccttgcagcaattctttgttgttatggaacattgcctgaaacacggtcttaaagtaagaaaatcatttttgagttacaacaaaaccatctggggccctttggaactggtggagaagctgtaccccgaagcagaggaaataggagctagtgtccgggatctacctggtctgaagacccctctgggtcgagcaagagcgtggcttcgattagccctcatgcaaaaaaaaatggccgattacttacgttgcttaattattcagagggatctcttgagtgagttttatgagtatcacgcactaatgatggaagaagaaggagcagtaattgttgggctgctggttggcctgaatgtgatcgatgctaatctgtgtgtgaagggagaggatttagactcacaagttggagtgattgatttttctatgtatttaaagaatgaagaagatattggaaataaagaaaggaatgttcaaattgctgccatattagaccaaaagaattatgttgaagaattaaatagacaactgaacagcacagtcagcagcctccattcaagagttgattcattagaaaagtcaaatactaagctgattgaagagttagcaatagcaaagaataacatcattaaactccaggaagaaaatcatcaattacgaagtgaaaataaattgattttaatgaaaacacagcagcacctagaggttaccaaagtagatgtggaaactgagcttcaaacatataagcattctcgtcaggggctagatgaaatgtacaatgaagccagaaggcagcttcgagatgaatctcagttacgacaggatgtagagaatgagctagcagtacaagttagtatgaagcatgagattgaacttgccatgaagttgctggagaaagatatccatgagaaacaagatactctgataggccttcgacaacaactagaggaagttaaagcaattaacatagagatgtatcaaaagttgcagggttctgaagatggcttgaaagaaaaaaatgaaataattgcccgactagaagaaaaaaccaataaaattactgcagccatgaggcagctggaacaaagattgcagcaagcagagaaggcgcaaatggaagctgaagatgaggatgagaaatatctacaagaatgtctcagtaaatctgatagtctgcagaaacaaatctcccaaaaggagaaacagctggtgcaactggaaactgacttgaagattgagaaggaatggaggcagactttgcaggaagatcttcaaaaggagaaagatgccttatctcatcttagaaatgagactcaacaaatcattagtcttaaaaaagagttccttaacctccaggatgaaaatcagcagttgaaaaaaatatatcatgaacaagagcaagctcttcaagaactcggcaacaagcttagcgaatcaaaacttaaaattgaagacataaaagaagccaacaaagcattgcagggactggtttggctgaaagacaaagaagcaacacattgtaaactttgtgaaaaggaattctcactctctaagagaaagcaccactgtagaaattgtggggaaattttctgtaatgcctgctctgacaacgaactacctttgccttcttcaccaaaaccagtacgggtttgtgattcctgtcatgcattgctcattcagagatgctcatctaacttgccctgagactccagaactaaatccttatgtatgaaattacctacaatgaatgttatgatgttgtatacaaagacatggcagctactgcatcttcatgtgtcacaaactctacatctgcttctcctgtggctctgccatcagctccaatatcaatatgaactcgtattggatttagtggtgagaagaactaaataaaaggaaacacttatttacttttctattgagaatattaaagtaaattaccacataccttgatttttcctcatcaattaaaacaaacccttccactg

SEQ ID NO: 282527 - DNA, 4301 bp, Homo sapiens
gagggctcgaggtgccacggcgtccaggagcgaggacagggccagctacaaaagaccccacagctgtagagagagcaaacttgttaaacatggctaaactgagtatcaaaggactcattgaatctgctctgagctttggccgcactttggattctgactatccccccttgcagcaattctttgttgttatggaacattgcctgaaacacggtcttaaagtaagaaaatcatttttgagttacaacaaaaccatctggggccctttggaactggtggagaagctgtaccccgaagcagaggaaataggagctagtgtccgggatctacctggtctgaagacccctctgggtcgagcaagagcgtggcttcgattagccctcatgcaaaaaaaaatggccgattacttacgttgcttaattattcagagggatctcttgagtgagttttatgagtatcacgcactaatgatggaagaagaaggagcagtaattgttgggctgctggttggcctgaatgtgatcgatgctaatctgtgtgtgaagggagaggatttagactcacaagttggagtgattgatttttctatgtatttaaagaatgaagaagatattggaaataaagaaaggaatgttcaaattgctgccatattagaccaaaagaattatgttgaagaattaaatagacaactgaacagcacagtcagcagcctccattcaagagttgattcattagaaaagtcaaatactaagctgattgaagagttagcaatagcaaagaataacatcattaaactccaggaagaaaatcatcaattacgaagtgaaaataaattgattttaatgaaaacacagcagcacctagaggttaccaaagtagatgtggaaactgagcttcaaacatataagcattctcgtcaggggctagatgaaatgtacaatgaagccagaaggcagcttcgagatgaatctcagttacgacaggatgtagagaatgagctagcagtacaagttagtatgaagcatgagattgaacttgccatgaagttgctggagaaagatatccatgagaaacaagatactctgataggccttcgacaacaactagaggaagttaaagcaattaacatagagatgtatcaaaagttgcagggttctgaagatggcttgaaagaaaaaaatgaaataattgcccgactagaagaaaaaaccaataaaattactgcagccatgaggcagctggaacaaagattgcagcaagcagagaaggcgcaaatggaagctgaagatgaggatgagaaatatctacaagaatgtctcagtaaatctgatagtctgcagaaacaaatctcccaaaaggagaaacagctggtgcaactggaaactgacttgaagattgagaaggaatggaggcagactttgcaggaagatcttcaaaaggagaaagatgccttatctcatcttagaaatgagactcaacaaatcattagtcttaaaaaagagttccttaacctccaggatgaaaatcagcagttgaaaaaaatatatcatgaacaagagcaagctcttcaagaactcggcaacaagcttagcgaatcaaaacttaaaattgaagacataaaagaagccaacaaagcattgcagggactggtttggctgaaagacaaagaagcaacacattgtaaactttgtgaaaaggaattctcactctctaagagaaagcaccactgtagaaattgtggggaaattttctgtaatgcctgctctgacaacgaactacctttgccttcttcaccaaaaccagtacgggtttgtgattcctgtcatgcattgctcattcagagatgctcatctaacttgccctgagactccagaactaaatccttatgtatgaaattacctacaatgaatgttatgatgttgtatacaaaggtaaccagacagctctccttaagcggctttcggtcagtatttggtaccagtttatcttctacatattcagctcatggaaattacaagttatatatttccttccccattgtttttcaaaatgtattttcaacagagcatgcttaaaaatcatgtaactcattaaaaggccagagagcagagctaacacaacttgccttatcttgtaaaggccttaaaaataaggcttcagattgtttttttcttctgaattctgtcaatttggtatttgatggtgcctgcagttctcttaatgcactttaaagcttcacagttctgaaactggaaacgcataaaacttttaaaattattaatattctaattcaacagattttcattatctttgtaagatttcaactatatttatttgccctttcttctccccctctccctttgcctcttgcattagacagggccaatattttgtcctacaaaatttcctcttggtctctttaaaaatcagttattgtcgtgcttgctgaagattttcagctacagtggattaaattaaagggggcattatttggcctcggcctctacttttttccttttaatcttgaaaggaagttacatataaccatctttcttttcctgatttataaatcttcccatatgctgtttcactaaattgctgtttttttaaggggtgactcagaccccaattcaaagatgaaaacacaaatccttccccagaaaaaaaagtatgtaatagtaggggatgttacaggctccttataaaggtcctctcctctaagcattaaaagtgagaaaaaaatcaggactttgctttggtaatgtattagagttcagttcaaaaaattttgtattaacattttcattggagtaaattttaggaagtatcacattgtagtggcctacctgtatacatccacagtaaaatttcaccatgtccattgagcacctctatgccaagggtgttgagatgatgaaatatacacttgacctatttctttttttttcgagatggagtttcactcttgttgcctaggctggagtgcaatggcacgatctccacctcctgggttcaagcaattctcctgcctcagcctcccaagtagctgggattacaggcgtgagccacagcacctggccagtacacttgacctatttcaagctgactcaatgaacactaatccaagttatattgcttatggcatactaagaatttaacttgtataaattacctctgaatagttacataaacactatcaccattcagtatcctattttttacattaatttttaaccatgcactttaagtttgtgagcctataaaaaatacatagaaaatttatggattaagagcattatatttagtggttaatcctaggtacctccctgcctacaaaggagttcttattaatactgcaggatcttttcttcatgaatatatgcttccatgaaatttaaatttttctgaatagcctaagtatgaaatgaatattttacttgaagatctattttttccaaaacccgtaaatttccagtcagcttttgaggtgtcagatgtgacacagatttctagatggtctttcttgaatactgacagaaatgtcctcaagagaggattatattcttgaaccattttgtattgataggtgggatgggctaacatttttatgattactgaataaacaaaaaatgaaattttcaaatatgcttttttattactgtgcttagaacaaattttaaaatgtgacttaagttgcttaaattccaaggctaatttcattcaacaaaccatgattttgtcatcctttaagtaagtttctcacttttcaaaactcatgtatcaacactgacttacttgcttttttttttttttttttaaggcagcttttatgacagcaacttgctccatgtagttttggcttatttaaaaactatactaactttggatttttctgttacaagacttttaacaatctgtatttcgtgattgtgaactcgtattcattttacttttcaaaaacagacttaacataccattccctcacctagcagtactaccacaataatgctatcatggtgccagggaattacaattgtaattcttctaacctataatgtttaaaaaataaaatgtgaattttatgaactaaataaatatttggaaaattagcctgctttaaaagggcaattttggtttcattaatactgtatacttttactgctttaagatgttaagagagtaatcctgggaaaataaaacacatacaactttcaaaaaagacaggtggtgtatgccctaatatttaaattgctcattaaaggaagtggatacaagcattaagatgaatcatagcttcagtcaag

SEQ ID NO: 282528 - DNA, 4039 bp, Homo sapiens
gagggctcgaggtgccacggcgtccaggagcgaggacagggccagctacaaaagaccccacagctgtagagagagcaaacttgttaaacatggctaaactgagtatcaaaggactcattgaatctgctctgagctttggccgcactttggattctgactatccccccttgcagcaattctttgttgttatggaacattgcctgaaacacggtcttaaagtaagaaaatcatttttgagttacaacaaaaccatctggggccctttggaactggtggagaagctgtaccccgaagcagaggaaataggagctagtgtccgggatctacctggtctgaagacccctctgggtcgagcaagagcgtggcttcgattagccctcatgcaaaaaaaaatggccgattacttacgttgcttaattattcagagggatctcttgagtgagttttatgagtatcacgcactaatgatggaagaagaaggagcagtaattgttgggctgctggttggcctgaatgtgatcgatgctaatctgtgtgtgaagggagaggatttagactcacaagttggagtgattgatttttctatgtatttaaagaatgaagaagatattggaaataaagaaaggaatgttcaaattgctgccatattagaccaaaagaattatgttgaagaattaaatagacaactgaacagcacagtcagcagcctccattcaagagttgattcattagaaaagtcaaatactaagctgattgaagagttagcaatagcaaagaataacatcattaaactccaggaagaaaatcatcaattacgaagtgaaaataaattgattttaatgaaaacacagcagcacctagaggttaccaaagtagatgtggaaactgagcttcaaacatataagcattctcgtcaggggctagatgaaatgtacaatgaagccagaaggcagcttcgagatgaatctcagttacgacaggatgtagagaatgagctagcagtacaagttagtatgaagcatgagattgaacttgccatgaagttgctggagaaagatatccatgagaaacaagatactctgataggccttcgacaacaactagaggaagttaaagcaattaacatagagatgtatcaaaagttgcagggttctgaagatggcttgaaagaaaaaaatgaaataattgcccgactagaagaaaaaaccaataaaattactgcagccatgaggcagctggaacaaagattgcagcaagcagagaaggcgcaaatggaagctgaagatgaggatgagaaatatctacaagaatgtctcagtaaatctgatagtctgcagaaacaaatctcccaaaaggagaaacagctggtgcaactggaaactgacttgaagattgagaaggaatggaggcagactttgcaggaagatcttcaaaaggagaaagatgccttatctcatcttagaaatgagactcaacaaatcattagtcttaaaaaagagttccttaacctccaggatgaaaatcagcagttgaaaaaaatatatcatgaacaagagcaagctcttcaagaactcggcaacaagcttagcgaatcaaaacttaaaattgaagacataaaagaagccaacaaagcattgcagggactggtttggctgaaagacaaagaagcaacacattgtaaactttgtgaaaaggaattctcactctctaagagaaagcaccactgtagaaattgtggggaaattttctgtaatgcctgctctgacaacgaactacctttgccttcttcaccaaaaccagtacgggtttgtgattcctgtcatgcattgctcattcagagatgctcatctaacttgccctgagactccagaactaaatccttatgtatgaaattacctacaatgaatgttatgatgttgtatacaaaggtaaccagacagctctccttaagcggctttcggtcagtatttggtaccagtttatcttctacatattcagctcatggaaattacaagttatatatttccttccccattgtttttcaaaatgtattttcaacagagcatgcttaaaaatcatgtaactcattaaaaggccagagagcagagctaacacaacttgccttatcttgtaaaggccttaaaaataaggcttcagattgtttttttcttctgaattctgtcaatttggtatttgatggtgcctgcagttctcttaatgcactttaaagcttcacagttctgaaactggaaacgcataaaacttttaaaattattaatattctaattcaacagattttcattatctttgtaagatttcaactatatttatttgccctttcttctccccctctccctttgcctcttgcattagacagggccaatattttgtcctacaaaatttcctcttggtctctttaaaaatcagttattgtcgtgcttgctgaagattttcagctacagtggattaaattaaagggggcattatttggcctcggcctctacttttttccttttaatcttgaaaggaagttacatataaccatctttcttttcctgatttataaatcttcccatatgctgtttcactaaattgctgtttttttaaggggtgactcagaccccaattcaaagatgaaaacacaaatccttccccagaaaaaaaagtatgtaatagtaggggatgttacaggctccttataaaggtcctctcctctaagcattaaaagtgagaaaaaaatcaggactttgctttggtaatgtattagagttcagttcaaaaaattttgtattaacattttcattggagtaaattttaggaagtatcacattgtagtggcctacctgtatacatccacagtaaaatttcaccatgtccattgagcacctctatgccaagggtgttgagatgatgaaatatacacttgacctatttctttttttttcgagatggagtttcactcttgttgcctaggctggagtgcaatggcacgatctccacctcctgggttcaagcaattctcctgcctcagcctcccaagtagctgggattacaggcgtgagccacagcacctggccagtacacttgacctatttcaagctgactcaatgaacactaatccaagttatattgcttatggcatactaagaatttaacttgtataaattacctctgaatagttacataaacactatcaccattcagtatcctattttttacattaatttttaaccatgcactttaagtttgtgagcctataaaaaatacatagaaaatttatggattaagagcattatatttagtggttaatcctaggtacctccctgcctacaaaggagttcttattaatactgcaggatcttttcttcatgaatatatgcttccatgaaatttaaatttttctgaatagcctaagtatgaaatgaatattttacttgaagatctattttttccaaaacccgtaaatttccagtcagcttttgaggtgtcagatgtgacacagatttctagatggtctttcttgaatactgacagaaatgtcctcaagagaggattatattcttgaaccattttgtattgataggtgggatgggctaacatttttatgattactgaataaacaaaaaatgaaattttcaaatatgcttttttattactgtgcttagaacaaattttaaaatgtgacttaagttgcttaaattccaaggctaatttcattcaacaaaccatgattttgtcatcctttaagtaagtttctcacttttcaaaactcatgtatcaacactgacttacttgcttttttttttttttttttaaggcagcttttatgacagcaacttgctccatgtagttttggcttatttaaaaactatactaactttggatttttctgttacaagacttttaacaatctgtatttcgtgattgtgaactcgtattcattttacttttcaaaaacagacttacaattgtaattccctggcaccatgatagcattattgtggtagtactgctaggcgggggaatggtatgttaagtc

SEQ ID NO: 282529 - DNA, 2947 bp, Homo sapiens
gagggctcgaggtgccacggcgtccaggagcgaggacagggccagctacaaaagaccccacagctgtagagagagcaaacttgttaaacatggctaaactgagtatcaaaggactcattgaatctgctctgagctttggccgcactttggattctgactatccccccttgcagcaattctttgttgttatggaacattgcctgaaacacggtcttaaagtaagaaaatcatttttgagttacaacaaaaccatctggggccctttggaactggtggagaagctgtaccccgaagcagaggaaataggagctagtgtccgggatctacctggtctgaagacccctctgggtcgagcaagagcgtggcttcgattagccctcatgcaaaaaaaaatggccgattacttacgttgcttaattattcagagggatctcttgagtgagttttatgagtatcacgcactaatgatggaagaagaaggagcagtaattgttgggctgctggttggcctgaatgtgatcgatgctaatctgtgtgtgaagggagaggatttagactcacaagttggagtgattgatttttctatgtatttaaagaatgaagaagatattggaaataaagaaaggaatgttcaaattgctgccatattagaccaaaagaattatgttgaagaattaaatagacaactgaacagcacagtcagcagcctccattcaagagttgattcattagaaaagtcaaatactaagctgattgaagagttagcaatagcaaagaataacatcattaaactccaggaagaaaatcatcaattacgaagtgaaaataaattgattttaatgaaaacacagcagcacctagaggttaccaaagtagatgtggaaactgagcttcaaacatataagcattctcgtcaggggctagatgaaatgtacaatgaagccagaaggcagcttcgagatgaatctcagttacgacaggatgtagagaatgagctagcagtacaagttagtatgaagcatgagattgaacttgccatgaagttgctggagaaagatatccatgagaaacaagatactctgataggccttcgacaacaactagaggaagttaaagcaattaacatagagatgtatcaaaagttgcagggttctgaagatggcttgaaagaaaaaaatgaaataattgcccgactagaagaaaaaaccaataaaattactgcagccatgaggcagctggaacaaagattgcagcaagcagagaaggcgcaaatggaagctgaagatgaggatgagaaatatctacaagaatgtctcagtaaatctgatagtctgcagaaacaaatctcccaaaaggagaaacagctggtgcaactggaaactgacttgaagattgagaaggaatggaggcagactttgcaggaagatcttcaaaaggagaaagatgccttatctcatcttagaaatgagactcaacaaatcattagtcttaaaaaagagttccttaacctccaggatgaaaatcagcagttgaaaaaaatatatcatgaacaagagcaagctcttcaagaactcggcaacaagcttagcgaatcaaaacttaaaattgaagacataaaagaagccaacaaagcattgcaggtgagtagaacgttttcctaaagtgggaaggtatgtgaaagtctccaatggaaggtaatgccctgtgtgaatctaatgtattattaaccccaggatatatagaggccgaagcactgaatgaggagcttggatgctgggggttcagctcttccctgtacccctagagtcacattattaataaccttcctttagaaactgaccttagaggccgggcgcagtggctcacgcccgtaatccgagctctttgggaggccgaggcaggtgggtcatttgaggtcaggagtttgaaaccagcctggccagcatggtgaaatcccatctctactaaaaatacaaacatttgttgagtgtggtagtgggtgcctgtaatcccagccactcgggaggctgaggcaggagaattgcttgagcccggaaggtggaggttgcagtgagccgagatcgcgccactgcactctagcctgggcgacagagcaagactctgtctcaaaaaagaaaacaaaacaaaaaacggtacaacaaaagacaccagcacaaaatggtatagtcatcaccattctatgctgatcagtctttcattatactcttaactggacttcacgaatgtagctttttacttgtttgaatcctatgtaggttgacacacaatggatacaaaaatatccatcagtgattagaattaaaggtagatctaattagccaggcgtggtggcgggcacctatagttccagctactcgggaggctgaggcaggacaatggcgtgaacctgggaggcagagcttgcagtgagccgagatcacaccactgcactcagcctgggggacagagcaagactccatctcaaaaaaagaattaaaggtagatctatttttatattcaagggattttggtattaagctataaacatgagaacattaagaatgcttaaagatttagacaccaggataagtataaaaccactaatagttattaaaaattactcacattagcaatgtcattttcagttgcacgaaaaggcaaccctctcatatgtacgaaatgaccaccatgaaaacctgaacttgcatcaccagctccaccatagccatgtcctcccatacctggaaaacacaatttgccaagattataaactattacagatacaagtagggaagtatacatacatactatacaaggtataaagctctatataggaatgcactgaaatttgtctgaattaactttatacaagtttcctatattaccactaagagcttgcaaagcaaatactaaaatttacctatgaataaaaatgtctttaatattt

SEQ ID NO: 282530 - DNA, 1703 bp, Homo sapiens
gagggctcgaggtgccacggcgtccaggagcgaggacagggccagctacaaaagaccccacagctgtagagagagcaaacttgttaaacatggctaaactgagtatcaaaggactcattgaatctgctctgagctttggccgcactttggattctgactatccccccttgcagcaattctttgttgttatggaacattgcctgaaacacggtcttaaagtaagaaaatcatttttgagttacaacaaaaccatctggggccctttggaactggtggagaagctgtaccccgaagcagaggaaataggagctagtgtccgggatctacctggtctgaagacccctctgggtcgagcaagagcgtggcttcgattagccctcatgcaaaaaaaaatggccgattacttacgttgcttaattattcagagggatctcttgagtgagttttatgagtatcacgcactaatgatggaagaagaaggagcagtaattgttgggctgctggttggcctgaatgtgatcgatgctaatctgtgtgtgaagggagaggatttagactcacaagttggagtgattgatttttctatgtatttaaagaatgaagaagatattggaaataaagaaaggaatgttcaaattgctgccatattagaccaaaagaattatgttgaagaattaaatagacaactgaacagcacagtcagcagcctccattcaagagttgattcattagaaaagtcaaatactaagctgattgaagagttagcaatagcaaagaataacatcattaaactccaggaagaaaatcatcaattacgaagtgaaaataaattgattttaatgaaaacacagcagcacctagaggttaccaaagtagatgtggaaactgagcttcaaacatataagcattctcgtcaggggctagatgaaatgtacaatgaagccagaaggcagcttcgagatgaatctcagttacgacaggatgtagagaatgagctagcagtacaagttagtatgaagcatgagattgaacttgccatgaagttgctggagaaagatatccatgagaaacaagatactctgataggccttcgacaacaactagaggaagttaaagcaattaacatagagatgtatcaaaagttgcagggttctgaagatggcttgaaagaaaaaaatgaaataattgcccgactagaagaaaaaaccaataaaattactgcagccatgaggcagctggaacaaagattgcagcaagcagagaaggcgcaaatggaagctgaagatgaggatgagaaatatctacaagaatgtctcagtaaatctgatagtctgcagaaacaaatctcccaaaaggagaaacagctggtgcaactggaaactgacttgaagattgagaaggaatggaggcagactttgcaggaagatcttcaaaaggagaaagatgccttatctcatcttagaaatgagactcaacaaatcattagtcttaaaaaagagttccttaacctccaggatgaaaatcagcagttgaaaaaaatatatcatgaacaagagcaagctcttcaagaactcggcaacaagcttagcgagtaatttcttttttccttcaactaagtagtcattattgacttttataaaagattaaggatagagaggttaaggatagagggattaaggatagagagataagccatagagagc

SEQ ID NO: 282531 - DNA, 1535 bp, Homo sapiens
gagggctcgaggtgccacggcgtccaggagcgaggacagggccagctacaaaagaccccacagctgtagagagagcaaacttgttaaacatggctaaactgagtatcaaaggactcattgaatctgctctgagctttggccgcactttggattctgactatccccccttgcagcaattctttgttgttatggaacattgcctgaaacacggtcttaaagtaagaaaatcatttttgagttacaacaaaaccatctggggccctttggaactggtggagaagctgtaccccgaagcagaggaaataggagctagtgtccgggatctacctggtctgaagacccctctgggtcgagcaagagcgtggcttcgattagccctcatgcaaaaaaaaatggccgattacttacgttgcttaattattcagagggatctcttgagtgagttttatgagtatcacgcactaatgatggaagaagaaggagcagtaattgttgggctgctggttggcctgaatgtgatcgatgctaatctgtgtgtgaagggagaggatttagactcacaagttggagtgattgatttttctatgtatttaaagaatgaagaagatattggaaataaagaaaggaatgttcaaattgctgccatattagaccaaaagaattatgttgaagaattaaatagacaactgaacagcacagtcagcagcctccattcaagagttgattcattagaaaagtcaaatactaagctgattgaagagttagcaatagcaaagaataacatcattaaactccaggaagaaaatcatcaattacgaagtgaaaataaattgattttaatgaaaacacagcagcacctagaggttaccaaagtagatgtggaaactgagcttcaaacatataagcattctcgtcaggggctagatgaaatgtacaatgaagccagaaggcagcttcgagatgaatctcagttacgacaggatgtagagaatgagctagcagtacaagttagtatgaagcatgagattgaacttgccatgaagttgctggagaaagatatccatgagaaacaagatactctgataggccttcgacaacaactagaggaagttaaagcaattaacatagagatgtatcaaaagttgcagggttctgaagatggcttgaaagaaaaaaatgaaataattgcccgactagaagaaaaaaccaataaaattactgcagccatgaggcagctggaacaaaggtacagcatttccagtcttagtttctttttttcttttcttcttccctttttctttattcagttcctacacctgccacaaaaaccattaggaagacatagattaggacatgttttttgtttaagcccagcaggattttgcgtttttgctttggttgttgcatggaatcaagttgctttatattacgctgattcatttgaagttgtcatattgtagatttttcttagaggcctaatatcagcagtttcatgtcgttcagttacataaaacaaatacacaaataaaaatgtc

SEQ ID NO: 282532 - DNA, 331 bp, Homo sapiens
ctgaccccgcggtaagagccgggctgggcgcgggccgcgggggcgggagggccgggcagggtggagggcgagggccccccggggctcctgccctcgcagacgggcacccacgcggcctcccgcgcgccctcttggcaccagggctgtgccgaggtcaccgagtggactcgcagcggccggagcggagtcggggcggcgtgggggccaaggcacagctgggcgcggaggcggcgcgggcttttccctgggctagcgtgcgccgcggcgccttcaccagggcgggaaccgccgcctcctctagggctgctcgggctgccacccgcgcgcaccg

SEQ ID NO: 282533 - DNA, 956 bp, Homo sapiens
gcacgagacatagagtacatagaagagtgagctctgaaagaactctcacatggaccccagaaagaggagtactcaacgcctgctgcacagaaggcatcagcagttaagtactggctagaaaagcagagtccatcaaaggagaggaccacagtggtagctgcctgttacaagctattgaggcactccagagtgacggcatgtgatccccctgacacaagaaacaggcccagataacacaccgttcagaccgacagcagttctggttatgctgcagtacatcagaaaagtgctcttatccatccacagttcttatcacagttacttatgcatatattcattttttatataaaagaatcttgaatcggtcacttaaatattgaatctcaataataaaaaatactaaaagtatagctaaatgtgttattttattttgcatttgtcctacactcttcccctcacttttttaggacatgtaatcaagacatttgggaggttgttcaataccagaatgacagagcaccatcgaccatgctcagaccgtactaaccccttgacaattatcacagtctttcttggatggggactacagagtcctggaggaccaatgacatattttggggggtatgataattctctacaataacttttaaattttgtattttcactgcaataaactaaaacataaccaatattagtaatagtctgcatggtctgatgaccactttatgaccaatgacattttgacttatgatcacaatctaattaatgccaagaagtacaactttaattgtctcaagaatggacaaaacactgaagtatatgtgatatgagaattatgcttctctaagagataaagactaatttacattatgcaaaaaagaagagataggccggacacggcagctcacgcctgtaatcccagcactttgggagaccgaggcaggcagatcacctga

SEQ ID NO: 282534 - DNA, 960 bp, Homo sapiens
cttttcagaaagacaggcaacgtgttggaccttccgcagcttctcagaagacagagggttttcttttgaggctgttgtacagtggcctgattatagctcactgtagccttgaaattctgggcccaaatgatcctcctgcctcagcctccaaagtagctgggactacagttacaagctattgaggcactccagagtgacggcatgtgatccccctgacacaagaaacaggcccagataacacaccgttcagaccgacagcagttctggttatgctgcagtacatcagaaaagtgctcttatccatccacagttcttatcacagttacttatgcatatattcattttttatataaaagaatcttgaatcggtcacttaaatattgaatctcaataataaaaaatactaaaagtatagctaaatgtgttattttattttgcatttgtcctacactcttcccctcacttttttaggacatgtaatcaagacatttgggaggttgttcaataccagaatgacagagcaccatcgaccatgctcagaccgtactaaccccttgacaattatcacagtctttcttggatggggactacagagtcctggaggaccaatgacatattttggggggtatgataattctctacaataacttttaaattttgtattttcactgcaataaactaaaacataaccaatattagtaatagtctgcatggtctgatgaccactttatgaccaatgacattttgacttatgatcacaatctaattaatgccaagaagtacaactttaattgtctcaagaatggacaaaacactgaagtatatgtgatatgagaattatgcttctctaagagataaagactaatttacattatgcaaaaaagaagagataggccggacacggcagctcacgcctgtaatcccagcactttgggagaccgaggcaggcagatcacctga

SEQ ID NO: 282535 - DNA, 449 bp, Homo sapiens
ccgggagtggtggcacatgcctgtaatcccagctactcgggaagctgaggcaggagatttgcttgaacccaggaggtagaggttgcaatgagctgagattgtgccactgcactccagcctgggcaacagagcaagactctgcctctaaataaataaacaggtaagtaaactactctttctataccttctctttctagttacaagctattgaggcactccagagtgacggcatgtgatccccctgacacaagaaacaggcccagataacacaccgttcagaccgacagcagttctggttatgctgcagtacatcagaaaagtgctcttatccatccacagttcttatcacagttacttatgcatatattcattttttatataaaagaatcttgaatcggtcacttaaatattgaatctcaataataaaaaatactaaaagtatagctaaa

SEQ ID NO: 282536 - DNA, 4714 bp, Homo sapiens
gctggcggcggccgcccagggccggggccgcgcgcccagcctgagcccgccccgccgccgagcgtcaccgaacctgcttgaaatgcagccgaggagccggggcgggcggcagcggcggcggcggcggcggcgggggcagcggcaaccccggcgccgcggcaaggactcggagggctgagacgcggcggcggcggcgcggggagcgcggggcgcggcggccggagcccgggcccgccatgggcctccccgagccgggccctctccggcttctggcgctgctgctgctgctgctgctgctgctgctgctgcggctccagcatcttgcggcggcagcggctgatccgctgctcggcggccaagggccggccaaggagtgcgaaaaggaccaattccagtgccggaacgagcgctgcatcccctctgtgtggagatgcgacgaggacgatgactgcttagaccacagcgacgaggacgactgccccaagaagacctgtgcagacagtgacttcacctgtgacaacggccactgcatccacgaacggtggaagtgtgacggcgaggaggagtgtcctgatggctccgatgagtccgaggccacttgcaccaagcaggtgtgtcctgcagagaagctgagctgtggacccaccagccacaagtgtgtacctgcctcgtggcgctgcgacggggagaaggactgcgagggtggagcggatgaggccggctgtgctaccttgtgcgccccgcacgagttccagtgcggcaaccgctcgtgcctggccgccgtgttcgtgtgcgacggcgatgacgactgtggtgacggcagcgatgagcgcggctgtgcagacccggcctgcgggccccgcgagttccgctgcggcggcgatggcggcggcgcctgcatcccggagcgctgggtctgcgaccgccagtttgactgcgaggaccgctcggacgaggcagccgagctctgcggccgcccgggccccggggccacgtccgcgcccgccgcctgcgccaccgtctcccagttcgcctgccgcagcggcgagtgcgtgcacctgggctggcgctgcgacggcgaccgcgactgcaaagacaaatcggacgaggccgactgcccactgggcacctgccgtggggacgagttccagtgtggggatgggacatgtgtccttgcaatcaagcactgcaaccaggagcaggactgtccagatgggagtgatgaagctggctgcctacaggggctgaacgagtgtctgcacaacaatggcggctgctcacacatctgcactgacctcaagattggctttgaatgcacgtgcccagcaggcttccagctcctggaccagaagacctgtggcgacattgatgagtgcaaggacccagatgcctgcagccagatctgtgtcaattacaagggctattttaagtgtgagtgctaccctggctacgagatggacctactgaccaagaactgcaaggctgctgctggcaagagcccatccctaatcttcaccaaccggcacgaggtgcggaggatcgacctggtgaagcggaactattcacgcctcatccccatgctcaagaatgtcgtggcactagatgtggaagttgccaccaatcgcatctactggtgtgacctctcctaccgtaagatctatagcgcctacatggacaaggccagtgacccgaaagagcaggaggtcctcattgacgagcagttgcactctccagagggcctggcagtggactgggtccacaagcacatctactggactgactcgggcaataagaccatctcagtggccacagttgatggtggccgccgacgcactctcttcagccgtaacctcagtgaaccccgggccatcgctgttgaccccctgcgagggttcatgtattggtctgactggggggaccaggccaagattgagaaatctgggctcaacggtgtggaccggcaaacactggtgtcagacaatattgaatggcccaacggaatcaccctggatctgctgagccagcgcttgtactgggtagactccaagctacaccaactgtccagcattgacttcagtggaggcaacagaaagacgctgatctcctccactgacttcctgagccacccttttgggatagctgtgtttgaggacaaggtgttctggacagacctggagaacgaggccattttcagtgcaaatcggctcaatggcctggaaatctccatcctggctgagaacctcaacaacccacatgacattgtcatcttccatgagctgaagcagccaagagctccagatgcctgtgagctgagtgtccagcctaatggaggctgtgaatacctgtgccttcctgctcctcagatctccagccactctcccaagtacacatgtgcctgtcctgacacaatgtggctgggtccagacatgaagaggtgctaccgagcacctcaatctacctcaactacgacgttagcttctaccatgacgaggacagtacctgccaccacaagagcccccgggaccaccgtccacagatccacctaccagaaccacagcacagagacaccaagcctgacagctgcagtcccaagctcagttagtgtccccagggctcccagcatcagcccgtctaccctaagccctgcaaccagcaaccactcccagcactatgcaaatgaagacagtaagatgggctcaacagtcactgccgctgttatcgggatcatcgtgcccatagtggtgatagccctcctgtgcatgagtggatacctgatctggagaaactggaagcggaagaacaccaaaagcatgaattttgacaacccagtctacaggaaaacaacagaagaagaagatgaagatgagctccatatagggagaactgctcagattggccatgtctatcctgcagcaatcagcagctttgatcgcccactgtgggcagagccctgtcttggggagaccagagaaccggaagacccagcccctgccctcaaggagctttttgtcttgccgggggaaccaaggtcacagctgcaccaactcccgaagaaccctctttccgagctgcctgtcgtcaaatccaagcgagtggcattaagccttgaagatgatggactaccctgaggatgggatcacccccttcgtgcctcatggaattcagtcccatgcactacactctggatggtgtatgactggatgaatgggtttctatatatgggtctgtgtgagtgtatgtgtgtgtgtgattttttttttaaatttatgttgcggaaaggtaaccacaaagttatgatgaactgcaaacatccaaaggatgtgagagtttttctatgtataatgttttatacactttttaactggttgcactacccatgaggaattcgtggaatggctactgctgactaacatgatgcacataaccaaatgggggccaatggcacagtaccttactcatcatttaaaaactatatttacagaagatgtttggttgctgggggggcttttttaggttttggggcatttgttttttgtaaataagatgattatgctttgtggctatccatcaacataagtaaaaaaaaaaaaaaaacacttcaactccctcccccatttagattatttattaacatattttaaaaatcagatgagttctataaataatttagagaagtgagagtatttatttttggcatgtttggcccaccacacagactctgtgtgtgtatgtgtgtgtttatatgtgtatgtgtgtgacagaaaaatctgtagagaagaggcacatctatggctactgttcaaatacataaagataaatttattttcacacagtccacaaggggtatatcttgtagttttcagaaaagcctttggaaatctggatcagaaaatagataccatggtttgtgcaattatgtagtaaaaaaggcaaatcttttcacctctggctattcctgagaccccaggaagtcaggaaaagcctttcagctcacccatggctgctgtgactcctaccagggctttcttggctttggcgaaggtcagtgtacagacattccatggtaccagagtgctcagaaactcaagataggatatgcctcaccctcagctactccttgttttaaagttcagctctttgagtaacttcttcaatttctttcaggacacttgggttgaattcagtaagtttcctctgaagcaccctgaagggtgccatccttacagagctaagtggagacgtttccagatcagcccaagtttactatagagactggcccaggcactgaatgtctaggacatgctgtggatgaagataaagatggtggaataggttttatcacatctcttatttctcttttccccttactctctaccatttcctttatgtggggaaacattttaaggtaataaataggttacttaccatcatatgttcatatagatgaaactaatttttggcttaagtcagaacaactggccaaaattgaagtcatatttgaggggggaaatggcatacgcaatattatattatattggatatttatgttcacacaggaatttggtttactgctttgtaaataaaaggaaaaactccgggtatatgtatagatgttcttcattatagacatcttctttgcttttcttggccttgggggaggaagggagaagtgctcttttctacttgtggggtctcccattggaaacataatcct

SEQ ID NO: 282537 - DNA, 4204 bp, Homo sapiens
gctggcggcggccgcccagggccggggccgcgcgcccagcctgagcccgccccgccgccgagcgtcaccgaacctgcttgaaatgcagccgaggagccggggcgggcggcagcggcggcggcggcggcggcgggggcagcggcaaccccggcgccgcggcaaggactcggagggctgagacgcggcggcggcggcgcggggagcgcggggcgcggcggccggagcccgggcccgccatgggcctccccgagccgggccctctccggcttctggcgctgctgctgctgctgctgctgctgctgctgctgcggctccagcatcttgcggcggcagcggctgatccgctgctcggcggccaagggccggccaaggagtgcgaaaaggaccaattccagtgccggaacgagcgctgcatcccctctgtgtggagatgcgacgaggacgatgactgcttagaccacagcgacgaggacgactgccccaagaagacctgtgcagacagtgacttcacctgtgacaacggccactgcatccacgaacggtggaagtgtgacggcgaggaggagtgtcctgatggctccgatgagtccgaggccacttgcaccaagcaggtgtgtcctgcagagaagctgagctgtggacccaccagccacaagtgtgtacctgcctcgtggcgctgcgacggggagaaggactgcgagggtggagcggatgaggccggctgtgctacctggctgaacgagtgtctgcacaacaatggcggctgctcacacatctgcactgacctcaagattggctttgaatgcacgtgcccagcaggcttccagctcctggaccagaagacctgtggcgacattgatgagtgcaaggacccagatgcctgcagccagatctgtgtcaattacaagggctattttaagtgtgagtgctaccctggctacgagatggacctactgaccaagaactgcaaggctgctgctggcaagagcccatccctaatcttcaccaaccggcacgaggtgcggaggatcgacctggtgaagcggaactattcacgcctcatccccatgctcaagaatgtcgtggcactagatgtggaagttgccaccaatcgcatctactggtgtgacctctcctaccgtaagatctatagcgcctacatggacaaggccagtgacccgaaagagcaggaggtcctcattgacgagcagttgcactctccagagggcctggcagtggactgggtccacaagcacatctactggactgactcgggcaataagaccatctcagtggccacagttgatggtggccgccgacgcactctcttcagccgtaacctcagtgaaccccgggccatcgctgttgaccccctgcgagggttcatgtattggtctgactggggggaccaggccaagattgagaaatctgggctcaacggtgtggaccggcaaacactggtgtcagacaatattgaatggcccaacggaatcaccctggatctgctgagccagcgcttgtactgggtagactccaagctacaccaactgtccagcattgacttcagtggaggcaacagaaagacgctgatctcctccactgacttcctgagccacccttttgggatagctgtgtttgaggacaaggtgttctggacagacctggagaacgaggccattttcagtgcaaatcggctcaatggcctggaaatctccatcctggctgagaacctcaacaacccacatgacattgtcatcttccatgagctgaagcagccaagagctccagatgcctgtgagctgagtgtccagcctaatggaggctgtgaatacctgtgccttcctgctcctcagatctccagccactctcccaagtacacatgtgcctgtcctgacacaatgtggctgggtccagacatgaagaggtgctaccgagcacctcaatctacctcaactacgacgttagcttctaccatgacgaggacagtacctgccaccacaagagcccccgggaccaccgtccacagatccacctaccagaaccacagcacagagacaccaagcctgacagctgcagtcccaagctcagttagtgtccccagggctcccagcatcagcccgtctaccctaagccctgcaaccagcaaccactcccagcactatgcaaatgaagacagtaagatgggctcaacagtcactgccgctgttatcgggatcatcgtgcccatagtggtgatagccctcctgtgcatgagtggatacctgatctggagaaactggaagcggaagaacaccaaaagcatgaattttgacaacccagtctacaggaaaacaacagaagaagaagatgaagatgagctccatatagggagaactgctcagattggccatgtctatcctgcagcaatcagcagctttgatcgcccactgtgggcagagccctgtcttggggagaccagagaaccggaagacccagcccctgccctcaaggagctttttgtcttgccgggggaaccaaggtcacagctgcaccaactcccgaagaaccctctttccgagctgcctgtcgtcaaatccaagcgagtggcattaagccttgaagatgatggactaccctgaggatgggatcacccccttcgtgcctcatggaattcagtcccatgcactacactctggatggtgtatgactggatgaatgggtttctatatatgggtctgtgtgagtgtatgtgtgtgtgtgattttttttttaaatttatgttgcggaaaggtaaccacaaagttatgatgaactgcaaacatccaaaggatgtgagagtttttctatgtataatgttttatacactttttaactggttgcactacccatgaggaattcgtggaatggctactgctgactaacatgatgcacataaccaaatgggggccaatggcacagtaccttactcatcatttaaaaactatatttacagaagatgtttggttgctgggggggcttttttaggttttggggcatttgttttttgtaaataagatgattatgctttgtggctatccatcaacataagtaaaaaaaaaaaaaaaacacttcaactccctcccccatttagattatttattaacatattttaaaaatcagatgagttctataaataatttagagaagtgagagtatttatttttggcatgtttggcccaccacacagactctgtgtgtgtatgtgtgtgtttatatgtgtatgtgtgtgacagaaaaatctgtagagaagaggcacatctatggctactgttcaaatacataaagataaatttattttcacacagtccacaaggggtatatcttgtagttttcagaaaagcctttggaaatctggatcagaaaatagataccatggtttgtgcaattatgtagtaaaaaaggcaaatcttttcacctctggctattcctgagaccccaggaagtcaggaaaagcctttcagctcacccatggctgctgtgactcctaccagggctttcttggctttggcgaaggtcagtgtacagacattccatggtaccagagtgctcagaaactcaagataggatatgcctcaccctcagctactccttgttttaaagttcagctctttgagtaacttcttcaatttctttcaggacacttgggttgaattcagtaagtttcctctgaagcaccctgaagggtgccatccttacagagctaagtggagacgtttccagatcagcccaagtttactatagagactggcccaggcactgaatgtctaggacatgctgtggatgaagataaagatggtggaataggttttatcacatctcttatttctcttttccccttactctctaccatttcctttatgtggggaaacattttaaggtaataaataggttacttaccatcatatgttcatatagatgaaactaatttttggcttaagtcagaacaactggccaaaattgaagtcatatttgaggggggaaatggcatacgcaatattatattatattggatatttatgttcacacaggaatttggtttactgctttgtaaataaaaggaaaaactccgggtatatgtatagatgttcttcattatagacatcttctttgcttttcttggccttgggggaggaagggagaagtgctcttttctacttgtggggtctcccattggaaacataatcct

SEQ ID NO: 282538 - DNA, 601 bp, Homo sapiens
cccccgccccctctttttgttaaagactgggtgtgtaatcaactacttattttcttgcagacggtgtgttaatctaattattttctttgtccacactgaggttccctcctacagaggaaggtgattttctcgatcccccccattttttattggagacgcgccccgcactatatttttgagaatctctgtgtgtataagaagataaagatggtggaataggttttatcacatctcttatttctcttttccccttactctctaccatttcctttatgtggggaaacattttaaggtaataaataggttacttaccatcatatgttcatatagatgaaactaatttttggcttaagtcagaacaactggccaaaattgaagtcatatttgaggggggaaatggcatacgcaatattatattatattggatatttatgttcacacaggaatttggtttactgctttgtaaataaaaggaaaaactccgggtatatgtatagatgttcttcattatagacatcttctttgcttttcttggccttgggggaggaagggagaagtgctcttttctacttgtggggtctcccattggaaacataatcct

SEQ ID NO: 282539 - DNA, 3811 bp, Homo sapiens
gctggcggcggccgcccagggccggggccgcgcgcccagcctgagcccgccccgccgccgagcgtcaccgaacctgcttgaaatgcagccgaggagccggggcgggcggcagcggcggcggcggcggcggcgggggcagcggcaaccccggcgccgcggcaaggactcggagggctgagacgcggcggcggcggcgcggggagcgcggggcgcggcggccggagcccgggcccgccatgggcctccccgagccgggccctctccggcttctggcgctgctgctgctgctgctgctgctgctgctgctgcggctccagcatcttgcggcggcagcggctgatccgctgctcggcggccaagggccggccaaggagtgcgaaaaggaccaattccagtgccggaacgagcgctgcatcccctctgtgtggagatgcgacgaggacgatgactgcttagaccacagcgacgaggacgactgccccaagaagacctgtgcagacagtgacttcacctgtgacaacggccactgcatccacgaacggtggaagtgtgacggcgaggaggagtgtcctgatggctccgatgagtccgaggccacttgcaccaagcaggtgtgtcctgcagagaagctgagctgtggacccaccagccacaagtgtgtacctgcctcgtggcgctgcgacggggagaaggactgcgagggtggagcggatgaggccggctgtgctacctcactgggcacctgccgtggggacgagttccagtgtggggatgggacatgtgtccttgcaatcaagcactgcaaccaggagcaggactgtccagatgggagtgatgaagctggctgcctacaggggctgaacgagtgtctgcacaacaatggcggctgctcacacatctgcactgacctcaagattggctttgaatgcacgtgcccagcaggcttccagctcctggaccagaagacctgtggcgacattgatgagtgcaaggacccagatgcctgcagccagatctgtgtcaattacaagggctattttaagtgtgagtgctaccctggctacgagatggacctactgaccaagaactgcaaggctgctgctggcaagagcccatccctaatcttcaccaaccggcacgaggtgcggaggatcgacctggtgaagcggaactattcacgcctcatccccatgctcaagaatgtcgtggcactagatgtggaagttgccaccaatcgcatctactggtgtgacctctcctaccgtaagatctatagcgcctacatggacaaggccagtgacccgaaagagcaggaggtcctcattgacgagcagttgcactctccagagggcctggcagtggactgggtccacaagcacatctactggactgactcgggcaataagaccatctcagtggccacagttgatggtggccgccgacgcactctcttcagccgtaacctcagtgaaccccgggccatcgctgttgaccccctgcgagggttcatgtattggtctgactggggggaccaggccaagattgagaaatctgggctcaacggtgtggaccggcaaacactggtgtcagacaatattgaatggcccaacggaatcaccctggatctgctgagccagcgcttgtactgggtagactccaagctacaccaactgtccagcattgacttcagtggaggcaacagaaagacgctgatctcctccactgacttcctgagccacccttttgggatagctgtgtttgaggacaaggtgttctggacagacctggagaacgaggccattttcagtgcaaatcggctcaatggcctggaaatctccatcctggctgagaacctcaacaacccacatgacattgtcatcttccatgagctgaagcagccaagagctccagatgcctgtgagctgagtgtccagcctaatggaggctgtgaatacctgtgccttcctgctcctcagatctccagccactctcccaagtacacatgtgcctgtcctgacacaatgtggctgggtccagacatgaagaggtgctaccgagatgcaaatgaagacagtaagatgggctcaacagtcactgccgctgttatcgggatcatcgtgcccatagtggtgatagccctcctgtgcatgagtggatacctgatctggagaaactggaagcggaagaacaccaaaagcatgaattttgacaacccagtctacaggaaaacaacagaagaagaagatgaagatgagctccatatagggagaactgctcagattggccatgtctatcctgcacgagtggcattaagccttgaagatgatggactaccctgaggatgggatcacccccttcgtgcctcatggaattcagtcccatgcactacactctggatggtgtatgactggatgaatgggtttctatatatgggtctgtgtgagtgtatgtgtgtgtgtgattttttttttaaatttatgttgcggaaaggtaaccacaaagttatgatgaactgcaaacatccaaaggatgtgagagtttttctatgtataatgttttatacactttttaactggttgcactacccatgaggaattcgtggaatggctactgctgactaacatgatgcacataaccaaatgggggccaatggcacagtaccttactcatcatttaaaaactatatttacagaagatgtttggttgctgggggggcttttttaggttttggggcatttgttttttgtaaataagatgattatgctttgtggctatccatcaacataagtaaaaaaaaaaaaaaaacacttcaactccctcccccatttagattatttattaacatattttaaaaatcagatgagttctataaataatttagagaagtgagagtatttatttttggcatgtttggcccaccacacagactctgtgtgtgtatgtgtgtgtttatatgtgtatgtgtgtgacagaaaaatctgtagagaagaggcacatctatggctactgttcaaatacataaagataaatttattttcacacagtccacaaggggtatatcttgtagttttcagaaaagcctttggaaatctggatcagaaaatagataccatggtttgtgcaattatgtagtaaaaaaggcaaatcttttcacctctggctattcctgagaccccaggaagtcaggaaaagcctttcagctcacccatggctgctgtgactcctaccagggctttcttggctttggcgaaggtcagtgtacagacattccatggtaccagagtgctcagaaactcaagataggatatgcctcaccctcagctactccttgttttaaagttcagctctttgagtaacttcttcaatttctttcaggacacttgggttgaattcagtaagtttcctctgaagcaccctgaagggtgccatccttacagagctaagtggagacgtttccagatcagcccaagtttactatagagactggcccaggcactgaatgtctaggacatgctgtggatgaagataaagatggtggaataggttttatcacatctcttatttctcttttccccttactctctaccatttcctttatgtggggaaacattttaaggtaataaataggttacttaccatcatatgttcatatagatgaaactaatttttggcttaagtcagaacaactggccaaaattgaagtcatatttgaggggggaaatggcatacgcaatattatattatattggatatttatgttcacacaggaatttggtttactgctttgtaaataaaaggaaaaactccgggt

SEQ ID NO: 282540 - DNA, 4481 bp, Homo sapiens
gctggcggcggccgcccagggccggggccgcgcgcccagcctgagcccgccccgccgccgagcgtcaccgaacctgcttgaaatgcagccgaggagccggggcgggcggcagcggcggcggcggcggcggcgggggcagcggcaaccccggcgccgcggcaaggactcggagggctgagacgcggcggcggcggcgcggggagcgcggggcgcggcggccggagcccgggcccgccatgggcctccccgagccgggccctctccggcttctggcgctgctgctgctgctgctgctgctgctgctgctgcggctccagcatcttgcggcggcagcggctgatccgctgctcggcggccaagggccggccaaggagtgcgaaaaggaccaattccagtgccggaacgagcgctgcatcccctctgtgtggagatgcgacgaggacgatgactgcttagaccacagcgacgaggacgactgccccaagaagacctgtgcagacagtgacttcacctgtgacaacggccactgcatccacgaacggtggaagtgtgacggcgaggaggagtgtcctgatggctccgatgagtccgaggccacttgcaccaagcaggtgtgtcctgcagagaagctgagctgtggacccaccagccacaagtgtgtacctgcctcgtggcgctgcgacggggagaaggactgcgagggtggagcggatgaggccggctgtgctaccttgtgcgccccgcacgagttccagtgcggcaaccgctcgtgcctggccgccgtgttcgtgtgcgacggcgatgacgactgtggtgacggcagcgatgagcgcggctgtgcagacccggcctgcgggccccgcgagttccgctgcggcggcgatggcggcggcgcctgcatcccggagcgctgggtctgcgaccgccagtttgactgcgaggaccgctcggacgaggcagccgagctctgcggccgcccgggccccggggccacgtccgcgcccgccgcctgcgccaccgtctcccagttcgcctgccgcagcggcgagtgcgtgcacctgggctggcgctgcgacggcgaccgcgactgcaaagacaaatcggacgaggccgactgcccactgggcacctgccgtggggacgagttccagtgtggggatgggacatgtgtccttgcaatcaagcactgcaaccaggagcaggactgtccagatgggagtgatgaagctggctgcctacaggggctgaacgagtgtctgcacaacaatggcggctgctcacacatctgcactgacctcaagattggctttgaatgcacgtgcccagcaggcttccagctcctggaccagaagacctgtggcgacattgatgagtgcaaggacccagatgcctgcagccagatctgtgtcaattacaagggctattttaagtgtgagtgctaccctggctacgagatggacctactgaccaagaactgcaaggctgctgctggcaagagcccatccctaatcttcaccaaccggcacgaggtgcggaggatcgacctggtgaagcggaactattcacgcctcatccccatgctcaagaatgtcgtggcactagatgtggaagttgccaccaatcgcatctactggtgtgacctctcctaccgtaagatctatagcgcctacatggacaaggccagtgacccgaaagagcaggaggtcctcattgacgagcagttgcactctccagagggcctggcagtggactgggtccacaagcacatctactggactgactcgggcaataagaccatctcagtggccacagttgatggtggccgccgacgcactctcttcagccgtaacctcagtgaaccccgggccatcgctgttgaccccctgcgaggatctgctgagccagcgcttgtactgggtagactccaagctacaccaactgtccagcattgacttcagtggaggcaacagaaagacgctgatctcctccactgacttcctgagccacccttttgggatagctgtgtttgaggacaaggtgttctggacagacctggagaacgaggccattttcagtgcaaatcggctcaatggcctggaaatctccatcctggctgagaacctcaacaacccacatgacattgtcatcttccatgagctgaagcagccaagagctccagatgcctgtgagctgagtgtccagcctaatggaggctgtgaatacctgtgccttcctgctcctcagatctccagccactctcccaagtacacatgtgcctgtcctgacacaatgtggctgggtccagacatgaagaggtgctaccgagcacctcaatctacctcaactacgacgttagcttctaccatgacgaggacagtacctgccaccacaagagcccccgggaccaccgtccacagatccacctaccagaaccacagcacagagacaccaagcctgacagctgcagtcccaagctcagttagtgtccccagggctcccagcatcagcccgtctaccctaagccctgcaaccagcaaccactcccagcactatgcaaatgaagacagtaagatgggctcaacagtcactgccgctgttatcgggatcatcgtgcccatagtggtgatagccctcctgtgcatgagtggatacctgatctggagaaactggaagcggaagaacaccaaaagcatgaattttgacaacccagtctacaggaaaacaacagaagaagaagatgaagatgagctccatatagggagaactgctcagattggccatgtctatcctgcagcaatcagcagctttgatcgcccactgtgggcagagccctgtcttggggagaccagagaaccggaagacccagcccctgccctcaaggagctttttgtcttgccgggggaaccaaggtcacagctgcaccaactcccgaagaaccctctttccgagctgcctgtcgtcaaatccaagcgagtggcattaagccttgaagatgatggactaccctgaggatgggatcacccccttcgtgcctcatggaattcagtcccatgcactacactctggatggtgtatgactggatgaatgggtttctatatatgggtctgtgtgagtgtatgtgtgtgtgtgattttttttttaaatttatgttgcggaaaggtaaccacaaagttatgatgaactgcaaacatccaaaggatgtgagagtttttctatgtataatgttttatacactttttaactggttgcactacccatgaggaattcgtggaatggctactgctgactaacatgatgcacataaccaaatgggggccaatggcacagtaccttactcatcatttaaaaactatatttacagaagatgtttggttgctgggggggcttttttaggttttggggcatttgttttttgtaaataagatgattatgctttgtggctatccatcaacataagtaaaaaaaaaaaaaaaacacttcaactccctcccccatttagattatttattaacatattttaaaaatcagatgagttctataaataatttagagaagtgagagtatttatttttggcatgtttggcccaccacacagactctgtgtgtgtatgtgtgtgtttatatgtgtatgtgtgtgacagaaaaatctgtagagaagaggcacatctatggctactgttcaaatacataaagataaatttattttcacacagtccacaaggggtatatcttgtagttttcagaaaagcctttggaaatctggatcagaaaatagataccatggtttgtgcaattatgtagtaaaaaaggcaaatcttttcacctctggctattcctgagaccccaggaagtcaggaaaagcctttcagctcacccatggctgctgtgactcctaccagggctttcttggctttggcgaaggtcagtgtacagacattccatggtaccagagtgctcagaaactcaagataggatatgcctcaccctcagctactccttgttttaaagttcagctctttgagtaacttcttcaatttctttcaggacacttgggttgaattcagtaagtttcctctgaagcaccctgaagggtgccatccttacagagctaagtggagacgtttccagatcagcccaagtttactatagagactggcccaggcactgaatgtctaggacatgctgtggatgaagataaagatggtggaataggttttatcacatctcttatttctcttttccccttactctctaccatttcctttatgtggggaaacattttaaggtaataaataggttacttaccatcatatgttcatatagatgaaactaatttttggcttaagtcagaacaactggccaaaattgaagtcatatttgaggggggaaatggcatacgcaatattatattatattggatatttatgttcacacaggaatttggtttactgctttgtaaataaaaggaaaaactccgggt

SEQ ID NO: 282541 - DNA, 4819 bp, Homo sapiens
gctggcggcggccgcccagggccggggccgcgcgcccagcctgagcccgccccgccgccgagcgtcaccgaacctgcttgaaatgcagccgaggagccggggcgggcggcagcggcggcggcggcggcggcgggggcagcggcaaccccggcgccgcggcaaggactcggagggctgagacgcggcggcggcggcgcggggagcgcggggcgcggcggccggagcccgggcccgccatgggcctccccgagccgggccctctccggcttctggcgctgctgctgctgctgctgctgctgctgctgctgcggctccagcatcttgcggcggcagcggctgatccgctgctcggcggccaagggccggccaaggagtgcgaaaaggaccaattccagtgccggaacgagcgctgcatcccctctgtgtggagatgcgacgaggacgatgactgcttagaccacagcgacgaggacgactgccccaagaagacctgtgcagacagtgacttcacctgtgacaacggccactgcatccacgaacggtggaagtgtgacggcgaggaggagtgtcctgatggctccgatgagtccgaggccacttgcaccaagcaggtgtgtcctgcagagaagctgagctgtggacccaccagccacaagtgtgtacctgcctcgtggcgctgcgacggggagaaggactgcgagggtggagcggatgaggccggctgtgctaccttgtgcgccccgcacgagttccagtgcggcaaccgctcgtgcctggccgccgtgttcgtgtgcgacggcgatgacgactgtggtgacggcagcgatgagcgcggctgtgcagacccggcctgcgggccccgcgagttccgctgcggcggcgatggcggcggcgcctgcatcccggagcgctgggtctgcgaccgccagtttgactgcgaggaccgctcggacgaggcagccgagctctgcggccgcccgggccccggggccacgtccgcgcccgccgcctgcgccaccgtctcccagttcgcctgccgcagcggcgagtgcgtgcacctgggctggcgctgcgacggcgaccgcgactgcaaagacaaatcggacgaggccgactgcccactgggcacctgccgtggggacgagttccagtgtggggatgggacatgtgtccttgcaatcaagcactgcaaccaggagcaggactgtccagatgggagtgatgaagctggctgcctacaggttccgccaacattcctgggaaacaggaggaggcccagggggctgaacgagtgtctgcacaacaatggcggctgctcacacatctgcactgacctcaagattggctttgaatgcacgtgcccagcaggcttccagctcctggaccagaagacctgtggcgacattgatgagtgcaaggacccagatgcctgcagccagatctgtgtcaattacaagggctattttaagtgtgagtgctaccctggctacgagatggacctactgaccaagaactgcaaggctgctgctggcaagagcccatccctaatcttcaccaaccggcacgaggtgcggaggatcgacctggtgaagcggaactattcacgcctcatccccatgctcaagaatgtcgtggcactagatgtggaagttgccaccaatcgcatctactggtgtgacctctcctaccgtaagatctatagcgcctacatggacaaggccagtgacccgaaagagcaggaggtcctcattgacgagcagttgcactctccagagggcctggcagtggactgggtccacaagcacatctactggactgactcgggcaataagaccatctcagtggccacagttgatggtggccgccgacgcactctcttcagccgtaacctcagtgaaccccgggccatcgctgttgaccccctgcgagggttcatgtattggtctgactggggggaccaggccaagattgagaaatctgggctcaacggtgtggaccggcaaacactggtgtcagacaatattgaatggcccaacggaatcaccctggatctgctgagccagcgcttgtactgggtagactccaagctacaccaactgtccagcattgacttcagtggaggcaacagaaagacgctgatctcctccactgacttcctgagccacccttttgggatagctgtgtttgaggacaaggtgttctggacagacctggagaacgaggccattttcagtgcaaatcggctcaatggcctggaaatctccatcctggctgagaacctcaacaacccacatgacattgtcatcttccatgagctgaagcagccaagagctccagatgcctgtgagctgagtgtccagcctaatggaggctgtgaatacctgtgccttcctgctcctcagatctccagccactctcccaagtacacatgtgcctgtcctgacacaatgtggctgggtccagacatgaagaggtgctaccgagtttcagggagtttctggaacgctttaaaaacctcaagttaagaacccttaatcgccgtggcttcagcacctcaatctacctcaactacgacgttagcttctaccatgacgaggacagtacctgccaccacaagagcccccgggaccaccgtccacagatccacctaccagaaccacagcacagagacaccaagcctgacagctgcagtcccaagctcagttagtgtccccagggctcccagcatcagcccgtctaccctaagccctgcaaccagcaaccactcccagcactatgcaaatgaagacagtaagatgggctcaacagtcactgccgctgttatcgggatcatcgtgcccatagtggtgatagccctcctgtgcatgagtggatacctgatctggagaaactggaagcggaagaacaccaaaagcatgaattttgacaacccagtctacaggaaaacaacagaagaagaagatgaagatgagctccatatagggagaactgctcagattggccatgtctatcctgcagcaatcagcagctttgatcgcccactgtgggcagagccctgtcttggggagaccagagaaccggaagacccagcccctgccctcaaggagctttttgtcttgccgggggaaccaaggtcacagctgcaccaactcccgaagaaccctctttccgagctgcctgtcgtcaaatccaagcgagtggcattaagccttgaagatgatggactaccctgaggatgggatcacccccttcgtgcctcatggaattcagtcccatgcactacactctggatggtgtatgactggatgaatgggtttctatatatgggtctgtgtgagtgtatgtgtgtgtgtgattttttttttaaatttatgttgcggaaaggtaaccacaaagttatgatgaactgcaaacatccaaaggatgtgagagtttttctatgtataatgttttatacactttttaactggttgcactacccatgaggaattcgtggaatggctactgctgactaacatgatgcacataaccaaatgggggccaatggcacagtaccttactcatcatttaaaaactatatttacagaagatgtttggttgctgggggggcttttttaggttttggggcatttgttttttgtaaataagatgattatgctttgtggctatccatcaacataagtaaaaaaaaaaaaaaaacacttcaactccctcccccatttagattatttattaacatattttaaaaatcagatgagttctataaataatttagagaagtgagagtatttatttttggcatgtttggcccaccacacagactctgtgtgtgtatgtgtgtgtttatatgtgtatgtgtgtgacagaaaaatctgtagagaagaggcacatctatggctactgttcaaatacataaagataaatttattttcacacagtccacaaggggtatatcttgtagttttcagaaaagcctttggaaatctggatcagaaaatagataccatggtttgtgcaattatgtagtaaaaaaggcaaatcttttcacctctggctattcctgagaccccaggaagtcaggaaaagcctttcagctcacccatggctgctgtgactcctaccagggctttcttggctttggcgaaggtcagtgtacagacattccatggtaccagagtgctcagaaactcaagataggatatgcctcaccctcagctactccttgttttaaagttcagctctttgagtaacttcttcaatttctttcaggacacttgggttgaattcagtaagtttcctctgaagcaccctgaagggtgccatccttacagagctaagtggagacgtttccagatcagcccaagtttactatagagactggcccaggcactgaatgtctaggacatgctgtggatgaagataaagatggtggaataggttttatcacatctcttatttctcttttccccttactctctaccatttcctttatgtggggaaacattttaaggtaataaataggttacttaccatcatatgttcatatagatgaaactaatttttggcttaagtcagaacaactggccaaaattgaagtcatatttgaggggggaaatggcatacgcaatattatattatattggatatttatgttcacacaggaatttggtttactgctttgtaaataaaaggaaaaactccgggtatatgtatagatgttcttcattatagacatcttctttgcttttcttggccttgggggaggaagggagaagtgctcttttctacttgtggggtctcccattggaaacataatcct

SEQ ID NO: 282542 - DNA, 2299 bp, Homo sapiens
ctgccttgaaagagctatctagttgggagtacagatacataaagtaagatactgtgtgtgatctgggagcacacatgagagagcaactgactctgcccacagttggggaagacttcacatttgaacaggatcttgaaggatgaatagttagtaaaggaaagaagggatgagagatgggctttcaaacagcagtaaaagaacatgcagaaacagagcctgaggagcaaagggtagtaaaagtggagtggtgacaagccttgtacagatgtctgagcagtgggttggagcctgctggaggtccagtgtcctgtgtccttcctccagtggtgatagccctcctgtgcatgagtggatacctgatctggagaaactggaagcggaagaacaccaaaagcatgaattttgacaacccagtctacaggaaaacaacagaagaagaagatgaagatgagctccatatagggagaactgctcagattggccatgtctatcctgcagcaatcagcagctttgatcgcccactgtgggcagagccctgtcttggggagaccagagaaccggaagacccagcccctgccctcaaggagctttttgtcttgccgggggaaccaaggtcacagctgcaccaactcccgaagaaccctctttccgagctgcctgtcgtcaaatccaagcgagtggcattaagccttgaagatgatggactaccctgaggatgggatcacccccttcgtgcctcatggaattcagtcccatgcactacactctggatggtgtatgactggatgaatgggtttctatatatgggtctgtgtgagtgtatgtgtgtgtgtgattttttttttaaatttatgttgcggaaaggtaaccacaaagttatgatgaactgcaaacatccaaaggatgtgagagtttttctatgtataatgttttatacactttttaactggttgcactacccatgaggaattcgtggaatggctactgctgactaacatgatgcacataaccaaatgggggccaatggcacagtaccttactcatcatttaaaaactatatttacagaagatgtttggttgctgggggggcttttttaggttttggggcatttgttttttgtaaataagatgattatgctttgtggctatccatcaacataagtaaaaaaaaaaaaaaaacacttcaactccctcccccatttagattatttattaacatattttaaaaatcagatgagttctataaataatttagagaagtgagagtatttatttttggcatgtttggcccaccacacagactctgtgtgtgtatgtgtgtgtttatatgtgtatgtgtgtgacagaaaaatctgtagagaagaggcacatctatggctactgttcaaatacataaagataaatttattttcacacagtccacaaggggtatatcttgtagttttcagaaaagcctttggaaatctggatcagaaaatagataccatggtttgtgcaattatgtagtaaaaaaggcaaatcttttcacctctggctattcctgagaccccaggaagtcaggaaaagcctttcagctcacccatggctgctgtgactcctaccagggctttcttggctttggcgaaggtcagtgtacagacattccatggtaccagagtgctcagaaactcaagataggatatgcctcaccctcagctactccttgttttaaagttcagctctttgagtaacttcttcaatttctttcaggacacttgggttgaattcagtaagtttcctctgaagcaccctgaagggtgccatccttacagagctaagtggagacgtttccagatcagcccaagtttactatagagactggcccaggcactgaatgtctaggacatgctgtggatgaagataaagatggtggaataggttttatcacatctcttatttctcttttccccttactctctaccatttcctttatgtggggaaacattttaaggtaataaataggttacttaccatcatatgttcatatagatgaaactaatttttggcttaagtcagaacaactggccaaaattgaagtcatatttgaggggggaaatggcatacgcaatattatattatattggatatttatgttcacacaggaatttggtttactgctttgtaaataaaaggaaaaactccgggtatatgtatagatgttcttcattatagacatcttctttgcttttcttggccttgggggaggaagggagaagtgctcttttctacttgtggggtctcccattggaaacataatcct

SEQ ID NO: 282543 - DNA, 4256 bp, Homo sapiens
  misc_feature (4044)..(4044): n is a, c, g, or t
gctggcggcggccgcccagggccggggccgcgcgcccagcctgagcccgccccgccgccgagcgtcaccgaacctgcttgaaatgcagccgaggagccggggcgggcggcagcggcggcggcggcggcggcgggggcagcggcaaccccggcgccgcggcaaggactcggagggctgagacgcggcggcggcggcgcggggagcgcggggcgcggcggccggagcccgggcccgccatgggcctccccgagccgggccctctccggcttctggcgctgctgctgctgctgctgctgctgctgctgctgcggctccagcatcttgcggcggcagcggctgatccgctgctcggcggccaagggccggccaaggagtgcgaaaaggaccaattccagtgccggaacgagcgctgcatcccctctgtgtggagatgcgacgaggacgatgactgcttagaccacagcgacgaggacgactgccccaagaagacctgtgcagacagtgacttcacctgtgacaacggccactgcatccacgaacggtggaagtgtgacggcgaggaggagtgtcctgatggctccgatgagtccgaggccacttgcaccaagcaggtgtgtcctgcagagaagctgagctgtggacccaccagccacaagtgtgtacctgcctcgtggcgctgcgacggggagaaggactgcgagggtggagcggatgaggccggctgtgctaccttgtgcgccccgcacgagttccagtgcggcaaccgctcgtgcctggccgccgtgttcgtgtgcgacggcgatgacgactgtggtgacggcagcgatgagcgcggctgtgcagacccggcctgcgggccccgcgagttccgctgcggcggcgatggcggcggcgcctgcatcccggagcgctgggtctgcgaccgccagtttgactgcgaggaccgctcggacgaggcagccgagctctgcggccgcccgggccccggggccacgtccgcgcccgccgcctgcgccaccgtctcccagttcgcctgccgcagcggcgagtgcgtgcacctgggctggcgctgcgacggcgaccgcgactgcaaagacaaatcggacgaggccgactgcccactgggcacctgccgtggggacgagttccagtgtggggatgggacatgtgtccttgcaatcaagcactgcaaccaggagcaggactgtccagatgggagtgatgaagctggctgcctacaggttccgccaacattcctgggaaacaggaggaggcccagggggctgaacgagtgtctgcacaacaatggcggctgctcacacatctgcactgacctcaagattggctttgaatgcacgtgcccagcaggcttccagctcctggaccagaagacctgtggcgacattgatgagtgcaaggacccagatgcctgcagccagatctgtgtcaattacaagggctattttaagtgtgagtgctaccctggctacgagatggacctactgaccaagaactgcaaggctgctgctggcaagagcccatccctaatcttcaccaaccggcacgaggtgcggaggatcgacctggtgaagcggaactattcacgcctcatccccatgctcaagaatgtcgtggcactagatgtggaagttgccaccaatcgcatctactggtgtgacctctcctaccgtaagatctatagcgcctacatggacaaggccagtgacccgaaagagcaggaggtcctcattgacgagcagttgcactctccagagggcctggcagtggactgggtccacaagcacatctactggactgactcgggcaataagaccatctcagtggccacagttgatggtggccgccgacgcactctcttcagccgtaacctcagtgaaccccgggccatcgctgttgaccccctgcgagggttcatgtattggtctgactggggggaccaggccaagattgagaaatctgggctcaacggtgtggaccggcaaacactggtgtcagacaatattgaatggcccaacggaatcaccctggatctgctgagccagcgcttgtactgggtagactccaagctacaccaactgtccagcattgacttcagtggaggcaacagaaagacgctgatctcctccactgacttcctgagccacccttttgggatagctgtgtttgaggacaaggtgttctggacagacctggagaacgaggccattttcagtgcaaatcggctcaatggcctggaaatctccatcctggctgagaacctcaacaacccacatgacattgtcatcttccatgagctgaagcagccaagagctccagatgcctgtgagctgagtgtccagcctaatggaggctgtgaatacctgtgccttcctgctcctcagatctccagccactctcccaagtacacatgtgcctgtcctgacacaatgtggctgggtccagacatgaagaggtgctaccgagtttcagggagtttctggaacgctttaaaaacctcaagttaagaacccttaatcgccgtggcttcaggtacatgcagataactatatatttgcctgtttctcacctagaacttaacaaacactacacagcagcccttttgcaatataattgggactaatagttaatacttcaaccgcatacacagattcatgtcctaatcttgatgtatagccaaggcctttcatttgagcctaagtctactgcattattaatgatttacaggttcaattgtttaaagtggaataagaatttcaatctattggtataacaatatatgagtgtaaaatccttctagatttatctgatttcccctccctacagtctttttattgctgatcttacaactaattccacagcagtgttttaatgactcatctttattgaatcaaagtgaagtgcttagcattcagctaaagaaaagatcatagcccactggggagattaggaaaggcttcacagaagtggcatttgagctacgccatgaagataagttcctaagtatatctcagaggcaataccttaggcaacaaaattatctgtccaagtgacctccatggtatttcccctccagcacctcaatctacctcaactacgacgttagcttctaccatgacgaggacagtacctgccaccacaagagcccccgggaccaccgtccacagatccacctaccagaaccacagcacagagacaccaagcctgacagctgcagtcccaagctcagttagtgtccccagggctcccagcatcagcccgtctaccctaagccctgcaaccagcaaccactcccagcactatgcaaatgaagacagtaagatgggctcaacagtcactgccgctgttatcgggatcatcgtgcccatagagacaagaagatcttgcactcttgcccaggctggagtgcagtggtgcgatcacagttcactgcatcctcgaactcctgggctcaagggattctcctgcctcagcatcccgagtagctgggactacaggcatgcaccaccacacctggctaattttttaaattaatttttttgtaaagaccagggctcaccatcttgcccgggctggtcttgaactccagggttcaagcaatcctcctgcctcagcctcccaaaatgttggtattacatatgtgagccactgtgcctggcctccgttaaattttctaattggttgttgctgattaaaaagacggctaatgatcttttatgttgattcttgattaactaaaattatttctgatagtttttcaccagcttctcttaagagtttctaaaaatacaaatagctgttaataacagtttggtttcctcctttctcatatgtatttatttatttacttttttttttttttttttgagacaaggtctcactctgttgcccagggctgggagtgcagtgggcatgattgtggctcactgcagccttgacctccccaggctcaagcaatcctcccacctcagccttctgagtagctgggactacaggtgcccgccaccatgcccaactactttgtanttttttgtagagatgggttttcgccatgttggccaggctggtctcgaactcctggcctcaagtaatctgcctgcctcagcctcccacagtgttgggattacaggcgtgagccaccgcacctgggctcctttcccatatttatacccttaaatttttttctggccttactgcatagctagatctctaagacaataaatattagctatgataac

SEQ ID NO: 282544 - DNA, 1853 bp, Homo sapiens
  misc_feature (1613)..(1613): n is a, c, g, or t
gctggcggcggccgcccagggccggggccgcgcgcccagcctgagcccgccccgccgccgagcgtcaccgaacctgcttgaaatgcagccgaggagccggggcgggcggcagcggcggcggcggcggcggcgggggcagcggcaaccccggcgccgcggcaaggactcggagggctgagacgcggcggcggcggcgcggggagcgcggggcgcggcggccggagcccgggcccgccatgggcctccccgagccgggccctctccggcttctggcgctgctgctgctgctgctgctgctgctgctgctgcggctccagcatcttgcggcggcagcggctgatccgctgctcggcggccaagggccggccaaggagtgcgaaaaggaccaattccagtgccggaacgagcgctgcatcccctctgtgtggagatgcgacgaggacgatgactgcttagaccacagcgacgaggacgactgccccaagaagacctgtgcagacagtgacttcacctgtgacaacggccactgcatccacgaacggtggaagtgtgacggcgaggaggagtgtcctgatggctccgatgagtccgaggccacttgcaccaagcaggtgtgtcctgcagagaagctgagctgtggacccaccagccacaagtgtgtacctgcctcgtggcgctgcgacggggagaaggactgcgagggtggagcggatgaggccggctgtgctaccttgtgcgccccgcacgagttccagtgcggcaaccgctcgtgcctggccgccgtgttcgtgtgcgacggcgatgacgactgtggtgacggcagcgatgagcgcggctgtgcagacccggcctgcgggccccgcgagttccgctgcggcggcgatggcggcggcgcctgcatcccggagcgctgggtctgcgaccgccagtttgactgcgaggaccgctcggacgaggcagccgagctctgcggccgcccgggccccggggccacgtccgcgcccgccgcctgcgccaccgtctcccagttcgcctgccgcagcggcgagtgcgtgcacctgggctggcgctgcgacggcgaccgcgactgcaaagacaaatcggacgaggccgactgcccactgggcacctgccgtggggacgagttccagtgtggggatgggacatgtgtccttgcaatcaagcactgcaaccaggagcaggactgtccagatgggagtgatgaagctggctgcctacaggggctgaacgagtgtctgcacaacaatggcggctgctcacacatctgcactgacctcaagattggctttgaatgcacgtgcccagcaggcttccagctcctggaccagaagacctgtggcggtgagaccttctcccacacccccaagcagaagcagatcctcctgctggttctgactcctgctcctccccacagtcttcgccgtgatggcgaaggactgtggcacagggatttgcgctgctgagatatttattacagcgcctgggacaaatgacaacttagtgtttttcacacctgtgacacgtgactcacctatatcctgctgtggagacgtgaagacaccatgatgacctatagaagcagaagacagggnattagagtcaaacagaagcaatgaaatgtacatttttcaacttgtttagagtgatatggcccagtgtgaacatgacgacaggatttggagagggagcgatatgttggcagaaaaggctgaccggcgggagttcattgacctgttgaagaagatgctgaccattgatgctgacaagagaatcactccaatcgaaagcctgaaccatccctttgtcagcatgacacacttactcgattttcc

SEQ ID NO: 282545 - DNA, 358 bp, Homo sapiens
tggatggagtgtgcctgaagcccccggggtctccataatcgccccctttcctcctccccagcgggtccttccgggtggcccggactgcatggtggggagtggggccgagtccgctgatccagctcacgctccctccccctcgcagggccggccaaggagtgcgaaaaggaccaattccagtgccggaacgagcgctgcatcccctctgtgtggagatgcgacgaggacgatgactgcttagaccacagcgacgaggacgactgccgtgagtggcgggccagggagctcagacccggggagagaaaaggaacggtggggggcaccatgcttggcgcgcacgtggctgcagccgccgcgc

SEQ ID NO: 282546 - DNA, 3925 bp, Homo sapiens
gctggcggcggccgcccagggccggggccgcgcgcccagcctgagcccgccccgccgccgagcgtcaccgaacctgcttgaaatgcagccgaggagccggggcgggcggcagcggcggcggcggcggcggcgggggcagcggcaaccccggcgccgcggcaaggactcggagggctgagacgcggcggcggcggcgcggggagcgcggggcgcggcggccggagcccgggcccgccatgggcctccccgagccgggccctctccggcttctggcgctgctgctgctgctgctgctgctgctgctgctgcggctccagcatcttgcggcggcagcggctgatccgctgctcggcggccaagggccggccaaggagtgcgaaaaggaccaattccagtgccggaacgagcgctgcatcccctctgtgtggagatgcgacgaggacgatgactgcttagaccacagcgacgaggacgactgccccaagaagacctgtgcagacagtgacttcacctgtgacaacggccactgcatccacgaacggtggaagtgtgacggcgaggaggagtgtcctgatggctccgatgagtccgaggccacttgcaccaagcaggtgtgtcctgcagagaagctgagctgtggacccaccagccacaagtgtgtacctgcctcgtggcgctgcgacggggagaaggactgcgagggtggagcggatgaggccggctgtgctacctcactgggcacctgccgtggggacgagttccagtgtggggatgggacatgtgtccttgcaatcaagcactgcaaccaggagcaggactgtccagatgggagtgatgaagctggctgcctacaggggctgaacgagtgtctgcacaacaatggcggctgctcacacatctgcactgacctcaagattggctttgaatgcacgtgcccagcaggcttccagctcctggaccagaagacctgtggcgacattgatgagtgcaaggacccagatgcctgcagccagatctgtgtcaattacaagggctattttaagtgtgagtgctaccctggctacgagatggacctactgaccaagaactgcaaggctgctgctggcaagagcccatccctaatcttcaccaaccggcacgaggtgcggaggatcgacctggtgaagcggaactattcacgcctcatccccatgctcaagaatgtcgtggcactagatgtggaagttgccaccaatcgcatctactggtgtgacctctcctaccgtaagatctatagcgcctacatggacaaggccagtgacccgaaagagcaggaggtcctcattgacgagcagttgcactctccagagggcctggcagtggactgggtccacaagcacatctactggactgactcgggcaataagaccatctcagtggccacagttgatggtggccgccgacgcactctcttcagccgtaacctcagtgaaccccgggccatcgctgttgaccccctgcgagggttcatgtattggtctgactggggggaccaggccaagattgagaaatctgggctcaacggtgtggaccggcaaacactggtgtcagacaatattgaatggcccaacggaatcaccctggatctgctgagccagcgcttgtactgggtagactccaagctacaccaactgtccagcattgacttcagtggaggcaacagaaagacgctgatctcctccactgacttcctgagccacccttttgggatagctgtgtttgaggacaaggtgttctggacagacctggagaacgaggccattttcagtgcaaatcggctcaatggcctggaaatctccatcctggctgagaacctcaacaacccacatgacattgtcatcttccatgagctgaagcagccaagagctccagatgcctgtgagctgagtgtccagcctaatggaggctgtgaatacctgtgccttcctgctcctcagatctccagccactctcccaagtacacatgtgcctgtcctgacacaatgtggctgggtccagacatgaagaggtgctaccgagatgcaaatgaagacagtaagatgggctcaacagtcactgccgctgttatcgggatcatcgtgcccatagtggtgatagccctcctgtgcatgagtggatacctgatctggagaaactggaagcggaagaacaccaaaagcatgaattttgacaacccagtctacaggaaaacaacagaagaagaagatgaagatgagctccatatagggagaactgctcagattggccatgtctatcctgcacgagtggcattaagccttgaagatgatggactaccctgaggatgggatcacccccttcgtgcctcatggaattcagtcccatgcactacactctggatggtgtatgactggatgaatgggtttctatatatgggtctgtgtgagtgtatgtgtgtgtgtgattttttttttaaatttatgttgcggaaaggtaaccacaaagttatgatgaactgcaaacatccaaaggatgtgagagtttttctatgtataatgttttatacactttttaactggttgcactacccatgaggaattcgtggaatggctactgctgactaacatgatgcacataaccaaatgggggccaatggcacagtaccttactcatcatttaaaaactatatttacagaagatgtttggttgctgggggggcttttttaggttttggggcatttgttttttgtaaataagatgattatgctttgtggctatccatcaacataagtaaaaaaaaaaaaaaaacacttcaactccctcccccatttagattatttattaacatattttaaaaatcagatgagttctataaataatttagagaagtgagagtatttatttttggcatgtttggcccaccacacagactctgtgtgtgtatgtgtgtgtttatatgtgtatgtgtgtgacagaaaaatctgtagagaagaggcacatctatggctactgttcaaatacataaagataaatttattttcacacagtccacaaggggtatatcttgtagttttcagaaaagcctttggaaatctggatcagaaaatagataccatggtttgtgcaattatgtagtaaaaaaggcaaatcttttcacctctggctattcctgagaccccaggaagtcaggaaaagcctttcagctcacccatggctgctgtgactcctaccagggctttcttggctttggcgaaggtcagtgtacagacattccatggtaccagagtgctcagaaactcaagataggatatgcctcaccctcagctactccttgttttaaagttcagctctttgagtaacttcttcaatttctttcaggacacttgggttgaattcagtaagtttcctctgaagcaccctgaagggtgccatccttacagagctaagtggagacgtttccagatcagcccaagtttactatagagactggcccaggcactgaatgtctaggacatgctgtggatgaagataaagatggtggaataggttttatcacatctcttatttctcttttccccttactctctaccatttcctttatgtggggaaacattttaaggtaataaataggttacttaccatcatatgttcatatagatgaaactaatttttggcttaagtcagaacaactggccaaaattgaagtcatatttgaggggggaaatggcatacgcaatattatattatattggatatttatgttcacacaggaatttggtttactgctttgtaaataaaaggaaaaactccgggtatatgtatagatgttcttcattatagacatcttctttgcttttcttggccttgggggaggaagggagaagtgctcttttctacttgtggggtctcccattggaaacataatcct

SEQ ID NO: 282547 - DNA, 4639 bp, Homo sapiens
gctggcggcggccgcccagggccggggccgcgcgcccagcctgagcccgccccgccgccgagcgtcaccgaacctgcttgaaatgcagccgaggagccggggcgggcggcagcggcggcggcggcggcggcgggggcagcggcaaccccggcgccgcggcaaggactcggagggctgagacgcggcggcggcggcgcggggagcgcggggcgcggcggccggagcccgggcccgccatgggcctccccgagccgggccctctccggcttctggcgctgctgctgctgctgctgctgctgctgctgctgcggctccagcatcttgcggcggcagcggctgatccgctgctcggcggccaagggccggccaaggagtgcgaaaaggaccaattccagtgccggaacgagcgctgcatcccctctgtgtggagatgcgacgaggacgatgactgcttagaccacagcgacgaggacgactgccccaagaagacctgtgcagacagtgacttcacctgtgacaacggccactgcatccacgaacggtggaagtgtgacggcgaggaggagtgtcctgatggctccgatgagtccgaggccacttgcaccaagcaggtgtgtcctgcagagaagctgagctgtggacccaccagccacaagtgtgtacctgcctcgtggcgctgcgacggggagaaggactgcgagggtggagcggatgaggccggctgtgctaccttgtgcgccccgcacgagttccagtgcggcaaccgctcgtgcctggccgccgtgttcgtgtgcgacggcgatgacgactgtggtgacggcagcgatgagcgcggctgtgcagacccggcctgcgggccccgcgagttccgctgcggcggcgatggcggcggcgcctgcatcccggagcgctgggtctgcgaccgccagtttgactgcgaggaccgctcggacgaggcagccgagctctgcggccgcccgggccccggggccacgtccgcgcccgccgcctgcgccaccgtctcccagttcgcctgccgcagcggcgagtgcgtgcacctgggctggcgctgcgacggcgaccgcgactgcaaagacaaatcggacgaggccgactgcccactgggcacctgccgtggggacgagttccagtgtggggatgggacatgtgtccttgcaatcaagcactgcaaccaggagcaggactgtccagatgggagtgatgaagctggctgcctacaggttccgccaacattcctgggaaacaggaggaggcccagggggctgaacgagtgtctgcacaacaatggcggctgctcacacatctgcactgacctcaagattggctttgaatgcacgtgcccagcaggcttccagctcctggaccagaagacctgtggcgacattgatgagtgcaaggacccagatgcctgcagccagatctgtgtcaattacaagggctattttaagtgtgagtgctaccctggctacgagatggacctactgaccaagaactgcaaggctgctgctggcaagagcccatccctaatcttcaccaaccggcacgaggtgcggaggatcgacctggtgaagcggaactattcacgcctcatccccatgctcaagaatgtcgtggcactagatgtggaagttgccaccaatcgcatctactggtgtgacctctcctaccgtaagatctatagcgcctacatggacaaggccagtgacccgaaagagcaggaggtcctcattgacgagcagttgcactctccagagggcctggcagtggactgggtccacaagcacatctactggactgactcgggcaataagaccatctcagtggccacagttgatggtggccgccgacgcactctcttcagccgtaacctcagtgaaccccgggccatcgctgttgaccccctgcgagggttcatgtattggtctgactggggggaccaggccaagattgagaaatctgggctcaacggtgtggaccggcaaacactggtgtcagacaatattgaatggcccaacggaatcaccctggatctgctgagccagcgcttgtactgggtagactccaagctacaccaactgtccagcattgacttcagtggaggcaacagaaagacgctgatctcctccactgacttcctgagccacccttttgggatagctgtgtttgaggacaaggtgttctggacagacctggagaacgaggccattttcagtgcaaatcggctcaatggcctggaaatctccatcctggctgagaacctcaacaacccacatgacattgtcatcttccatgagctgaagcagccaagagctccagatgcctgtgagctgagtgtccagcctaatggaggctgtgaatacctgtgccttcctgctcctcagatctccagccactctcccaagtacacatgtgcctgtcctgacacaatgtggctgggtccagacatgaagaggtgctaccgagcacctcaatctacctcaactacgacgttagcttctaccatgacgaggacagtacctgccaccacaagagcccccgggaccaccgtccacagatccacctaccagaaccacagcacagagacaccaagcctgacagctgcagtcccaagctcagttagtgtccccagggctcccagcatcagcccgtctaccctaagccctgcaaccagcaaccactcccagcactatgcaaatgaagacagtaagatgggctcaacagtcactgccgctgttatcgggatcatcgtgcccatagtggtgatagccctcctgtgcatgagtggatacctgatctggagaaactggaagcggaagaacaccaaaagcatgaattttgacaacccagtctacaggaaaacaacagaagaagaagatgaagatgagctccatatagggagaactgctcagattggccatgtctatcctgcagcaatcagcagctttgatcgcccactgtgggcagagccctgtcttggggagaccagagaaccggaagacccagcccctgccctcaaggagctttttgtcttgccgggggaaccaaggtcacagctgcaccaactcccgaagaaccctctttccgagctgcctgtcgtcaaatccaagcgagtggcattaagccttgaagatgatggactaccctgaggatgggatcacccccttcgtgcctcatggaattcagtcccatgcactacactctggatggtgtatgactggatgaatgggtttctatatatgggtctgtgtgagtgtatgtgtgtgtgtgattttttttttaaatttatgttgcggaaaggtaaccacaaagttatgatgaactgcaaacatccaaaggatgtgagagtttttctatgtataatgttttatacactttttaactggttgcactacccatgaggaattcgtggaatggctactgctgactaacatgatgcacataaccaaatgggggccaatggcacagtaccttactcatcatttaaaaactatatttacagaagatgtttggttgctgggggggcttttttaggttttggggcatttgttttttgtaaataagatgattatgctttgtggctatccatcaacataagtaaaaaaaaaaaaaaaacacttcaactccctcccccatttagattatttattaacatattttaaaaatcagatgagttctataaataatttagagaagtgagagtatttatttttggcatgtttggcccaccacacagactctgtgtgtgtatgtgtgtgtttatatgtgtatgtgtgtgacagaaaaatctgtagagaagaggcacatctatggctactgttcaaatacataaagataaatttattttcacacagtccacaaggggtatatcttgtagttttcagaaaagcctttggaaatctggatcagaaaatagataccatggtttgtgcaattatgtagtaaaaaaggcaaatcttttcacctctggctattcctgagaccccaggaagtcaggaaaagcctttcagctcacccatggctgctgtgactcctaccagggctttcttggctttggcgaaggtcagtgtacagacattccatggtaccagagtgctcagaaactcaagataggatatgcctcaccctcagctactccttgttttaaagttcagctctttgagtaacttcttcaatttctttcaggacacttgggttgaattcagtaagtttcctctgaagcaccctgaagggtgccatccttacagagctaagtggagacgtttccagatcagcccaagtttactatagagactggcccaggcactgaatgtctaggacatgctgtggatgaagataaagatggtggaataggttttatcacatctcttatttctcttttccccttactctctaccatttcctttatgtggggaaacattttaaggtaataaataggttacttaccatcatatgttcatatagatgaaactaatttttggcttaagtcagaacaactggccaaaattgaagtcatatttgaggggggaaatggcatacgcaatattatattatattggatatttatgttcacacaggaatttggtttactgctttgtaaataaaaggaaaaactccgggt

SEQ ID NO: 282548 - DNA, 5363 bp, Homo sapiens
gctggcggcggccgcccagggccggggccgcgcgcccagcctgagcccgccccgccgccgagcgtcaccgaacctgcttgaaatgcagccgaggagccggggcgggcggcagcggcggcggcggcggcggcgggggcagcggcaaccccggcgccgcggcaaggactcggagggctgagacgcggcggcggcggcgcggggagcgcggggcgcggcggccggagcccgggcccgccatgggcctccccgagccgggccctctccggcttctggcgctgctgctgctgctgctgctgctgctgctgctgcggctccagcatcttgcggcggcagcggctgatccgctgctcggcggccaagggccggccaaggagtgcgaaaaggaccaattccagtgccggaacgagcgctgcatcccctctgtgtggagatgcgacgaggacgatgactgcttagaccacagcgacgaggacgactgccccaagaagacctgtgcagacagtgacttcacctgtgacaacggccactgcatccacgaacggtggaagtgtgacggcgaggaggagtgtcctgatggctccgatgagtccgaggccacttgcaccaagcaggtgtgtcctgcagagaagctgagctgtggacccaccagccacaagtgtgtacctgcctcgtggcgctgcgacggggagaaggactgcgagggtggagcggatgaggccggctgtgctaccttgtgcgccccgcacgagttccagtgcggcaaccgctcgtgcctggccgccgtgttcgtgtgcgacggcgatgacgactgtggtgacggcagcgatgagcgcggctgtgcagacccggcctgcgggccccgcgagttccgctgcggcggcgatggcggcggcgcctgcatcccggagcgctgggtctgcgaccgccagtttgactgcgaggaccgctcggacgaggcagccgagctctgcggccgcccgggccccggggccacgtccgcgcccgccgcctgcgccaccgtctcccagttcgcctgccgcagcggcgagtgcgtgcacctgggctggcgctgcgacggcgaccgcgactgcaaagacaaatcggacgaggccgactgcccactgggcacctgccgtggggacgagttccagtgtggggatgggacatgtgtccttgcaatcaagcactgcaaccaggagcaggactgtccagatgggagtgatgaagctggctgcctacaggttccgccaacattcctgggaaacaggaggaggcccagggggctgaacgagtgtctgcacaacaatggcggctgctcacacatctgcactgacctcaagattggctttgaatgcacgtgcccagcaggcttccagctcctggaccagaagacctgtggcgacattgatgagtgcaaggacccagatgcctgcagccagatctgtgtcaattacaagggctattttaagtgtgagtgctaccctggctacgagatggacctactgaccaagaactgcaaggctgctgctggcaagagcccatccctaatcttcaccaaccggcacgaggtgcggaggatcgacctggtgaagcggaactattcacgcctcatccccatgctcaagaatgtcgtggcactagatgtggaagttgccaccaatcgcatctactggtgtgacctctcctaccgtaagatctatagcgcctacatggacaaggccagtgacccgaaagagcaggaggtcctcattgacgagcagttgcactctccagagggcctggcagtggactgggtccacaagcacatctactggactgactcgggcaataagaccatctcagtggccacagttgatggtggccgccgacgcactctcttcagccgtaacctcagtgaaccccgggccatcgctgttgaccccctgcgagggttcatgtattggtctgactggggggaccaggccaagattgagaaatctgggctcaacggtgtggaccggcaaacactggtgtcagacaatattgaatggcccaacggaatcaccctggatctgctgagccagcgcttgtactgggtagactccaagctacaccaactgtccagcattgacttcagtggaggcaacagaaagacgctgatctcctccactgacttcctgagccacccttttgggatagctgtgtttgaggacaaggtgttctggacagacctggagaacgaggccattttcagtgcaaatcggctcaatggcctggaaatctccatcctggctgagaacctcaacaacccacatgacattgtcatcttccatgagctgaagcagccaagagctccagatgcctgtgagctgagtgtccagcctaatggaggctgtgaatacctgtgccttcctgctcctcagatctccagccactctcccaagtacacatgtgcctgtcctgacacaatgtggctgggtccagacatgaagaggtgctaccgagtttcagggagtttctggaacgctttaaaaacctcaagttaagaacccttaatcgccgtggcttcaggtacatgcagataactatatatttgcctgtttctcacctagaacttaacaaacactacacagcagcccttttgcaatataattgggactaatagttaatacttcaaccgcatacacagattcatgtcctaatcttgatgtatagccaaggcctttcatttgagcctaagtctactgcattattaatgatttacaggttcaattgtttaaagtggaataagaatttcaatctattggtataacaatatatgagtgtaaaatccttctagatttatctgatttcccctccctacagtctttttattgctgatcttacaactaattccacagcagtgttttaatgactcatctttattgaatcaaagtgaagtgcttagcattcagctaaagaaaagatcatagcccactggggagattaggaaaggcttcacagaagtggcatttgagctacgccatgaagataagttcctaagtatatctcagaggcaataccttaggcaacaaaattatctgtccaagtgacctccatggtatttcccctccagcacctcaatctacctcaactacgacgttagcttctaccatgacgaggacagtacctgccaccacaagagcccccgggaccaccgtccacagatccacctaccagaaccacagcacagagacaccaagcctgacagctgcagtcccaagctcagttagtgtccccagggctcccagcatcagcccgtctaccctaagccctgcaaccagcaaccactcccagcactatgcaaatgaagacagtaagatgggctcaacagtcactgccgctgttatcgggatcatcgtgcccatagtggtgatagccctcctgtgcatgagtggatacctgatctggagaaactggaagcggaagaacaccaaaagcatgaattttgacaacccagtctacaggaaaacaacagaagaagaagatgaagatgagctccatatagggagaactgctcagattggccatgtctatcctgcagcaatcagcagctttgatcgcccactgtgggcagagccctgtcttggggagaccagagaaccggaagacccagcccctgccctcaaggagctttttgtcttgccgggggaaccaaggtcacagctgcaccaactcccgaagaaccctctttccgagctgcctgtcgtcaaatccaagcgagtggcattaagccttgaagatgatggactaccctgaggatgggatcacccccttcgtgcctcatggaattcagtcccatgcactacactctggatggtgtatgactggatgaatgggtttctatatatgggtctgtgtgagtgtatgtgtgtgtgtgattttttttttaaatttatgttgcggaaaggtaaccacaaagttatgatgaactgcaaacatccaaaggatgtgagagtttttctatgtataatgttttatacactttttaactggttgcactacccatgaggaattcgtggaatggctactgctgactaacatgatgcacataaccaaatgggggccaatggcacagtaccttactcatcatttaaaaactatatttacagaagatgtttggttgctgggggggcttttttaggttttggggcatttgttttttgtaaataagatgattatgctttgtggctatccatcaacataagtaaaaaaaaaaaaaaaacacttcaactccctcccccatttagattatttattaacatattttaaaaatcagatgagttctataaataatttagagaagtgagagtatttatttttggcatgtttggcccaccacacagactctgtgtgtgtatgtgtgtgtttatatgtgtatgtgtgtgacagaaaaatctgtagagaagaggcacatctatggctactgttcaaatacataaagataaatttattttcacacagtccacaaggggtatatcttgtagttttcagaaaagcctttggaaatctggatcagaaaatagataccatggtttgtgcaattatgtagtaaaaaaggcaaatcttttcacctctggctattcctgagaccccaggaagtcaggaaaagcctttcagctcacccatggctgctgtgactcctaccagggctttcttggctttggcgaaggtcagtgtacagacattccatggtaccagagtgctcagaaactcaagataggatatgcctcaccctcagctactccttgttttaaagttcagctctttgagtaacttcttcaatttctttcaggacacttgggttgaattcagtaagtttcctctgaagcaccctgaagggtgccatccttacagagctaagtggagacgtttccagatcagcccaagtttactatagagactggcccaggcactgaatgtctaggacatgctgtggatgaagataaagatggtggaataggttttatcacatctcttatttctcttttccccttactctctaccatttcctttatgtggggaaacattttaaggtaataaataggttacttaccatcatatgttcatatagatgaaactaatttttggcttaagtcagaacaactggccaaaattgaagtcatatttgaggggggaaatggcatacgcaatattatattatattggatatttatgttcacacaggaatttggtttactgctttgtaaataaaaggaaaaactccgggtatatgtatagatgttcttcattatagacatcttctttgcttttcttggccttgggggaggaagggagaagtgctcttttctacttgtggggtctcccattggaaacataatcct

SEQ ID NO: 282549 - DNA, 4212 bp, Homo sapiens
gctggcggcggccgcccagggccggggccgcgcgcccagcctgagcccgccccgccgccgagcgtcaccgaacctgcttgaaatgcagccgaggagccggggcgggcggcagcggcggcggcggcggcggcgggggcagcggcaaccccggcgccgcggcaaggactcggagggctgagacgcggcggcggcggcgcggggagcgcggggcgcggcggccggagcccgggcccgccatgggcctccccgagccgggccctctccggcttctggcgctgctgctgctgctgctgctgctgctgctgctgcggctccagcatcttgcggcggcagcggctgatccgctgctcggcggccaagggccggccaaggagtgcgaaaaggaccaattccagtgccggaacgagcgctgcatcccctctgtgtggagatgcgacgaggacgatgactgcttagaccacagcgacgaggacgactgccccaagaagacctgtgcagacagtgacttcacctgtgacaacggccactgcatccacgaacggtggaagtgtgacggcgaggaggagtgtcctgatggctccgatgagtccgaggccacttgcaccaagcaggtgtgtcctgcagagaagctgagctgtggacccaccagccacaagtgtgtacctgcctcgtggcgctgcgacggggagaaggactgcgagggtggagcggatgaggccggctgtgctaccttgtgcgccccgcacgagttccagtgcggcaaccgctcgtgcctggccgccgtgttcgtgtgcgacggcgatgacgactgtggtgacggcagcgatgagcgcggctgtgcagacccggcctgcgggccccgcgagttccgctgcggcggcgatggcggcggcgcctgcatcccggagcgctgggtctgcgaccgccagtttgactgcgaggaccgctcggacgaggcagccgagctctgcggccgcccgggccccggggccacgtccgcgcccgccgcctgcgccaccgtctcccagttcgcctgccgcagcggcgagtgcgtgcacctgggctggcgctgcgacggcgaccgcgactgcaaagacaaatcggacgaggccgactgcccactgggcacctgccgtggggacgagttccagtgtggggatgggacatgtgtccttgcaatcaagcactgcaaccaggagcaggactgtccagatgggagtgatgaagctggctgcctacaggttccgccaacattcctgggaaacaggaggaggcccagggggctgaacgagtgtctgcacaacaatggcggctgctcacacatctgcactgacctcaagattggctttgaatgcacgtgcccagcaggcttccagctcctggaccagaagacctgtggcgacattgatgagtgcaaggacccagatgcctgcagccagatctgtgtcaattacaagggctattttaagtgtgagtgctaccctggctacgagatggacctactgaccaagaactgcaaggctgctgctggcaagagcccatccctaatcttcaccaaccggcacgaggtgcggaggatcgacctggtgaagcggaactattcacgcctcatccccatgctcaagaatgtcgtggcactagatgtggaagttgccaccaatcgcatctactggtgtgacctctcctaccgtaagatctatagcgcctacatggacaaggccagtgacccgaaagagcaggaggtcctcattgacgagcagttgcactctccagagggcctggcagtggactgggtccacaagcacatctactggactgactcgggcaataagaccatctcagtggccacagttgatggtggccgccgacgcactctcttcagccgtaacctcagtgaaccccgggccatcgctgttgaccccctgcgagggttcatgtattggtctgactggggggaccaggccaagattgagaaatctgggctcaacggtgtggaccggcaaacactggtgtcagacaatattgaatggcccaacggaatcaccctggatctgctgagccagcgcttgtactgggtagactccaagctacaccaactgtccagcattgacttcagtggaggcaacagaaagacgctgatctcctccactgacttcctgagccacccttttgggatagctgtgtttgaggacaaggtgttctggacagacctggagaacgaggccattttcagtgcaaatcggctcaatggcctggaaatctccatcctggctgagaacctcaacaacccacatgacattgtcatcttccatgagctgaagcagccaagagctccagatgcctgtgagctgagtgtccagcctaatggaggctgtgaatacctgtgccttcctgctcctcagatctccagccactctcccaagtacacatgtgcctgtcctgacacaatgtggctgggtccagacatgaagaggtgctaccgagtttcagggagtttctggaacgctttaaaaacctcaagttaagaacccttaatcgccgtggcttcaggtacatgcagataactatatatttgcctgtttctcacctagaacttaacaaacactacacagcagcccttttgcaatataattgggactaatagttaatacttcaaccgcatacacagattcatgtcctaatcttgatgtatagccaaggcctttcatttgagcctaagtctactgcattattaatgatttacaggttcaattgtttaaagtggaataagaatttcaatctattggtataacaatatatgagtgtaaaatccttctagatttatctgatttcccctccctacagtctttttattgctgatcttacaactaattccacagcagtgttttaatgactcatctttattgaatcaaagtgaagtgcttagcattcagctaaagaaaagatcatagcccactggggagattaggaaaggcttcacagaagtggcatttgagctacgccatgaagataagttcctaagtatatctcagaggcaataccttaggcaacaaaattatctgtccaagtgacctccatggtatttcccctccagcacctcaatctacctcaactacgacgttagcttctaccatgacgaggacagtacctgccaccacaagagcccccgggaccaccgtccacagatccacctaccagaaccacagcacagagacaccaagcctgacagctgcagtcccaagctcagttagtgtccccagggctcccagcatcagcccgtctaccctaagccctgcaaccagcaaccactcccagcactatgcaaatgaagacagtaagatgggctcaacagtcactgccgctgttatcgggatcatcgtgcccatagtggtgatagccctcctgtgcatgagtggatacctgatctggagaaactggaagcggaagaacaccaaaagcatgaattttgacaacccagtctacaggaaaacaacagaagaagaagatgaagatgagctccatatagggagaactgctcagattggccatgtctatcctgcacgagtggcattaagccttgaagatgatggactaccctgaggatgggatcacccccttcgtgcctcatggaattcagtcccatgcactacactctggatggtgacacttgggttgaattcagtaagtttcctctgaagcaccctgaagggtgccatccttacagagctaagtggagacgtttccagatcagcccaagtttactatagagactggcccaggcactgaatgtctaggacatgctgtggatgaagataaagatggtggaataggttttatcacatctcttatttctcttttccccttactctctaccatttcctttatgtggggaaacattttaaggtaataaataggttacttaccatcatatgttcatatagatgaaactaatttttggcttaagtcagaacaactggccaaaattgaagtcatatttgaggggggaaatggcatacgcaatattatattatattggatatttatgttcacacaggaatttggtttactgctttgtaaataaaaggaaaaactccgggtatatgtatagatgttcttcattatagacatcttctttgcttttcttggccttgggggaggaagggagaagtgctcttttctacttgtggggtctcccattggaaacataatcct

SEQ ID NO: 282550 - DNA, 2284 bp, Homo sapiens
gctggcggcggccgcccagggccggggccgcgcgcccagcctgagcccgccccgccgccgagcgtcaccgaacctgcttgaaatgcagccgaggagccggggcgggcggcagcggcggcggcggcggcggcgggggcagcggcaaccccggcgccgcggcaaggactcggagggctgagacgcggcggcggcggcgcggggagcgcggggcgcggcggccggagcccgggcccgccatgggcctccccgagccgggccctctccggcttctggcgctgctgctgctgctgctgctgctgctgctgctgcggctccagcatcttgcggcggcagcggctgatccgctgctcggcggccaagggccggccaaggagtgcgaaaaggaccaattccagtgccggaacgagcgctgcatcccctctgtgtggagatgcgacgaggacgatgactgcttagaccacagcgacgaggacgactgccccaagaagacctgtgcagacagtgacttcacctgtgacaacggccactgcatccacgaacggtggaagtgtgacggcgaggaggagtgtcctgatggctccgatgagtccgaggccacttgcaccaagcaggtgtgtcctgcagagaagctgagctgtggacccaccagccacaagtgtgtacctgcctcgtggcgctgcgacggggagaaggactgcgagggtggagcggatgaggccggctgtgctaccttgtgcgccccgcacgagttccagtgcggcaaccgctcgtgcctggccgccgtgttcgtgtgcgacggcgatgacgactgtggtgacggcagcgatgagcgcggctgtgcagacccggcctgcgggccccgcgagttccgctgcggcggcgatggcggcggcgcctgcatcccggagcgctgggtctgcgaccgccagtttgactgcgaggaccgctcggacgaggcagccgagctctgcggccgcccgggccccggggccacgtccgcgcccgccgcctgcgccaccgtctcccagttcgcctgccgcagcggcgagtgcgtgcacctgggctggcgctgcgacggcgaccgcgactgcaaagacaaatcggacgaggccgactgcccactgggcacctgccgtggggacgagttccagtgtggggatgggacatgtgtccttgcaatcaagcactgcaaccaggagcaggactgtccagatgggagtgatgaagctggctgcctacaggttccgccaacattcctgggaaacaggaggaggcccagggggctgaacgagtgtctgcacaacaatggcggctgctcacacatctgcactgacctcaagattggctttgaatgcacgtgcccagcaggcttccagctcctggaccagaagacctgtggcgacattgatgagtgcaaggacccagatgcctgcagccagatctgtgtcaattacaagggctattttaagtgtgagtgctaccctggctacgagatggacctactgaccaagaactgcaaggctgctgctggcaagagcccatccctaatcttcaccaaccggcacgaggtgcggaggatcgacctggtgaagcggaactattcacgcctcatccccatgctcaagaatgtcgtggcactagatgtggaagttgccaccaatcgcatctactggtgtgacctctcctaccgtaagatctatagcgcctacatggacaaggccagtgacccgaaagagcaggaggtcctcattgacgagcagttgcactctccagagggcctggcagtggactgggtccacaagcacatctactggactgactcgggcaataagaccatctcagtggccacagttgatggtggccgccgacgcactctcttcagccgtaacctcagtgaaccccgggccatcgctgttgaccccctgcgagggttcatgtattggtctgactggggggaccaggccaagattgagaaatctgggctcaacggtgtggaccggcaaacactggtgtcagacaatattgaatggcccaacggaatcaccctggatctgctgagccagcgcttgtactgggtagactccaagctacaccaactgtccagcattgacttcagtggaggcaacagaaagacgctgatctcctccactgacttcctgagccacccttttgggatagctgtgtttgaggacaaggtgttctggacagacctggagaacgaggccattttcgctgacaacggcctcactgacacgccttactacacgcctcactacacgcctaa

SEQ ID NO: 282551 - DNA, 593 bp, Homo sapiens
agtggtgatagccctcctgtgcatgagtggatacctgatctggagaaactggaagcggaagaacaccaaaagcatgaattttgacaacccagtctacaggaaaacaacagaagaagaagatgaagatgagctccatatagggagaactgctcagattggccatgtctatcctgcagtaagtatttctcactgggagaattcctaccttccgaccatcttcccttccatcctttcttcccctcccatcctttcttccttcccatcctttcttccctcccttccttccttccgtccttccctccctcctttccttccgtccttccctccctccctgtcttttttctttccttctttccttcctttcctccctccttcccttcctccttctttccttcctcaaacatttatcaaaaacgcaccatgtatcaggcactgttctaggccctggggaacacagaaatgctggggtaggtggttaaggtaaaaaggtatcaggaccaccttgtacctagaggctcttcctggcagtaaaaaaagccaaatgtctctctttctgctcagtaaattttcagaacctttagcctggaagggta

SEQ ID NO: 282552 - DNA, 323 bp, Homo sapiens
agacacacctgtgttcctttggcacagacattctggagtcccagtgcccaggaaagaagacgggaggcagtagcagagcctgggagagatggcctgaggatgttgtgatggaagactgtatatgatcatatgcactgctgtccagaaatattccttcctgctggactcagagaaccccaggacctctacccaacgtgcctgctccaaagaaggaatgaggttctgcagagctgtggtccgagccgtgatcaggaaggatgcctcgggaagtatagttttccccagcaaactgcccagcagtgcatccgccggctgtggctggc

SEQ ID NO: 282553 - DNA, 960 bp, Homo sapiens
gaaagtctcttgatgttttatatggtactcttattaataatcccagagagcaggggttggcaaactatggcccatgggctaaaatggtttttacattttaaaagggttgaaaactttaaaactggaaggatacatgacagagactggatggcctacaatgcctaacatattatctagccctttacagaaaacaactgaccaatccttatgagaccagacttgcaaaaattacagtaacagagtgaaaaaccttcttgaagtgttaggaggaacttgagtcataatttgatgttgaatcagagagaacaactgtttgggcttatttgcctcagagtatttgcccagcctctgttaacatcgtgacctccagttccatccatgttgctgcaaatgagatgggattttgctatgttggccatgctggtcttaaactcttggcctcaagtgatccgcccacctcagcctcccaaagtgctgggattacagggtttccactgagaagtctgctgaaagctgtattggatgtgggattcagaatgtgttgctggacttcaagataggaagaatctttgccttgatggctgatgacagtaaccaccccatctaccatcatctattaaggatttactgtgtggtcactttacagtcatccaagtaaattttcataatcacctgattacatgggtaccgcttttcagaaaaagaaacagatttctggagggattcagaatccatggctggaagaggtagtaaggccattgggagggcatgcctctcctcagcccacccccaccctgtgtgggtctccattctgaaatttccattcagatgacccggtcctaggcagggaccaaaattccttgtcagctgaggaagtcctgaagaaacatcctgaagatgatgactgcactgccatcgtgggcagatgcagcttccatctacctgagggctgaaggggaa

SEQ ID NO: 282554 - DNA, 446 bp, Homo sapiens
gaaagtctcttgatgttttatatggtactcttattaataatcccagagagcaggggttggcaaactatggcccatgggctaaaatggtttttacattttaaaagggttgaaaactttaaaactggaaggatacatgacagagactggatggcctacaatgcctaacatattatctagccctttacagaaaacaactgaccaatccttatgagaccagacttgcaaaaattacagtaacagagtgaaaaaccttcttgaagtgttaggaggaacttgagtcataatttgatgttgaatcagagagaacaactgtttgggcttatttgcctcagaggtaagaaaatcaagttttaactaagattaacccacagaagtagatattaatactaaggtttcgacctaataataactaacctgtattaattgtgtgcagtgtaccagaccca

SEQ ID NO: 282555 - DNA, 978 bp, Homo sapiens
gaaagtctcttgatgttttatatggtactcttattaataatcccagagagcaggggttggcaaactatggcccatgggctaaaatggtttttacattttaaaagggttgaaaactttaaaactggaaggatacatgacagagactggatggcctacaatgcctaacatattatctagccctttacagaaaacaactgaccaatccttatgagaccagacttgcaaaaattacagtaacagagtgaaaaaccttcttgaagtgttaggaggaacttgagtcataatttgatgttgaatcagagagaacaactgtttgggcttatttgcctcagagtatttgcccagcctctggtaactatcattctattctctacctccatgagagcaactttcttagctcccacatgtgaatgagaacatgcaatatttgtctttctgtgcctggcttatttcagttaacatcgtgacctccagttccatccatgttgctgcaaatgagatgggattttgctatgttggccatgctggtcttaaactcttggcctcaagtgatccgcccacctcagcctcccaaagtgctgggattacagggtttccactgagaagtctgctgaaagctgtattggatgtgggattcagaatgtgttgctggacttcaagataggaagaatctttgccttgatggctgatgacagtaaccaccccatctaccatcatctattaaggatttactgtgtggtcactttacagtcatccaagtaaattttcataatcacctgattacatgggtaccgcttttcagaaaaagaaacagatttctggagggtaagtaacccaaatcgtacagctgagccatctgtctgcatctcaagcattgaggcagcattcggcctccgagggtgttgtcaaatgtgctggtctctgttaactcagggttttggattaatgggtggagctgctcattttcacaaacaccca

SEQ ID NO: 282556 - DNA, 1848 bp, Homo sapiens
tggagctggaggcctcaaagtggggaggaggaggagggtgggataaagaggaaaggagcgtggaggacgtgtggttactcaaagaacagctaagaattttgcaatcggcctgagcggggcggtggtggggctgagcaaaaggaggaggagccaggagacattgggaatggacccaggagttccggacgcccgtcttccagcgcagcctcggtgggagggcggggcataaagtcccgccacgcccccacaatatttacatatttatgaggaaccatcgagatctttgaagaaccagctagcctagaggagccagaacatctcgctcctcgcgcgtttccgtttccgctaggactctggcagttggtgagcatcatggcaaccgttacagccacaaccaaagtcccggagatccgtgatgtaacaaggattgagcgaatcggtgcccactcccacatccggggactggggctggacgatgccttggagcctcggcaggcttcgcaaggcatggtgggtcagctggcggcacggcgggcggctggcgtggtgctggagatgatccgggaagggaagattgccggtcgggcagtccttattgctggccagccgggcacggggaagacggccatcgccatgggcatggcgcaggccctgggccctgacacgccattcacagccatcgccggcagtgaaatcttctccctggagatgagcaagaccgaggcgctgacgcaggccttccggcggtccatcggcgttcgcatcaaggaggagacggagatcatcgaaggggaggtggtggagatccagattgatcgaccagcaacagggacgggctccaaggtgggcaaactgaccctcaagaccacagagatggagaccatctacgacctgggcaccaagatgattgagtccctgaccaaggacaaggtccaggccggggacgtgatcaccatcgacaaggcgacgggcaagatctccaagctgggccgctccttcacacgcgcccgcgactacgacgctatgggctcccagaccaagttcgtgcagtgcccagatggggagctccagaaacgcaaggaggtggtgcacaccgtgtccctgcacgagatcgacgtcatcaactctcgcacccagggcttcctggcgctcttctcaggtgacacaggggagatcaagtcagaagtccgtgagcagatcaatgccaaggtggctgagtggcgcgaggagggcaaggcggagatcatccctggagtgctgttcatcgacgaggtccacatgctggacatcgagagcttctccttcctcaaccgggccctggagagtgacatggcgcctgtcctgatcatggccaccaaccgtggcatcacgcgaatccggggcaccagctaccagagccctcacggcatccccatagacctgctggaccggctgcttatcgtctccaccaccccctacagcgagaaagacacgaagcagatcctccgcatccggtgcgaggaagaagatgtggagatgagtgaggacgcctacacggtgctgacccgcatcgggctggagacgtcactgcgctacgccatccagctcatcacagctgccagcttggtgtgccggaaacgcaagggtacagaagtgcaggtggatgacatcaagcgggtctactcactcttcctggacgagtcccgctccacgcagtacatgaaggagtaccaggacgccttcctcttcaacgaactcaaaggcgagaccatggacacctcctgagttggatgtcatcccccgaccccaccctgttttccaccagagttctgacactgtgactctgtataaaatggttgggaagctgca

SEQ ID NO: 282557 - DNA, 1051 bp, Homo sapiens
  misc_feature (21)..(21): n is a, c, g, or t
  misc_feature (808)..(808): n is a, c, g, or t
  misc_feature (818)..(818): n is a, c, g, or t
taggctaagtacgaggccggngggtgagttggtgagcatcatggcaaccgttacagccacaaccaaagtcccggagatccgtgatgtaacaaggattgagcgaatcggtgcccactcccacatccggggactggggctggacgatgccttggagcctcggcaggcttcgcaaggcatggtgggtcagctggcggcacggcgggcggctggcgtggtgctggagatgatccgggaagggaagattgccggtcgggcagtccttattgctggccagccgggcacggggaagacggccatcgccatgggcatggcgcaggccctgggccctgacacgccattcacagccatcgccggcagtgaaatcttctccctggagatgagcaagaccgaggcgctgacgcaggccttccggcggtccatcggcgttcgcatcaaggaggagacggagatcatcgaaggggaggtggtggagatccagattgatcgaccagcaacagggacgggctccaaggtgggcaaactgaccctcaagaccacagagatggagaccatctacgacctgggcaccaagatgattgagtccctgaccaaggacaaggtccaggccggggacgtgatcaccatcgacaaggcgacgggcaagatctccaagctgggccgctccttcacacgcgcccgcgactacgacgctatgggctcccagaccaagttcgtgcagtgcccagatggggagctccaaaacgcagggggtggtgcccccggtcctggccgaatcgagtctcaatctcgcacccaggttccgggcctntccgtgaccnggggagtcacgtcgagccgggcgtcatgccggtgctgcatggccggagggacgggggcatcccgggggggtccccagccccggtggaggcggtcctcccacggcggggaaggcggcggttggtccccggttgctggcggcacccgcctacgggggggttcccccaccaaacctccggtgggagtgacgcggcgcccttcgtgtcttttgtgctcagattcgtcgtctgctgcg

SEQ ID NO: 282558 - DNA, 849 bp, Homo sapiens
  misc_feature (22)..(23): n is a, c, g, or t
  misc_feature (25)..(25): n is a, c, g, or t
taggctaggtacgaggctgggnntntatggcaaccgttacagccacaaccaaagtcccggagatccgtgatgtaacaaggattgagcgaatcggtgcccactcccacatccggggactggggctggacgatgccttggagcctcggcaggcttcgcaaggcatggtgggtcagctggcggcacggcgggcggctggcgtggtgctggagatgatccgggaagggaagattgccggtcgggcagtccttattgctggccagccgggcacggggaagacggccatcgccatgggcatggcgcaggccctgggccctgacacgccattcacagccatcgccggcagtgaaatcttctccctggagatgagcaagaccgaggcgctgacgcaggccttccggcggtccatcggcgttcgcatcaaggaggagacggagatcatcgaaggggaggtggtggagatccagattgatcgaccagcaacagggacgggctccaaggtgggcaaactgaccctcaagaccacagagatggagaccatctacgacctgggcaccaagatgattgagtccctgaccaaggacaaggtccaggccggggacgtgatcaccatcgacaaggcgacgggcaagatctccaagctgggccgctccttcacacgcgcccgcgactacgacgctatgggctcccaggtgcggccgggactcccgggatcccctcgcccccagcactggggtgttttcatctcctccatcacccccttgacccatggggtctggatcttcctgttaccctgactgtttgtcctggtactcctgggtcttccctgtaaccctaggacagcagggcccc

SEQ ID NO: 282559 - DNA, 801 bp, Homo sapiens
cgcacatcttttagaggcataatacagtacagaacaccaacgaacgatccggaagtctaatcactgtgaacaaacacagcttacagccacaaccaaagtcccggagatccgtgatgtaacaaggattgagcgaatcggtgcccactcccacatccggggactggggctggacgatgccttggagcctcggcaggcttcgcaaggcatggtgggtcagctggcggcacggcgggcggctggcgtggtgctggagatgatccgggaagggaagattgccggtcgggcagtccttattgctggccagccgggcacggggaagacggccatcgccatgggcatggcgcaggccctgggccctgacacgccattcacagccatcgccggcagtgaaatcttctccctggagatgagcaagaccgaggcgctgacgcaggccttccggcggtccatcggcgttcgcatcaaggaggagacggagatcatcgaaggggaggtggtggagatccagattgatcgaccagcaacagggacgggctccaaggtgggcaaactgaccctcaagaccacagagatggagaccatctacgacctgggcaccaagatgattgagtccctgaccaaggacaaggtccaggccggggacgtgatcaccatcgacacaaggccgacccggggccaagatcttcccaaggctgagggcccgctccctttcaacaacggccgccccggcgaaagttaaccgaacggccttattgggggctccaccagaaccaaaggtttccgctagacaaggtggcgccc

SEQ ID NO: 282560 - DNA, 2343 bp, Homo sapiens
tggagctggaggcctcaaagtggggaggaggaggagggtgggataaagaggaaaggagcgtggaggacgtgtggttactcaaagaacagctaagaattttgcaatcggcctgagcggggcggtggtggggctgagcaaaaggaggaggagccaggagacattgggaatggacccaggagttccggacgcccgtcttccagcgcagcctcggtgggagggcggggcataaagtcccgccacgcccccacaatatttacatatttatgaggaaccatcgagatctttgaagaaccagctagcctagaggagccagaacatctcgctcctcgcgcgtttccgtttccgctaggactctggcagttggtgagcatcatggcaaccgttacagccacaaccaaagtcccggagatccgtgatgtaacaaggattgagcgaatcggtgcccactcccacatccggggactggggctggacgatgccttggagcctcggcaggcttcgcaaggcatggtgggtcagctggcggcacggcgggcggctggcgtggtgctggagatgatccgggaagggaagattgccggtcgggcagtccttattgctggccagccgggcacggggaagacggccatcgccatgggcatggcgcaggccctgggccctgacacgccattcacagccatcgccggcagtgaaatcttctccctggagatgagcaagaccgaggcgctgacgcaggccttccggcggtccatcggcgttcgcatcaaggaggagacggagatcatcgaaggggaggtggtggagatccagattgatcgaccagcaacagggacgggctccaaggtgggcaaactgaccctcaagaccacagagatggagaccatctacgacctgggcaccaagatgattgagtccctgaccaaggacaaggtccaggccggggacgtgatcaccatcgacaaggcgacgggcaagatctccaagctgggccgctccttcacacgcgcccgcgactacgacgctatgggctcccagaccaagttcgtgcagtgcccagatggggagctccagaaacgcaaggaggtggtgcacaccgtgtccctgcacgagatcgacgtcatcaactctcgcacccagggcttcctggcgctcttctcaggtgacacaggggagatcaagtcagaagtccgtgagcagatcaatgccaaggtggctgagtggcgcgaggagggcaaggcggagatcatccctggagtgctgttcatcgacgaggtccacatgctggacatcgagagcttctccttcctcaaccgggccctggagagtgacatggcgcctgtcctgatcatggccaccaaccgtggcatcacgcgaatccggggcaccagctaccagagccctcacggcatccccatagacctgctggaccggctgcttatcgtctccaccaccccctacagcgagaaagacacgaagcagatcctccgcatccggtgcgaggaagaagatgtggagatgagtgaggacgcctacacggtgctgacccgcatcgggctggagacgtcactgcgctacgccatccagctcatcacagctgccagcttggtgtgccggaaacgcaagggtacagaagtgcaggtggatgacatcaagcgggtctactcactcttcctggacgagtcccgctccacgcagtacatgaaggagtaccaggacgccttcctcttcaacgaactcaaaggcgagaccatggacacctcctgagttggatgtcatcccccgaccccaccctgttttccaccagagttctgacactgtgactctgtataaaatggttgggaagctgcaaaaaaaaaaaaaaaaaaaaaaaaaaaaaaaaaaaaaaaaaaaaaaaaaaaccacaggaaaacatacaagaaagaagaaagacaacaaaccagaaaaacaaaaaaggggggggcgccgaacataaaatagaacccgctgggagggccagcgatataagtgacccgcgcaccatgttaccattcacaaacagagggccccccaccgtaggaagcgaggtaactataataaacacgacgcaggcccgcggcgcggcgacttataaaccacgaccggccgcagcggacaaaacgagcgactgcagctggcacgtcccatcgacggcagggggaaccacccaactaggcggggggcacacatacgaggcgggagcaacccccaccacgcagaatgagagacccggcagcataagaaaagaaacgcgaggcggtagcagcgcagcacagcgacaatacgcgcggagaacaagcgaccgaggatagaaacaaacaatgccgc

SEQ ID NO: 282561 - DNA, 1391 bp, Homo sapiens
  misc_feature (1223)..(1223): n is a, c, g, or t
  misc_feature (1390)..(1390): n is a, c, g, or t
tggagctggaggcctcaaagtggggaggaggaggagggtgggataaagaggaaaggagcgtggaggacgtgtggttactcaaagaacagctaagaattttgcaatcggcctgagcggggcggtggtggggctgagcaaaaggaggaggagccaggagacattgggaatggacccaggagttccggacgcccgtcttccagcgcagcctcggtgggagggcggggcataaagtcccgccacgcccccacaatatttacatatttatgaggaaccatcgagatctttgaagaaccagctagcctagaggagccagaacatctcgctcctcgcgcgtttccgtttccgctaggactctggcagttggtgagcatcatggcaaccgttacagccacaaccaaagtcccggagatccgtgatgtaacaaggattgagcgaatcggtgcccactcccacatccggggactggggctggacgatgccttggagcctcggcaggcttcgcaaggcatggtgggtcagctggcggcacggcgggcggctggcgtggtgctggagatgatccgggaagggaagattgccggtcgggcagtccttattgctggccagccgggcacggggaagacggccatcgccatgggcatggcgcaggccctgggccctgacacgccattcacagccatcgccggcagtgaaatcttctccctggagatgagcaagaccgaggcgctgacgcaggccttccggcggtccatcggcgttcgcatcaaggaggagacggagatcatcgaaggggaggtggtggagatccagattgatcgaccagcaacagggacgggctccaaggtgggcaaactgaccctcaagaccacagagatggagaccatctacgacctgggcaccaagatgattgagtccctgaccaaggacaaggtccaggccggggacgtgatcaccatcgacaaggcgacgggcaagatctccaagctgggccgctccttcacacgcgcccgcgactacgacgctatgggctcccagaccaagttcgtgcagtgcccagatggggagctccagaaacgcaaggaggtggtgcacaccgtgtccctgcacgagatcgacgtcatcaactctcgcacccagggcttcctggcgctcttctcaggtgacacacggggagatcagtcgaagtcgtgagccgatccatgcaggtggtgatgcccgggggnaggggatctcctgggtgtgtcccggagccctggtggtggggtctcctcccacggcggggagatgggcgctgttggcccgggtccatgggctcacccggccagcgggggttttccccggaaaactgccggagataggcggggcctgtggtgtgttcttccacctcccng

SEQ ID NO: 282562 - DNA, 1527 bp, Homo sapiens
  misc_feature (47)..(47): n is a, c, g, or t
acaacccacaaaccaccccaccattcatgatgagtcgcggtttaatnggccgaggggcagcgtacagccacaaccaaagtcccggagatccgtgatgtaacaaggattgagcgaatcggtgcccactcccacatccggggactggggctggacgatgccttggagcctcggcaggcttcgcaaggcatggtgggtcagctggcggcacggcgggcggctggcgtggtgctggagatgatccgggaagggaagattgccggtcgggcagtccttattgctggccagccgggcacggggaagacggccatcgccatgggcatggcgcaggccctgggccctgacacgccattcacagccatcgccggcagtgaaatcttctccctggagatgagcaagaccgaggcgctgacgcaggccttccggcggtccatcggcgttcgcatcaaggaggagacggagatcatcgaaggggaggtggtggagatccagattgatcgaccagcaacagggacgggctccaaggtgggcaaactgaccctcaagaccacagagatggagaccatctacgacctgggcaccaagatgattgagtccctgaccaaggacaaggtccaggccggggacgtgatcaccatcgacaaggcgacgggcaagatctccaagctgggccgctccttcacacgcgcccgcgactacgacgctatgggctcccagaccaagttcgtgcagtgcccagatggggagctccagaaacgcaaggaggtggtgcacaccgtgtccctgcacgagatcgacgtcatcaactctcgcacccagggcttcctggcgctcttctcaggtgacacaggggagatcaagtcagaagtccgtgagcagatcaatgccaaggtggctgagtggcgcgaggagggcaaggcggagatcatccctggagtgctgttcatcgacgaggtccacatgctggacatcgagagcttctccttcctcaaccgggccctggagagtgacatggcgcctgtcctgatcatggccaccaaccgtggcatcacgcgaatccggggcaccagctaccagagccctcacggcatccccatagacctgctggaccggctgcttatcgtctccaccaccccctacagcgagaaagacacgaagcagatcctccgcatccggtgcgaggaagaagatgtggagatgagtgaggacgcctacacggtgctgacccgcatcgggctggagacgtcactgcgctacgccatccagctcatcacagctgccagcttggtgtgccggaaacgcaagggtacagaagtgcaggtggatgacatcaagcgggtctactcactcttcctggacgagtcccgctccacgcagtacatgaaggagtaccaggacgccttcctcttcaacgaactcaaaggcgagaccatggacacctcctgagttggatgtcatcccccgaccccaccctgttttccaccagagttctgacactgtgactctgtataaaatggttgggaagctgca

SEQ ID NO: 282563 - DNA, 1676 bp, Homo sapiens
caaggtagctggtgggaatcggacgagagttggtgagcatcatggcaaccgttccaggtgtggtggtgcaggcctgtaatcccagctactcagaaggctgaggcaggagaatcgcttgaacctgggaggcagaagttgcagtgagccaagatcgcgccactgcattccagcctgggcgacaaagcgagactctgtctccaaaaaaaaaaagtacagccacaaccaaagtcccggagatccgtgatgtaacaaggattgagcgaatcggtgcccactcccacatccggggactggggctggacgatgccttggagcctcggcaggcttcgcaaggcatggtgggtcagctggcggcacggcgggcggctggcgtggtgctggagatgatccgggaagggaagattgccggtcgggcagtccttattgctggccagccgggcacggggaagacggccatcgccatgggcatggcgcaggccctgggccctgacacgccattcacagccatcgccggcagtgaaatcttctccctggagatgagcaagaccgaggcgctgacgcaggccttccggcggtccatcggcgttcgcatcaaggaggagacggagatcatcgaaggggaggtggtggagatccagattgatcgaccagcaacagggacgggctccaaggtgggcaaactgaccctcaagaccacagagatggagaccatctacgacctgggcaccaagatgattgagtccctgaccaaggacaaggtccaggccggggacgtgatcaccatcgacaaggcgacgggcaagatctccaagctgggccgctccttcacacgcgcccgcgactacgacgctatgggctcccagaccaagttcgtgcagtgcccagatggggagctccagaaacgcaaggaggtggtgcacaccgtgtccctgcacgagatcgacgtcatcaactctcgcacccagggcttcctggcgctcttctcaggtgacacaggggagatcaagtcagaagtccgtgagcagatcaatgccaaggtggctgagtggcgcgaggagggcaaggcggagatcatccctggagtgctgttcatcgacgaggtccacatgctggacatcgagagcttctccttcctcaaccgggccctggagagtgacatggcgcctgtcctgatcatggccaccaaccgtggcatcacgcgaatccggggcaccagctaccagagccctcacggcatccccatagacctgctggaccggctgcttatcgtctccaccaccccctacagcgagaaagacacgaagcagatcctccgcatccggtgcgaggaagaagatgtggagatgagtgaggacgcctacacggtgctgacccgcatcgggctggagacgtcactgcgctacgccatccagctcatcacagctgccagcttggtgtgccggaaacgcaagggtacagaagtgcaggtggatgacatcaagcgggtctactcactcttcctggacgagtcccgctccacgcagtacatgaaggagtaccaggacgccttcctcttcaacgaactcaaaggcgagaccatggacacctcctgagttggatgtcatcccccgaccccaccctgttttccaccagagttctgacactgtgactctgtataaaatggttgggaagctgca

SEQ ID NO: 282564 - DNA, 2219 bp, Homo sapiens
tccaactttcaaaatcatcttggcgcaacggccggttccgcagtccttggcgccagtgtgtgatgaggagggttgtaggaccttgcgcttcgagccatttgggagccttggattgttagtggtgccaatggcacttgagttccaagctggaagcacaggcaggtacctgttcagtgtgtctgagagcgcgagggcgcctagtgagcctttagtgggaagaaattgtcgaggaacaagagagtcttagtggagaggactgaaggattagggacccagaaatcgggatcttgtcatgctaccgttttggccattttcatatttccagtatttcacacgggctacgtctcagtgtaaatgctcaataaattatcacttgaatatttgaatgaatgaatacatgtgaatgaaggagaggccaggaaacttggcctggcacctgctcaattacctgaataaagaagcgattttggcctggcgtggtggctcatgcctgtaatcccagcactttgggaggccgaggcgggcggatcacttcaggtcaggagttcgtggccaacattgcgaaaccccgtctctattaaaaatacaaaaattagccaggtgtggtggtgcaggcctgtaatcccagctactcagaaggctgaggcaggagaatcgcttgaacctgggaggcagaagttgcagtgagccaagatcgcgccactgcattccagcctgggcgacaaagcgagactctgtctccaaaaaaaaaaagtacagccacaaccaaagtcccggagatccgtgatgtaacaaggattgagcgaatcggtgcccactcccacatccggggactggggctggacgatgccttggagcctcggcaggcttcgcaaggcatggtgggtcagctggcggcacggcgggcggctggcgtggtgctggagatgatccgggaagggaagattgccggtcgggcagtccttattgctggccagccgggcacggggaagacggccatcgccatgggcatggcgcaggccctgggccctgacacgccattcacagccatcgccggcagtgaaatcttctccctggagatgagcaagaccgaggcgctgacgcaggccttccggcggtccatcggcgttcgcatcaaggaggagacggagatcatcgaaggggaggtggtggagatccagattgatcgaccagcaacagggacgggctccaaggtgggcaaactgaccctcaagaccacagagatggagaccatctacgacctgggcaccaagatgattgagtccctgaccaaggacaaggtccaggccggggacgtgatcaccatcgacaaggcgacgggcaagatctccaagctgggccgctccttcacacgcgcccgcgactacgacgctatgggctcccagaccaagttcgtgcagtgcccagatggggagctccagaaacgcaaggaggtggtgcacaccgtgtccctgcacgagatcgacgtcatcaactctcgcacccagggcttcctggcgctcttctcaggtgacacaggggagatcaagtcagaagtccgtgagcagatcaatgccaaggtggctgagtggcgcgaggagggcaaggcggagatcatccctggagtgctgttcatcgacgaggtccacatgctggacatcgagagcttctccttcctcaaccgggccctggagagtgacatggcgcctgtcctgatcatggccaccaaccgtggcatcacgcgaatccggggcaccagctaccagagccctcacggcatccccatagacctgctggaccggctgcttatcgtctccaccaccccctacagcgagaaagacacgaagcagatcctccgcatccggtgcgaggaagaagatgtggagatgagtgaggacgcctacacggtgctgacccgcatcgggctggagacgtcactgcgctacgccatccagctcatcacagctgccagcttggtgtgccggaaacgcaagggtacagaagtgcaggtggatgacatcaagcgggtctactcactcttcctggacgagtcccgctccacgcagtacatgaaggagtaccaggacgccttcctcttcaacgaactcaaaggcgagaccatggacacctcctgagttggatgtcatcccccgaccccaccctgttttccaccagagttctgacactgtgactctgtataaaatggttgggaagctgca

SEQ ID NO: 282565 - DNA, 1775 bp, Homo sapiens
tggagctggaggcctcaaagtggggaggaggaggagggtgggataaagaggaaaggagcgtggaggacgtgtggttactcaaagaacagctaagaattttgcaatcggcctgagcggggcggtggtggggctgagcaaaaggaggaggagccaggagacattgggaatggacccaggagttccggacgcccgtcttccagcgcagcctcggtgggagggcggggcataaagtcccgccacgcccccacaatatttacatatttatgaggaaccatcgagatctttgaagaaccagctagcctagaggagccagaacatctcgctcctcgcgcgtttccgtttccgctaggactctggcagttggtgagcatcatggcaaccgttacagccacaaccaaagtcccggagatccgtgatgtaacaaggattgagcgaatcggtgcccactcccacatccggggactggggctggacgatgccttggagcctcggcaggcttcgcaaggcatggtgggtcagctggcggcacggcgggcggctggcgtggtgctggagatgatccgggaagggaagattgccggtcgggcagtccttattgctggccagccgggcacggggaagacggccatcgccatgggcatggcgcaggccctgggccctgacacgccattcacagccatcgccggcagtgaaatcttctccctggagatgagcaagaccgaggcgctgacgcaggccttccggcggtccatcggcgttcgcatcaaggaggagacggagatcatcgaaggggaggtggtggagatccagattgatcgaccagcaacagggacgggctccaaggtgggcaaactgaccctcaagaccacagagatggagaccatctacgacctgggcaccaagatgattgagtccctgaccaaggacaaggtccaggccggggacgtgatcaccatcgacaaggcgacgggcaagatctccaagctgggccgctccttcacacgcgcccgcgactacgacgctatgggctcccagaccaagttcgtgcagtgcccagatggggagctccagaaacgcaaggaggtggtgcacaccgtgtccctgcacgagatcgacgtgagcagatcaatgccaaggtggctgagtggcgcgaggagggcaaggcggagatcatccctggagtgctgttcatcgacgaggtccacatgctggacatcgagagcttctccttcctcaaccgggccctggagagtgacatggcgcctgtcctgatcatggccaccaaccgtggcatcacgcgaatccggggcaccagctaccagagccctcacggcatccccatagacctgctggaccggctgcttatcgtctccaccaccccctacagcgagaaagacacgaagcagatcctccgcatccggtgcgaggaagaagatgtggagatgagtgaggacgcctacacggtgctgacccgcatcgggctggagacgtcactgcgctacgccatccagctcatcacagctgccagcttggtgtgccggaaacgcaagggtacagaagtgcaggtggatgacatcaagcgggtctactcactcttcctggacgagtcccgctccacgcagtacatgaaggagtaccaggacgccttcctcttcaacgaactcaaaggcgagaccatggacacctcctgagttggatgtcatcccccgaccccaccctgttttccaccagagttctgacactgtgactctgtataaaatggttgggaagctgca

SEQ ID NO: 282566 - DNA, 1487 bp, Homo sapiens
tattcatttggcaaacctgttttacagccacaaccaaagtcccggagatccgtgatgtaacaaggattgagcgaatcggtgcccactcccacatccggggactggggctggacgatgccttggagcctcggcaggcttcgcaaggcatggtgggtcagctggcggcacggcgggcggctggcgtggtgctggagatgatccgggaagggaagattgccggtcgggcagtccttattgctggccagccgggcacggggaagacggccatcgccatgggcatggcgcaggccctgggccctgacacgccattcacagccatcgccggcagtgaaatcttctccctggagatgagcaagaccgaggcgctgacgcaggccttccggcggtccatcggcgttcgcatcaaggaggagacggagatcatcgaaggggaggtggtggagatccagattgatcgaccagcaacagggacgggctccaaggtgggcaaactgaccctcaagaccacagagatggagaccatctacgacctgggcaccaagatgattgagtccctgaccaaggacaaggtccaggccggggacgtgatcaccatcgacaaggcgacgggcaagatctccaagctgggccgctccttcacacgcgcccgcgactacgacgctatgggctcccagaccaagttcgtgcagtgcccagatggggagctccagaaacgcaaggaggtggtgcacaccgtgtccctgcacgagatcgacgtcatcaactctcgcacccagggcttcctggcgctcttctcaggtgacacaggggagatcaagtcagaagtccgtgagcagatcaatgccaaggtggctgagtggcgcgaggagggcaaggcggagatcatccctggagtgctgttcatcgacgaggtccacatgctggacatcgagagcttctccttcctcaaccgggccctggagagtgacatggcgcctgtcctgatcatggccaccaaccgtggcatcacgcgaatccggggcaccagctaccagagccctcacggcatccccatagacctgctggaccggctgcttatcgtctccaccaccccctacagcgagaaagacacgaagcagatcctccgcatccggtgcgaggaagaagatgtggagatgagtgaggacgcctacacggtgctgacccgcatcgggctggagacgtcactgcgctacgccatccagctcatcacagctgccagcttggtgtgccggaaacgcaagggtacagaagtgcaggtggatgacatcaagcgggtctactcactcttcctggacgagtcccgctccacgcagtacatgaaggagtaccaggacgccttcctcttcaacgaactcaaaggcgagaccatggacacctcctgagttggatgtcatcccccgaccccaccctgttttccaccagagttctgacactgtgactctgtataaaatggttgggaagctgca

SEQ ID NO: 282567 - DNA, 1527 bp, Homo sapiens
ccagtaaggccgcggtttattcggccgaggactctggcagttggtgagcatcatggcaacgttacagccacaaccaaagtcccggagatccgtgatgtaacaaggattgagcgaatcggtgcccactcccacatccggggactggggctggacgatgccttggagcctcggcaggcttcgcaaggcatggtgggtcagctggcggcacggcgggcggctggcgtggtgctggagatgatccgggaagggaagattgccggtcgggcagtccttattgctggccagccgggcacggggaagacggccatcgccatgggcatggcgcaggccctgggccctgacacgccattcacagccatcgccggcagtgaaatcttctccctggagatgagcaagaccgaggcgctgacgcaggccttccggcggtccatcggcgttcgcatcaaggaggagacggagatcatcgaaggggaggtggtggagatccagattgatcgaccagcaacagggacgggctccaaggtgggcaaactgaccctcaagaccacagagatggagaccatctacgacctgggcaccaagatgattgagtccctgaccaaggacaaggtccaggccggggacgtgatcaccatcgacaaggcgacgggcaagatctccaagctgggccgctccttcacacgcgcccgcgactacgacgctatgggctcccagaccaagttcgtgcagtgcccagatggggagctccagaaacgcaaggaggtggtgcacaccgtgtccctgcacgagatcgacgtcatcaactctcgcacccagggcttcctggcgctcttctcaggtgacacaggggagatcaagtcagaagtccgtgagcagatcaatgccaaggtggctgagtggcgcgaggagggcaaggcggagatcatccctggagtgctgttcatcgacgaggtccacatgctggacatcgagagcttctccttcctcaaccgggccctggagagtgacatggcgcctgtcctgatcatggccaccaaccgtggcatcacgcgaatccggggcaccagctaccagagccctcacggcatccccatagacctgctggaccggctgcttatcgtctccaccaccccctacagcgagaaagacacgaagcagatcctccgcatccggtgcgaggaagaagatgtggagatgagtgaggacgcctacacggtgctgacccgcatcgggctggagacgtcactgcgctacgccatccagctcatcacagctgccagcttggtgtgccggaaacgcaagggtacagaagtgcaggtggatgacatcaagcgggtctactcactcttcctggacgagtcccgctccacgcagtacatgaaggagtaccaggacgccttcctcttcaacgaactcaaaggcgagaccatggacacctcctgagttggatgtcatcccccgaccccaccctgttttccaccagagttctgacactgtgactctgtataaaatggttgggaagctgca

SEQ ID NO: 282568 - DNA, 1772 bp, Homo sapiens
tggagctggaggcctcaaagtggggaggaggaggagggtgggataaagaggaaaggagcgtggaggacgtgtggttactcaaagaacagctaagaattttgcaatcggcctgagcggggcggtggtggggctgagcaaaaggaggaggagccaggagacattgggaatggacccaggagttccggacgcccgtcttccagcgcagcctcggtgggagggcggggcataaagtcccgccacgcccccacaatatttacatatttatgaggaaccatcgagatctttgaagaaccagctagcctagaggagccagaacatctcgctcctcgcgcgtttccgtttccgctaggactctggcagttggtgcccactcccacatccggggactggggctggacgatgccttggagcctcggcaggcttcgcaaggcatggtgggtcagctggcggcacggcgggcggctggcgtggtgctggagatgatccgggaagggaagattgccggtcgggcagtccttattgctggccagccgggcacggggaagacggccatcgccatgggcatggcgcaggccctgggccctgacacgccattcacagccatcgccggcagtgaaatcttctccctggagatgagcaagaccgaggcgctgacgcaggccttccggcggtccatcggcgttcgcatcaaggaggagacggagatcatcgaaggggaggtggtggagatccagattgatcgaccagcaacagggacgggctccaaggtgggcaaactgaccctcaagaccacagagatggagaccatctacgacctgggcaccaagatgattgagtccctgaccaaggacaaggtccaggccggggacgtgatcaccatcgacaaggcgacgggcaagatctccaagctgggccgctccttcacacgcgcccgcgactacgacgctatgggctcccagaccaagttcgtgcagtgcccagatggggagctccagaaacgcaaggaggtggtgcacaccgtgtccctgcacgagatcgacgtcatcaactctcgcacccagggcttcctggcgctcttctcaggtgacacaggggagatcaagtcagaagtccgtgagcagatcaatgccaaggtggctgagtggcgcgaggagggcaaggcggagatcatccctggagtgctgttcatcgacgaggtccacatgctggacatcgagagcttctccttcctcaaccgggccctggagagtgacatggcgcctgtcctgatcatggccaccaaccgtggcatcacgcgaatccggggcaccagctaccagagccctcacggcatccccatagacctgctggaccggctgcttatcgtctccaccaccccctacagcgagaaagacacgaagcagatcctccgcatccggtgcgaggaagaagatgtggagatgagtgaggacgcctacacggtgctgacccgcatcgggctggagacgtcactgcgctacgccatccagctcatcacagctgccagcttggtgtgccggaaacgcaagggtacagaagtgcaggtggatgacatcaagcgggtctactcactcttcctggacgagtcccgctccacgcagtacatgaaggagtaccaggacgccttcctcttcaacgaactcaaaggcgagaccatggacacctcctgagttggatgtcatcccccgaccccaccctgttttccaccagagttctgacactgtgactctgtataaaatggttgggaagctgca

SEQ ID NO: 282569 - DNA, 1815 bp, Homo sapiens
tggagctggaggcctcaaagtggggaggaggaggagggtgggataaagaggaaaggagcgtggaggacgtgtggttactcaaagaacagctaagaattttgcaatcggcctgagcggggcggtggtggggctgagcaaaaggaggaggagccaggagacattgggaatggacccaggagttccggacgcccgtcttccagcgcagcctcggtgggagggcggggcataaagtcccgccacgcccccacaatatttacatatttatgaggaaccatcgagatctttgaagaaccagctagcctagaggagccagaacatctcgctcctcgcgcgtttccgtttccgctaggactctggcagttggtgagcatcatggcaaccgttacagccacaaccaaagtcccggagatccgtgatgtaacaaggattgagcgaatcggtgcccactcccacatccggggactggggctggacgatgccttggagcctcggcaggcttcgcaaggcatggtgggtcagctggcggcacggcgggcggctggcgtggtgctggagatgatccgggaagggaagattgccggtcgggcagtcctcatcgccatgggcatggcgcaggccctgggccctgacacgccattcacagccatcgccggcagtgaaatcttctccctggagatgagcaagaccgaggcgctgacgcaggccttccggcggtccatcggcgttcgcatcaaggaggagacggagatcatcgaaggggaggtggtggagatccagattgatcgaccagcaacagggacgggctccaaggtgggcaaactgaccctcaagaccacagagatggagaccatctacgacctgggcaccaagatgattgagtccctgaccaaggacaaggtccaggccggggacgtgatcaccatcgacaaggcgacgggcaagatctccaagctgggccgctccttcacacgcgcccgcgactacgacgctatgggctcccagaccaagttcgtgcagtgcccagatggggagctccagaaacgcaaggaggtggtgcacaccgtgtccctgcacgagatcgacgtcatcaactctcgcacccagggcttcctggcgctcttctcaggtgacacaggggagatcaagtcagaagtccgtgagcagatcaatgccaaggtggctgagtggcgcgaggagggcaaggcggagatcatccctggagtgctgttcatcgacgaggtccacatgctggacatcgagagcttctccttcctcaaccgggccctggagagtgacatggcgcctgtcctgatcatggccaccaaccgtggcatcacgcgaatccggggcaccagctaccagagccctcacggcatccccatagacctgctggaccggctgcttatcgtctccaccaccccctacagcgagaaagacacgaagcagatcctccgcatccggtgcgaggaagaagatgtggagatgagtgaggacgcctacacggtgctgacccgcatcgggctggagacgtcactgcgctacgccatccagctcatcacagctgccagcttggtgtgccggaaacgcaagggtacagaagtgcaggtggatgacatcaagcgggtctactcactcttcctggacgagtcccgctccacgcagtacatgaaggagtaccaggacgccttcctcttcaacgaactcaaaggcgagaccatggacacctcctgagttggatgtcatcccccgaccccaccctgttttccaccagagttctgacactgtgactctgtataaaatggttgggaagctgca

SEQ ID NO: 282570 - DNA, 1420 bp, Homo sapiens
ctctggcagtggtgagcatcatggcaaccgttacagccacaaccaaagtcccggagatccgtgatgtaacaaggattgagcgaatcggtgcccactcccacatccggggactggggctggacgatgccttggagcctcggcaggcttcgcaaggcatggtgggtcagctggcggcacggcgggcggctggcgtggtgctggagatgatccgggaagggaagattgccggtcgggcagtccttattgctggccagccgggcacggggaagacggccatcgccatgggcatggcgcaggccctgggccctgacacgccattcacagccatcgccggcagtgaaatcttctccctggagatgagcaagaccgaggcgctgacgcaggccttccggcggtccatcggcgttcgcatcaggtgggcaaactgaccctcaagaccacagagatggagaccatctacgacctgggcaccaagatgattgagtccctgaccaaggacaaggtccaggccggggacgtgatcaccatcgacaaggcgacgggcaagatctccaagctgggccgctccttcacacgcgcccgcgactacgacgctatgggctcccagaccaagttcgtgcagtgcccagatggggagctccagaaacgcaaggaggtggtgcacaccgtgtccctgcacgagatcgacgtcatcaactctcgcacccagggcttcctggcgctcttctcaggtgacacaggggagatcaagtcagaagtccgtgagcagatcaatgccaaggtggctgagtggcgcgaggagggcaaggcggagatcatccctggagtgctgttcatcgacgaggtccacatgctggacatcgagagcttctccttcctcaaccgggccctggagagtgacatggcgcctgtcctgatcatggccaccaaccgtggcatcacgcgaatccggggcaccagctaccagagccctcacggcatccccatagacctgctggaccggctgcttatcgtctccaccaccccctacagcgagaaagacacgaagcagatcctccgcatccggtgcgaggaagaagatgtggagatgagtgaggacgcctacacggtgctgacccgcatcgggctggagacgtcactgcgctacgccatccagctcatcacagctgccagcttggtgtgccggaaacgcaagggtacagaagtgcaggtggatgacatcaagcgggtctactcactcttcctggacgagtcccgctccacgcagtacatgaaggagtaccaggacgccttcctcttcaacgaactcaaaggcgagaccatggacacctcctgagttggatgtcatcccccgaccccaccctgttttccaccagagttctgacactgtgactctgtataaaatggttgggaagctgca

SEQ ID NO: 282571 - DNA, 1553 bp, Homo sapiens
  misc_feature (1)..(1): n is a, c, g, or t
  misc_feature (23)..(24): n is a, c, g, or t
naagcctagggctaggtacgagnnctgggtgttagttggtgagcatcatggcaaccgttacagccacaaccaaagtcccggagatccgtgatgtaacaaggattgagcgaatcggtgcccactcccacatccggggactggggctggacgatgccttggagcctcggcaggcttcgcaaggcatggtgggtcagctggcggcacggcgggcggctggcgtggtgctggagatgatccgggaagggaagattgccggtcgggcagtccttattgctggccagccgggcacggggaagacggccatcgccatgggcatggcgcaggccctgggccctgacacgccattcacagccatcgccggcagtgaaatcttctccctggagatgagcaagaccgaggcgctgacgcaggccttccggcggtccatcggcgttcgcatcaaggaggagacggagatcatcgaaggggaggtggtggagatccagattgatcgaccagcaacagggacgggctccaaggtgggcaaactgaccctcaagaccacagagatggagaccatctacgacctgggcaccaagatgattgagtccctgaccaaggacaaggtccaggccggggacgtgatcaccggtgggaattccaacccccaaattccgggaatcgacaaggcgacgggcaagatctccaagctgggccgctccttcacacgcgcccgcgactacgacgctatgggctcccagaccaagttcgtgcagtgcccagatggggagctccagaaacgcaaggaggtggtgcacaccgtgtccctgcacgagatcgacgtcatcaactctcgcacccagggcttcctggcgctcttctcaggtgacacaggggagatcaagtcagaagtccgtgagcagatcaatgccaaggtggctgagtggcgcgaggagggcaaggcggagatcatccctggagtgctgttcatcgacgaggtccacatgctggacatcgagagcttctccttcctcaaccgggccctggagagtgacatggcgcctgtcctgatcatggccaccaaccgtggcatcacgcgaatccggggcaccagctaccagagccctcacggcatccccatagacctgctggaccggctgcttatcgtctccaccaccccctacagcgagaaagacacgaagcagatcctccgcatccggtgcgaggaagaagatgtggagatgagtgaggacgcctacacggtgctgacccgcatcgggctggagacgtcactgcgctacgccatccagctcatcacagctgccagcttggtgtgccggaaacgcaagggtacagaagtgcaggtggatgacatcaagcgggtctactcactcttcctggacgagtcccgctccacgcagtacatgaaggagtaccaggacgccttcctcttcaacgaactcaaaggcgagaccatggacacctcctgagttggatgtcatcccccgaccccaccctgttttccaccagagttctgacactgtgactctgtataaaatggttgggaagctgca

SEQ ID NO: 282572 - DNA, 1498 bp, Homo sapiens
tggagctggaggcctcaaagtggggaggaggaggagggtgggataaagaggaaaggagcgtggaggacgtgtggttactcaaagaacagctaagaattttgcaatcggcctgagcggggcggtggtggggctgagcaaaaggaggaggagccaggagacattgggaatggacccaggagttccggacgcccgtcttccagcgcagcctcggtgggagggcggggcataaagtcccgccacgcccccacaatatttacatatttatgaggaaccatcgagatctttgaagaaccagctagcctagaggagccagaacatctcgctcctcgcgcgtttccgtttccgctaggactctggcagttggtgagcatcatggcaaccgttacagccacaaccaaagtcccggagatccgtgatgtaacaaggattgagcgaatcggtgcccactcccacatccggggactggggctggacgatgccttggagcctcggcaggcttcgcaaggcatggtgggtcagctggcggcacggcgggcggctggcgtggtgctggagatgatccgggaagggaagattgccggtcgggcagtccttattgctggccagccgggcacggggaagacggccatcgccatgggcatggcgcaggccctgggccctgacacgccattcacagccatcgccggcagtgaaatcttctccctggagatgagcaagaccgaggcgctgacgcaggccttccggcggtccatcggcgttcgcatccgtcatcaactctcgcacccagggcttcctggcgctcttctcaggtgacacaggggagatcaagtcagaagtccgtgagcagatcaatgccaaggtggctgagtggcgcgaggagggcaaggcggagatcatccctggagtgctgttcatcgacgaggtccacatgctggacatcgagagcttctccttcctcaaccgggccctggagagtgacatggcgcctgtcctgatcatggccaccaaccgtggcatcacgcgaatccggggcaccagctaccagagccctcacggcatccccatagacctgctggaccggctgcttatcgtctccaccaccccctacagcgagaaagacacgaagcagatcctccgcatccggtgcgaggaagaagatgtggagatgagtgaggacgcctacacggtgctgacccgcatcgggctggagacgtcactgcgctacgccatccagctcatcacagctgccagcttggtgtgccggaaacgcaagggtacagaagtgcaggtggatgacatcaagcgggtctactcactcttcctggacgagtcccgctccacgcagtacatgaaggagtaccaggacgccttcctcttcaacgaactcaaaggcgagaccatggacacctcctgagttggatgtcatcccccgaccccaccctgttttccaccagagttctgacactgtgactctgtataaaatggttgggaagctgca

SEQ ID NO: 282573 - DNA, 544 bp, Homo sapiens
tcgctattcattcggcactcgctattcatcggcacctcagtacgaatacagaccgtgaaagcggggcctcacgatccttcgctattcatcggcacctcgctattcatcggcacccctgctggaccggctgcttatcgtctccaccaccccctacagcgagaaagacacgaagcagatcctccgcatccggtgcgaggaagaagatgtggagatgagtgaggacgcctacacggtgctgacccgcatcgggctggagacgtcactgcgctacgccatccagctcatcacagctgccagcttggtgtgccggaaacgcaagggtacagaagtgcaggtggatgacatcaagcgggtctactcactcttcctggacgagtcccgctccacgcagtacatgaaggagtaccaggacgccttcctcttcaacgaactcaaaggcgagaccatggacacctcctgagttggatgtcatcccccgaccccaccctgttttccaccagagttctgacactgtgactctgtataaaatggttgggaagctgca

SEQ ID NO: 282574 - DNA, 1079 bp, Homo sapiens
tccaactttcaaaatcatcttggcgcaacggccggttccgcagtccttggcgccagtgtgtgatgaggagggttgtaggaccttgcgcttcgagccatttgggagccttggattgttagtggtgccaatggcacttgagttccaagctggaagcacaggcaggtacctgttcagtgtgtctgagagcgcgagggcgcctagtgagcctttagtgggaagaaattgtcgaggaacaagagagtcttagtggagaggactgaaggattagggacccagaaatcgggatcttgtcatgctaccgttttggccattttcatatttccagtatttcacacgggctacgtctcagtgtaaatgctcaataaattatcacttgaatatttgaatgaatgaatacatgtgaatgaaggagaggccaggaaacttggcctggcacctgctcaattacctgaataaagaagcgattttggcctggcgtggtggctcatgcctgtaatcccagcactttgggaggccgaggcgggcggatcacttcaggtcaggagttcgtggccaacattgcgaaaccccgtctctattaaaaatacaaaaattagccaggtgtggtggtgcaggcctgtaatcccagctactcagaaggctgaggcaggagaatcgcttgaacctgggaggcagaagttgcagtgagccaagatcgcgccactgcattccagcctgggcgacaaagcgagactctgtctccaaaaaaaaaaagtacagccacaaccaaagtcccggagatccgtgatgtaacaaggattgagcgaatcggtgcccactcccacatccggggactggggctggacgatgccttggagcctcggcaggcttcgcaaggcatggtgggtcagctggcggcacggcgggccgagtcccgctccacgcagtacatgaaggagtaccaggacgccttcctcttcaacgaactcaaaggcgagaccatggacacctcctgagttggatgtcatcccccgaccccaccctgttttccaccagagttctgacactgtgactctgtataaaatggttgggaagctgca

SEQ ID NO: 282575 - DNA, 605 bp, Homo sapiens
caagagagtcttagtggagaggactgaaggattagggacccagaaatcgggatcttgtcatgctaccgttttggccattttcatatttccagtatttcacacgggctacgtctcagtgtaaatgctcaataaattatcacttgaatatttgaatgaatgaatacatgtgaatgaaggagaggccaggaaacttggcctggcacctgctcaattacctgaataaagaagcgattttggcctggcgtggtggctcatgcctgtaatcccagcactttgggaggccgaggcgggcggatcacttcaggtcaggagttcgtggccaacattgcgaaaccccgtctctattaaaaatacaaaaattagccaggtgtggtggtgcaggcctgtaatcccagctactcagaaggctgaggcaggagaatcgcttgaacctgggaggcagaagttgcagtgagccaagatcgcgccactgcattccagcctgggcgacaaagcgagactctgtctccaaaaaaaaaaaggtaatgtgacctgaacttagggactgggctgggcttacaggtgcctcaatttccatgatgagcccagtcaagatggaggaaggg

SEQ ID NO: 282576 - DNA, 1587 bp, Homo sapiens
caaggtagctggtgggaatcggacgagagttggtgagcatcatggcaaccgtttacagccacaaccaaagtcccggagatccgtgatgtaacaaggattgagcgaatcggtgcccactcccacatccggggactggggctggacgatgccttggagcctcggagcttcctgatgtggtagaaatgccatggtagccccacaggaaatcacctcatgtgcgcctcccacccacaggcttcgcaaggcatggtgggtcagctggcggcacggcgggcggctggcgtggtgctggagatgatccgggaagggaagattgccggtcgggcagtccttattgctggccagccgggcacggggaagacggccatcgccatgggcatggcgcaggccctgggccctgacacgccattcacagccatcgccggcagtgaaatcttctccctggagatgagcaagaccgaggcgctgacgcaggccttccggcggtccatcggcgttcgcatcaaggaggagacggagatcatcgaaggggaggtggtggagatccagattgatcgaccagcaacagggacgggctccaaggtgggcaaactgaccctcaagaccacagagatggagaccatctacgacctgggcaccaagatgattgagtccctgaccaaggacaaggtccaggccggggacgtgatcaccatcgacaaggcgacgggcaagatctccaagctgggccgctccttcacacgcgcccgcgactacgacgctatgggctcccagaccaagttcgtgcagtgcccagatggggagctccagaaacgcaaggaggtggtgcacaccgtgtccctgcacgagatcgacgtcatcaactctcgcacccagggcttcctggcgctcttctcaggtgacacaggggagatcaagtcagaagtccgtgagcagatcaatgccaaggtggctgagtggcgcgaggagggcaaggcggagatcatccctggagtgctgttcatcgacgaggtccacatgctggacatcgagagcttctccttcctcaaccgggccctggagagtgacatggcgcctgtcctgatcatggccaccaaccgtggcatcacgcgaatccggggcaccagctaccagagccctcacggcatccccatagacctgctggaccggctgcttatcgtctccaccaccccctacagcgagaaagacacgaagcagatcctccgcatccggtgcgaggaagaagatgtggagatgagtgaggacgcctacacggtgctgacccgcatcgggctggagacgtcactgcgctacgccatccagctcatcacagctgccagcttggtgtgccggaaacgcaagggtacagaagtgcaggtggatgacatcaagcgggtctactcactcttcctggacgagtcccgctccacgcagtacatgaaggagtaccaggacgccttcctcttcaacgaactcaaaggcgagaccatggacacctcctgagttggatgtcatcccccgaccccaccctgttttccaccagagttctgacactgtgactctgtataaaatggttgggaagctgca

SEQ ID NO: 282577 - DNA, 1070 bp, Homo sapiens
  misc_feature (902)..(902): n is a, c, g, or t
  misc_feature (1069)..(1069): n is a, c, g, or t
ccagtaaggccgcggtttattcggccgaggactctggcagttggtgagcatcatggcaacgttacagccacaaccaaagtcccggagatccgtgatgtaacaaggattgagcgaatcggtgcccactcccacatccggggactggggctggacgatgccttggagcctcggcaggcttcgcaaggcatggtgggtcagctggcggcacggcgggcggctggcgtggtgctggagatgatccgggaagggaagattgccggtcgggcagtccttattgctggccagccgggcacggggaagacggccatcgccatgggcatggcgcaggccctgggccctgacacgccattcacagccatcgccggcagtgaaatcttctccctggagatgagcaagaccgaggcgctgacgcaggccttccggcggtccatcggcgttcgcatcaaggaggagacggagatcatcgaaggggaggtggtggagatccagattgatcgaccagcaacagggacgggctccaaggtgggcaaactgaccctcaagaccacagagatggagaccatctacgacctgggcaccaagatgattgagtccctgaccaaggacaaggtccaggccggggacgtgatcaccatcgacaaggcgacgggcaagatctccaagctgggccgctccttcacacgcgcccgcgactacgacgctatgggctcccagaccaagttcgtgcagtgcccagatggggagctccagaaacgcaaggaggtggtgcacaccgtgtccctgcacgagatcgacgtcatcaactctcgcacccagggcttcctggcgctcttctcaggtgacacacggggagatcagtcgaagtcgtgagccgatccatgcaggtggtgatgcccgggggnaggggatctcctgggtgtgtcccggagccctggtggtggggtctcctcccacggcggggagatgggcgctgttggcccgggtccatgggctcacccggccagcgggggttttccccggaaaactgccggagataggcggggcctgtggtgtgttcttccacctcccng

SEQ ID NO: 282578 - DNA, 1907 bp, Homo sapiens
tggagctggaggcctcaaagtggggaggaggaggagggtgggataaagaggaaaggagcgtggaggacgtgtggttactcaaagaacagctaagaattttgcaatcggcctgagcggggcggtggtggggctgagcaaaaggaggaggagccaggagacattgggaatggacccaggagttccggacgcccgtcttccagcgcagcctcggtgggagggcggggcataaagtcccgccacgcccccacaatatttacatatttatgaggaaccatcgagatctttgaagaaccagctagcctagaggagccagaacatctcgctcctcgcgcgtttccgtttccgctaggactctggcagttggtgagcatcatggcaaccgttacagccacaaccaaagtcccggagatccgtgatgtaacaaggattgagcgaatcggtgcccactcccacatccggggactggggctggacgatgccttggagcctcggcaggcttcgcaaggcatggtgggtcagctggcggcacggcgggcggctggcgtggtgctggagatgatccgggaagggaagattgccggtcgggcagtccttattgctggccagccgggcacggggaagacggccatcgccatgggcatggcgcaggccctgggccctgacacgccattcacagccatcgccggcagtgaaatcttctccctggagatgagcaagaccgaggcgctgacgcaggccttccggcggtccatcggcgttcgcatcaaggaggagacggagatcatcgaaggggaggtggtggagatccagattgatcgaccagcaacagggacgggctccaaggtgggcaaactgaccctcaagaccacagagatggagaccatctacgacctgggcaccaagatgattgagtccctgaccaaggacaaggtccaggccggggacgtgatcaccatcgacaaggcgacgggcaagatctccaagctgggccgctccttcacacgcgcccgcgactacgacgctatgggctcccagaccaagttcgtgcagtgcccagatggggagctccagaaacgcaaggaggtggtgcacaccgtgtccctgcacgagatcgacgtcatcaactctcgcacccagggcttcctggcgctcttctcaggtgacacaggggagatcaagtcagaagtccgtgagcagatcaatgccaaggtggctgagtggcgcgaggagggcaaggcggagatcatccctggagtgctgttcatcgacgaggtccacatgctggacatcgagagcttctccttcctcaaccgggccctggagagtgacatggcgcctgtcctgatcatggccaccaaccgtggcatcacgcgaatccggggcaccagctaccagagccctcacggcatccccatagacctgctggaccggctgcttatcgtctccaccaccccctacagcgagaaagacacgaagcagatcctccgcatccggtgcgaggaagaagatgtggagatgagtgaggacgcctacacggtgctgacccgcatcgggctggagacgtcactgcgctacgccatccagctcatcacagctgccagcttggtgtgccggaaacgcaagggtacagaagtgcaggtggatgacatcaagcgggtctactcactcttcctggacgagtcccgctccacgcagtacatgaaggagtaccaggacgccttcctcttcaacgaactcaaaggcgagaccatggacacctcctgagttggatgtcatcccccgaccccaccctgttttccaccagagttctgacactgtgactctgtataaaatggttgggaagctgcacccaccctgtgtatgtgtggttgccctgagcccacagaaagacacctccagagtgcgga

SEQ ID NO: 282579 - DNA, 1664 bp, Homo sapiens
tggagctggaggcctcaaagtggggaggaggaggagggtgggataaagaggaaaggagcgtggaggacgtgtggttactcaaagaacagctaagaattttgcaatcggcctgagcggggcggtggtggggctgagcaaaaggaggaggagccaggagacattgggaatggacccaggagttccggacgcccgtcttccagcgcagcctcggtgggagggcggggcataaagtcccgccacgcccccacaatatttacatatttatgaggaaccatcgagatctttgaagaaccagctagcctagaggagccagaacatctcgctcctcgcgcgtttccgtttccgctaggactctggcagttggtgagcatcatggcaaccgttacagccacaaccaaagtcccggagatccgtgatgtaacaaggattgagcgaatcggtgcccactcccacatccggggactggggctggacgatgccttggagcctcggcaggcttcgcaaggcatggtgggtcagctggcggcacggcgggcggctggcgtggtgctggagatgatccgggaagggaagattgccggtcgggcagtccttattgctggccagccgggcacggggaagacggccatcgccatgggcatggcgcaggccctgggccctgacacgccattcacagccatcgccggcagtgaaatcttctccctggagatgagcaagaccgaggcgctgacgcaggccttccggcggtccatcggcgttcgcatcaaggaggagacggagatcatcgaaggggaggtggtggagatccagattgatcgaccagcaacagggacgggctccaaggtgggcaaactgaccctcaagaccacagagatggagaccatctacgacctgggcaccaagatgattgagtccctgaccaaggacaaggtccaggccggggacgtgatcaccatcgacaaggcgacgggcaagatctccaagctgggccgctccttcacacgcgcccgcgactacgacgctatgggctcccagaccaagttcgtgcagtgcccagatggggagctccagaaacgcaaggaggtggtgcacaccgtgtccctgcacgagatcgacgtcatcaactctcgcacccagggcttcctggcgctcttctcaggtgacacaggggagatcaagtcagaagtccgtgagcagatcaatgccaaggtggctgagtggcgcgaggagggcaaggcggagatcatccctggagtgctgttcatcgacgaggtccacatgctggacatcgagagcttctccttcctcaaccgggccctggagagtgacatggcgcctgtcctgatcatggccaccaaccgtggcatcacgcgaatccggggcaccagctaccagagccctcacggcatccccatagacctgctggaccggctgcttatcgtctccaccaccccctacagcgagaaagacacgaagcagatcctccgcatccggtgcgaggaagaagatgtggagatgagtgaggacgcctacacggtgctgacccgcatcgggctggagacgtcactgcgctacgccatccagctcatcacagctgccagcttggtgtgccggaaacgcaagggtacaatgtgcacatgtaccctaaaacttaaagtataata

SEQ ID NO: 282580 - DNA, 1828 bp, Homo sapiens
tggagctggaggcctcaaagtggggaggaggaggagggtgggataaagaggaaaggagcgtggaggacgtgtggttactcaaagaacagctaagaattttgcaatcggcctgagcggggcggtggtggggctgagcaaaaggaggaggagccaggagacattgggaatggacccaggagttccggacgcccgtcttccagcgcagcctcggtgggagggcggggcataaagtcccgccacgcccccacaatatttacatatttatgaggaaccatcgagatctttgaagaaccagctagcctagaggagccagaacatctcgctcctcgcgcgtttccgtttccgctaggactctggcagttgtacagccacaaccaaagtcccggagatccgtgatgtaacaaggattgagcgaatcggtgcccactcccacatccggggactggggctggacgatgccttggagcctcggcaggcttcgcaaggcatggtgggtcagctggcggcacggcgggcggctggcgtggtgctggagatgatccgggaagggaagattgccggtcgggcagtccttattgctggccagccgggcacggggaagacggccatcgccatgggcatggcgcaggccctgggccctgacacgccattcacagccatcgccggcagtgaaatcttctccctggagatgagcaagaccgaggcgctgacgcaggccttccggcggtccatcggcgttcgcatcaaggaggagacggagatcatcgaaggggaggtggtggagatccagattgatcgaccagcaacagggacgggctccaaggtgggcaaactgaccctcaagaccacagagatggagaccatctacgacctgggcaccaagatgattgagtccctgaccaaggacaaggtccaggccggggacgtgatcaccatcgacaaggcgacgggcaagatctccaagctgggccgctccttcacacgcgcccgcgactacgacgctatgggctcccagaccaagttcgtgcagtgcccagatggggagctccagaaacgcaaggaggtggtgcacaccgtgtccctgcacgagatcgacgtcatcaactctcgcacccagggcttcctggcgctcttctcaggtgacacaggggagatcaagtcagaagtccgtgagcagatcaatgccaaggtggctgagtggcgcgaggagggcaaggcggagatcatccctggagtgctgttcatcgacgaggtccacatgctggacatcgagagcttctccttcctcaaccgggccctggagagtgacatggcgcctgtcctgatcatggccaccaaccgtggcatcacgcgaatccggggcaccagctaccagagccctcacggcatccccatagacctgctggaccggctgcttatcgtctccaccaccccctacagcgagaaagacacgaagcagatcctccgcatccggtgcgaggaagaagatgtggagatgagtgaggacgcctacacggtgctgacccgcatcgggctggagacgtcactgcgctacgccatccagctcatcacagctgccagcttggtgtgccggaaacgcaagggtacagaagtgcaggtggatgacatcaagcgggtctactcactcttcctggacgagtcccgctccacgcagtacatgaaggagtaccaggacgccttcctcttcaacgaactcaaaggcgagaccatggacacctcctgagttggatgtcatcccccgaccccaccctgttttccaccagagttctgacactgtgactctgtataaaatggttgggaagctgca

SEQ ID NO: 282581 - DNA, 1495 bp, Homo sapiens
cctggtggcgaattcggcacgaggcagttgtacagccacaaccaaagtcccggagatccgtgatgtaacaaggattgagcgaatcggtgcccactcccacatccggggactggggctggacgatgccttggagcctcggcaggcttcgcaaggcatggtgggtcagctggcggcacggcgggcggctggcgtggtgctggagatgatccgggaagggaagattgccggtcgggcagtccttattgctggccagccgggcacggggaagacggccatcgccatgggcatggcgcaggccctgggccctgacacgccattcacagccatcgccggcagtgaaatcttctccctggagatgagcaagaccgaggcgctgacgcaggccttccggcggtccatcggcgttcgcatcaaggaggagacggagatcatcgaaggggaggtggtggagatccagattgatcgaccagcaacagggacgggctccaaggtgggcaaactgaccctcaagaccacagagatggagaccatctacgacctgggcaccaagatgattgagtccctgaccaaggacaaggtccaggccggggacgtgatcaccatcgacaaggcgacgggcaagatctccaagctgggccgctccttcacacgcgcccgcgactacgacgctatgggctcccagaccaagttcgtgcagtgcccagatggggagctccagaaacgcaaggaggtggtgcacaccgtgtccctgcacgagatcgacgtcatcaactctcgcacccagggcttcctggcgctcttctcaggtgacacaggggagatcaagtcagaagtccgtgagcagatcaatgccaaggtggctgagtggcgcgaggagggcaaggcggagatcatccctggagtgctgttcatcgacgaggtccacatgctggacatcgagagcttctccttcctcaaccgggccctggagagtgacatggcgcctgtcctgatcatggccaccaaccgtggcatcacgcgaatccggggcaccagctaccagagccctcacggcatccccatagacctgctggaccggctgcttatcgtctccaccaccccctacagcgagaaagacacgaagcagatcctccgcatccggtgcgaggaagaagatgtggagatgagtgaggacgcctacacggtgctgacccgcatcgggctggagacgtcactgcgctacgccatccagctcatcacagctgccagcttggtgtgccggaaacgcaagggtacagaagtgcaggtggatgacatcaagcgggtctactcactcttcctggacgagtcccgctccacgcagtacatgaaggagtaccaggacgccttcctcttcaacgaactcaaaggcgagaccatggacacctcctgagttggatgtcatcccccgaccccaccctgttttccaccagagttctgacactgtgactctgtataaaatggttgggaagctgca

SEQ ID NO: 282582 - DNA, 1502 bp, Homo sapiens
  misc_feature (22)..(23): n is a, c, g, or t
  misc_feature (25)..(25): n is a, c, g, or t
taggctaggtacgaggctgggnntntatggcaaccgttacagccacaaccaaagtcccggagatccgtgatgtaacaaggattgagcgaatcggtgcccactcccacatccggggactggggctggacgatgccttggagcctcggcaggcttcgcaaggcatggtgggtcagctggcggcacggcgggcggctggcgtggtgctggagatgatccgggaagggaagattgccggtcgggcagtccttattgctggccagccgggcacggggaagacggccatcgccatgggcatggcgcaggccctgggccctgacacgccattcacagccatcgccggcagtgaaatcttctccctggagatgagcaagaccgaggcgctgacgcaggccttccggcggtccatcggcgttcgcatcaaggaggagacggagatcatcgaaggggaggtggtggagatccagattgatcgaccagcaacagggacgggctccaaggtgggcaaactgaccctcaagaccacagagatggagaccatctacgacctgggcaccaagatgattgagtccctgaccaaggacaaggtccaggccggggacgtgatcaccatcgacaaggcgacgggcaagatctccaagctgggccgctccttcacacgcgcccgcgactacgacgctatgggctcccagaccaagttcgtgcagtgcccagatggggagctccagaaacgcaaggaggtggtgcacaccgtgtccctgcacgagatcgacgtcatcaactctcgcacccagggcttcctggcgctcttctcaggtgacacaggggagatcaagtcagaagtccgtgagcagatcaatgccaaggtggctgagtggcgcgaggagggcaaggcggagatcatccctggagtgctgttcatcgacgaggtccacatgctggacatcgagagcttctccttcctcaaccgggccctggagagtgacatggcgcctgtcctgatcatggccaccaaccgtggcatcacgcgaatccggggcaccagctaccagagccctcacggcatccccatagacctgctggaccggctgcttatcgtctccaccaccccctacagcgagaaagacacgaagcagatcctccgcatccggtgcgaggaagaagatgtggagatgagtgaggacgcctacacggtgctgacccgcatcgggctggagacgtcactgcgctacgccatccagctcatcacagctgccagcttggtgtgccggaaacgcaagggtacagaagtgcaggtggatgacatcaagcgggtctactcactcttcctggacgagtcccgctccacgcagtacatgaaggagtaccaggacgccttcctcttcaacgaactcaaaggcgagaccatggacacctcctgagttggatgtcatcccccgaccccaccctgttttccaccagagttctgacactgtgactctgtataaaatggttgggaagctgca

SEQ ID NO: 282583 - DNA, 1523 bp, Homo sapiens
  misc_feature (1)..(1): n is a, c, g, or t
  misc_feature (23)..(24): n is a, c, g, or t
naagcctagggctaggtacgagnnctgggtgttagttggtgagcatcatggcaaccgttacagccacaaccaaagtcccggagatccgtgatgtaacaaggattgagcgaatcggtgcccactcccacatccggggactggggctggacgatgccttggagcctcggcaggcttcgcaaggcatggtgggtcagctggcggcacggcgggcggctggcgtggtgctggagatgatccgggaagggaagattgccggtcgggcagtccttattgctggccagccgggcacggggaagacggccatcgccatgggcatggcgcaggccctgggccctgacacgccattcacagccatcgccggcagtgaaatcttctccctggagatgagcaagaccgaggcgctgacgcaggccttccggcggtccatcggcgttcgcatcaaggaggagacggagatcatcgaaggggaggtggtggagatccagattgatcgaccagcaacagggacgggctccaaggtgggcaaactgaccctcaagaccacagagatggagaccatctacgacctgggcaccaagatgattgagtccctgaccaaggacaaggtccaggccggggacgtgatcaccatcgacaaggcgacgggcaagatctccaagctgggccgctccttcacacgcgcccgcgactacgacgctatgggctcccagaccaagttcgtgcagtgcccagatggggagctccagaaacgcaaggaggtggtgcacaccgtgtccctgcacgagatcgacgtcatcaactctcgcacccagggcttcctggcgctcttctcaggtgacacaggggagatcaagtcagaagtccgtgagcagatcaatgccaaggtggctgagtggcgcgaggagggcaaggcggagatcatccctggagtgctgttcatcgacgaggtccacatgctggacatcgagagcttctccttcctcaaccgggccctggagagtgacatggcgcctgtcctgatcatggccaccaaccgtggcatcacgcgaatccggggcaccagctaccagagccctcacggcatccccatagacctgctggaccggctgcttatcgtctccaccaccccctacagcgagaaagacacgaagcagatcctccgcatccggtgcgaggaagaagatgtggagatgagtgaggacgcctacacggtgctgacccgcatcgggctggagacgtcactgcgctacgccatccagctcatcacagctgccagcttggtgtgccggaaacgcaagggtacagaagtgcaggtggatgacatcaagcgggtctactcactcttcctggacgagtcccgctccacgcagtacatgaaggagtaccaggacgccttcctcttcaacgaactcaaaggcgagaccatggacacctcctgagttggatgtcatcccccgaccccaccctgttttccaccagagttctgacactgtgactctgtataaaatggttgggaagctgca

SEQ ID NO: 282584 - DNA, 1518 bp, Homo sapiens
caaggtagctggtgggaatcggacgagagttggtgagcatcatggcaaccgtttacagccacaaccaaagtcccggagatccgtgatgtaacaaggattgagcgaatcggtgcccactcccacatccggggactggggctggacgatgccttggagcctcggcaggcttcgcaaggcatggtgggtcagctggcggcacggcgggcggctggcgtggtgctggagatgatccgggaagggaagattgccggtcgggcagtccttattgctggccagccgggcacggggaagacggccatcgccatgggcatggcgcaggccctgggccctgacacgccattcacagccatcgccggcagtgaaatcttctccctggagatgagcaagaccgaggcgctgacgcaggccttccggcggtccatcggcgttcgcatcaaggaggagacggagatcatcgaaggggaggtggtggagatccagattgatcgaccagcaacagggacgggctccaaggtgggcaaactgaccctcaagaccacagagatggagaccatctacgacctgggcaccaagatgattgagtccctgaccaaggacaaggtccaggccggggacgtgatcaccatcgacaaggcgacgggcaagatctccaagctgggccgctccttcacacgcgcccgcgactacgacgctatgggctcccagaccaagttcgtgcagtgcccagatggggagctccagaaacgcaaggaggtggtgcacaccgtgtccctgcacgagatcgacgtcatcaactctcgcacccagggcttcctggcgctcttctcaggtgacacaggggagatcaagtcagaagtccgtgagcagatcaatgccaaggtggctgagtggcgcgaggagggcaaggcggagatcatccctggagtgctgttcatcgacgaggtccacatgctggacatcgagagcttctccttcctcaaccgggccctggagagtgacatggcgcctgtcctgatcatggccaccaaccgtggcatcacgcgaatccggggcaccagctaccagagccctcacggcatccccatagacctgctggaccggctgcttatcgtctccaccaccccctacagcgagaaagacacgaagcagatcctccgcatccggtgcgaggaagaagatgtggagatgagtgaggacgcctacacggtgctgacccgcatcgggctggagacgtcactgcgctacgccatccagctcatcacagctgccagcttggtgtgccggaaacgcaagggtacagaagtgcaggtggatgacatcaagcgggtctactcactcttcctggacgagtcccgctccacgcagtacatgaaggagtaccaggacgccttcctcttcaacgaactcaaaggcgagaccatggacacctcctgagttggatgtcatcccccgaccccaccctgttttccaccagagttctgacactgtgactctgtataaaatggttgggaagctgca

SEQ ID NO: 282585 - DNA, 1383 bp, Homo sapiens
  misc_feature (1140)..(1140): n is a, c, g, or t
  misc_feature (1150)..(1150): n is a, c, g, or t
tggagctggaggcctcaaagtggggaggaggaggagggtgggataaagaggaaaggagcgtggaggacgtgtggttactcaaagaacagctaagaattttgcaatcggcctgagcggggcggtggtggggctgagcaaaaggaggaggagccaggagacattgggaatggacccaggagttccggacgcccgtcttccagcgcagcctcggtgggagggcggggcataaagtcccgccacgcccccacaatatttacatatttatgaggaaccatcgagatctttgaagaaccagctagcctagaggagccagaacatctcgctcctcgcgcgtttccgtttccgctaggactctggcagttggtgagcatcatggcaaccgttacagccacaaccaaagtcccggagatccgtgatgtaacaaggattgagcgaatcggtgcccactcccacatccggggactggggctggacgatgccttggagcctcggcaggcttcgcaaggcatggtgggtcagctggcggcacggcgggcggctggcgtggtgctggagatgatccgggaagggaagattgccggtcgggcagtccttattgctggccagccgggcacggggaagacggccatcgccatgggcatggcgcaggccctgggccctgacacgccattcacagccatcgccggcagtgaaatcttctccctggagatgagcaagaccgaggcgctgacgcaggccttccggcggtccatcggcgttcgcatcaaggaggagacggagatcatcgaaggggaggtggtggagatccagattgatcgaccagcaacagggacgggctccaaggtgggcaaactgaccctcaagaccacagagatggagaccatctacgacctgggcaccaagatgattgagtccctgaccaaggacaaggtccaggccggggacgtgatcaccatcgacaaggcgacgggcaagatctccaagctgggccgctccttcacacgcgcccgcgactacgacgctatgggctcccagaccaagttcgtgcagtgcccagatggggagctccaaaacgcagggggtggtgcccccggtcctggccgaatcgagtctcaatctcgcacccaggttccgggcctntccgtgaccnggggagtcacgtcgagccgggcgtcatgccggtgctgcatggccggagggacgggggcatcccgggggggtccccagccccggtggaggcggtcctcccacggcggggaaggcggcggttggtccccggttgctggcggcacccgcctacgggggggttcccccaccaaacctccggtgggagtgacgcggcgcccttcgtgtcttttgtgctcagattcgtcgtctgctgcg

SEQ ID NO: 282586 - DNA, 1440 bp, Homo sapiens
ctctggcagtggtgagcatcatggcaaccgtgtgcccactcccacatccggggactggggctggacgatgccttggagcctcggcaggcttcgcaaggcatggtgggtcagctggcggcacggcgggcggctggcgtggtgctggagatgatccgggaagggaagattgccggtcgggcagtccttattgctggccagccgggcacggggaagacggccatcgccatgggcatggcgcaggccctgggccctgacacgccattcacagccatcgccggcagtgaaatcttctccctggagatgagcaagaccgaggcgctgacgcaggccttccggcggtccatcggcgttcgcatcaaggaggagacggagatcatcgaaggggaggtggtggagatccagattgatcgaccagcaacagggacgggctccaaggtgggcaaactgaccctcaagaccacagagatggagaccatctacgacctgggcaccaagatgattgagtccctgaccaaggacaaggtccaggccggggacgtgatcaccatcgacaaggcgacgggcaagatctccaagctgggccgctccttcacacgcgcccgcgactacgacgctatgggctcccagaccaagttcgtgcagtgcccagatggggagctccagaaacgcaaggaggtggtgcacaccgtgtccctgcacgagatcgacgtcatcaactctcgcacccagggcttcctggcgctcttctcaggtgacacaggggagatcaagtcagaagtccgtgagcagatcaatgccaaggtggctgagtggcgcgaggagggcaaggcggagatcatccctggagtgctgttcatcgacgaggtccacatgctggacatcgagagcttctccttcctcaaccgggccctggagagtgacatggcgcctgtcctgatcatggccaccaaccgtggcatcacgcgaatccggggcaccagctaccagagccctcacggcatccccatagacctgctggaccggctgcttatcgtctccaccaccccctacagcgagaaagacacgaagcagatcctccgcatccggtgcgaggaagaagatgtggagatgagtgaggacgcctacacggtgctgacccgcatcgggctggagacgtcactgcgctacgccatccagctcatcacagctgccagcttggtgtgccggaaacgcaagggtacagaagtgcaggtggatgacatcaagcgggtctactcactcttcctggacgagtcccgctccacgcagtacatgaaggagtaccaggacgccttcctcttcaacgaactcaaaggcgagaccatggacacctcctgagttggatgtcatcccccgaccccaccctgttttccaccagagttctgacactgtgactctgtataaaatggttgggaagctgca

SEQ ID NO: 282587 - DNA, 1107 bp, Homo sapiens
gtcgttgtgcggaatctgtgcggaattcgtcgtcgtggtgcggaattcgtcgtggtggtggagatccagattgatcgaccagcaacagggacgggctccaaggtgggcaaactgaccctcaagaccacagagatggagaccatctacgacctgggcaccaagatgattgagtccctgaccaaggacaaggtccaggccggggacgtgatcaccatcgacaaggcgacgggcaagatctccaagctgggccgctccttcacacgcgcccgcgactacgacgctatgggctcccagaccaagttcgtgcagtgcccagatggggagctccagaaacgcaaggaggtggtgcacaccgtgtccctgcacgagatcgacgtcatcaactctcgcacccagggcttcctggcgctcttctcaggtgacacaggggagatcaagtcagaagtccgtgagcagatcaatgccaaggtggctgagtggcgcgaggagggcaaggcggagatcatccctggagtgctgttcatcgacgaggtccacatgctggacatcgagagcttctccttcctcaaccgggccctggagagtgacatggcgcctgtcctgatcatggccaccaaccgtggcatcacgcgaatccggggcaccagctaccagagccctcacggcatccccatagacctgctggaccggctgcttatcgtctccaccaccccctacagcgagaaagacacgaagcagatcctccgcatccggtgcgaggaagaagatgtggagatgagtgaggacgcctacacggtgctgacccgcatcgggctggagacgtcactgcgctacgccatccagctcatcacagctgccagcttggtgtgccggaaacgcaagggtacagaagtgcaggtggatgacatcaagcgggtctactcactcttcctggacgagtcccgctccacgcagtacatgaaggagtaccaggacgccttcctcttcaacgaactcaaaggcgagaccatggacacctcctgagttggatgtcatcccccgaccccaccctgttttccaccagagttctgacactgtgactctgtataaaatggttgggaagctgca

SEQ ID NO: 282588 - DNA, 866 bp, Homo sapiens
catgcccttccctgccctgtctccgccgttcttcccccacccccgccccatagaccaagttcgtgcagtgcccagatggggagctccagaaacgcaaggaggtggtgcacaccgtgtccctgcacgagatcgacgtcatcaactctcgcacccagggcttcctggcgctcttctcaggtgacacaggggagatcaagtcagaagtccgtgagcagatcaatgccaaggtggctgagtggcgcgaggagggcaaggcggagatcatccctggagtgctgttcatcgacgaggtccacatgctggacatcgagagcttctccttcctcaaccgggccctggagagtgacatggcgcctgtcctgatcatggccaccaaccgtggcatcacgcgaatccggggcaccagctaccagagccctcacggcatccccatagacctgctggaccggctgcttatcgtctccaccaccccctacagcgagaaagacacgaagcagatcctccgcatccggtgcgaggaagaagatgtggagatgagtgaggacgcctacacggtgctgacccgcatcgggctggagacgtcactgcgctacgccatccagctcatcacagctgccagcttggtgtgccggaaacgcaagggtacagaagtgcaggtggatgacatcaagcgggtctactcactcttcctggacgagtcccgctccacgcagtacatgaaggagtaccaggacgccttcctcttcaacgaactcaaaggcgagaccatggacacctcctgagttggatgtcatcccccgaccccaccctgttttccaccagagttctgacactgtgactctgtataaaatggttgggaagctgca

SEQ ID NO: 282589 - DNA, 1231 bp, Homo sapiens
tggagctggaggcctcaaagtggggaggaggaggagggtgggataaagaggaaaggagcgtggaggacgtgtggttactcaaagaacagctaagaattttgcaatcggcctgagcggggcggtggtggggctgagcaaaaggaggaggagccaggagacattgggaatggacccaggagttccggacgcccgtcttccagcgcagcctcggtgggagggcggggcataaagtcccgccacgcccccacaatatttacatatttatgaggaaccatcgagatctttgaagaaccagctagcctagaggagccagaacatctcgctcctcgcgcgtttccgtttccgctaggactctggcagttggtgagcatcatggcaaccgttacagccacaaccaaagtcccggagatccgtgatgtaacaaggattgagcgaatcggtgcccactcccacatccggggactggggctggacgatgccttggagcctcggcaggcttcgcaaggcatggtgggtcagctggcggcacggcgggcggctggcgtggtgctggagatgatccgggaagggaagattgccggtcgggcagtccttattgctggccagccgggcacggggaagacggccatcgccatgggcatggcgcaggccctgggccctgacacgccattcacagccatcgccggcagtgaaatcttctccctggagatgagcaagaccgaggcgctgacgcaggccttccggcggtccatcggcgttcgcatcaaggaggagacggagatcatcgaaggggaggtggtggagatccagattgatcgaccagcaacagggacgggctccaagcgagaaagacacgaagcagatcctccgcatccggtgcgaggaagaagatgtggagatgagtgaggacgcctacacggtgctgacccgcatcgggctggagacgtcactgcgctacgccatccagctcatcacagctgccagcttggtgtgccggaaacgcaagggtacagaagtgcaggtggatgacatcaagcgggtctactcactcttcctggacgagtcccgctccacgcagtacatgaaggagtaccaggacgccttcctcttcaacgaactcaaaggcgagaccatggacacctcctgagttggatgtcatcccccgaccccaccctgttttccaccagagttctgacactgtgactctgtataaaatggttgggaagctgca

SEQ ID NO: 282590 - DNA, 325 bp, Homo sapiens
gggggatgggcgagcttgggcccattcctttccttaccctaccccccatccccctgtagggacgtgatcaccatcgacaaggcgacgggcaagatctccaagctgggccgctccttcacacgcgcccgcgactacgacgctatgggctcccaggtgcggccgggactcccgggatcccctcgcccccagcactggggtgttttcatctcctccatcacccccttgacccatggggtctggatcttcctgttaccctgactgtttgtcctggtactcctgggtcttccctgtaaccctaggacagcagggcccctcagcctggcac

SEQ ID NO: 282591 - DNA, 1139 bp, Homo sapiens
gcggccgcccagtgcgccgccgtccagccgcgcgcgtcctccgcctccgctgccgcgggtcccgggcccggagcctccagcaggcgcgcggccagcagcgtgtggcccagggcagcggcccagtgcagcggcgtgaggcccgtcccggagcgagccgccgccgaggccccgcgctgcagcagcagctcggccacccgcgagtgtccgtgccaggcggcctcgtgcagcgcggtgcgccccgcccggtccaccgcgcccaccggggcccctcgctgcagcaggagacgcaccaggggcgcgtggccccgcagcacggccagaaggaaagctccgtaaggctgaccgggaaagaagcgaggagctctgggggctgggtggaaagtcccgtactcatcagggccagggaggccacagaaactacctcacgccagcttcccaggggtacagcggctagaatggacctcgaggaggcccctcccaagactcccgtctcccgggttccaccgcagtgggggcagccacagctgcctctgcaatgcttgtaggacccacacacagtggggcacggaggggcagaggccgcagcccctttgccatgaatccaaagaacctggagtgattctgcagagacgttcgaaccagagcgactccatcttgaacaggggctgggtaaaatgaggccgagaccggctgggccgcattccctggaggtcaggcattcttagtcacaggatgagatcagcacaagatacagatcacaaagaccccgctgataaaacaggatgccgtgaagaagccggccccaaaccaccaaaaccaagacagccagtcctcactgctcattatgtgctgattataatacattagcatgagacacgcccaccagcaccaggaccatttacagttgccatggcaatgccgggaagttaccctagatggtctaaaagggggaagaaccctcacttccgggaattgcctgcccctttcccggaaaagtccggaataatccacaccatgtttagtacatatcaagaaacaacaataagtgttctcgtcggagtagcccaggccgctgctcagcctatggggcagcccttttcttattcctttactttcctattaaacttgctttcagttta

SEQ ID NO: 282592 - DNA, 372 bp, Homo sapiens
tgctgggattacaggtgtgagccactgtgccaggccagagtttgtcttttaaaaagatttctcatatatgtaaaagcatttccaaggctgctgattgcatgtctttttattttttttaattccctacttccatttcacagcatattatactcccctttaagtactatatggtatatatgtctttttccacattgaatcacttggagggatttttgtatgtgtgtgtgatgtttttgtgtttgagacctctgtgatgtctttatttatgtctgaggtaaaaccaccattgagtttggccatgttataaaccagagaataaaaggatgaactaatcatttactttatttactaacaggtgttcaatatgaatgc

SEQ ID NO: 282593 - DNA, 332 bp, Homo sapiens
tgttcatttctgtctcaagtcagcttctctgagaatccaatttataaaaatatatttgtgaatgtataagtaaagtgacttggattttgtctacgtacaaggacttctatgcctgcataaaacagcgtagtttggaaccagcagcagcagcagctccccagacctactgaatcagaatctacattttgataagagcccagggtgactccatgtacgtgaaaaagtttgagaagtccttagacctacagttcacagcttctccttctttcttattcaactgaattgcagtgggacctgagtatggttaaaataaatgaataaaaacacaaatc

SEQ ID NO: 282594 - DNA, 1232 bp, Homo sapiens
ggcggcgctgcgcttcctcctggcgcgcggggcgcgggtggacgcccgggatggcgcgggggccacagcgctgggtctggcggccgccctaggccgctcccaggacattgaggtgctgctgggccacggggcagacccaggcatcagggacaggcatggccgctctgcgctgcacagggctgccgcccgaggacacctgcttgccgtccagttgctggtcacccagggggccgaggtggatgcgcgggacaccctgggcctcacacccctgcatcacgcctctcgggaaggccacgtggaggttgccggctgcctgctggacaggggtgcccaggtggatgctaccggctggctccgaaagacccccctacacctggctgcagagcgagggcatgggcctaccgtggggcttctgctgagccgaggggccagccccactctgcggacgcagtgggccgaggtggcccagatgcctgagggggacctgccccaggcgctgcctgaacttggagggggggagaaggagtgtgagggcatagagtccacgggctgagccagacagcaggctccaggctccaccgccccagtgatttccaggctctctggctgaggctgcctgcctggaggggacatcagggaagaggcttccggaggaggggatgggagaaagtaggggatgtggcttgagctgcagtcacaggccttggctggaccagggatggcccccagctcccaggagggcccactgaccctgcagctccagccttctccatacttcaacaaagaatgagttgtggcaatgagggaagagagaccctctcatagtgttttatactcagtacctgttttaagaaaaaacaacaaggaagtaaaaccaaagacaggcaggcagcctggcgctaggcccgaaaccaggcctgcgcctgcctggcctaaacccagtagttgaaaatcaattcataacttagaaaccgatgttattcatagattccagacattgtatagaagaacatttgtgaaactccctgccgtgttctgtttctctctgaccgccggtgcatgcagcccctgtcacgtaccgcctgcttgctcaaatcaatgacgaccctttcatgtgaaatcttcggtgttgtgagcccttaaaagggacagaaattgtgcacttggggagctcggattttaaggcagtagcttgccgatgctcccagctgaataaagcccttccttctaca

SEQ ID NO: 282595 - DNA, 1493 bp, Homo sapiens
tgttgctgaatccggcacgacggaagcgcagacactccaccccaaagcctgcagaagggattttgtgaagagggtcaccaggctgagcctcggccagaacccgtctacagaggaccctcagccagagcagaaagctcctgagccagctcccttggatggactcccagaggcctgagcccagagaggaggaggaggaggaacaggaactgcggtggatggagctggactccgaagaggccctgggaaccaggacagaggggcctagtgttgtccagggctgggggcacctgctccaggccgtgtggaggggccctgcaggcctggtgacgcagctgctgcggcaaggtgccagcgtggaggagaggacattgaggtgctgctgggccacggggcagacccaggcatcagggacaggcatggccgctctgcgctgcacagggctgccgcccgaggacacctgcttgccgtccagttgctggtcacccagggggccgaggtggatgcgcgggacaccctgggcctcacacccctgcatcacgcctctcgggaaggccacgtggaggttgccggctgcctgctggacaggggtgcccaggtggatgctaccggctggctccgaaagacccccctacacctggctgcagagcgagggcatgggcctaccgtggggcttctgctgagccgaggggccagccccactctgcggacgcagtgggccgaggtggcccagatgcctgagggggacctgccccaggcgctgcctgaacttggagggggggagaaggagtgtgagggcatagagtccacgggctgagccagacagcaggctccaggctccaccgccccagtgatttccaggctctctggctgaggctgcctgcctggaggggacatcagggaagaggcttccggaggaggggatgggagaaagtaggggatgtggcttgagctgcagtcacaggccttggctggaccagggatggcccccagctcccaggagggcccactgaccctgcagctccagccttctccatacttcaacaaagaatgagttgtggcaatgagggaagagagaccctctcatagtgttttatactcagtacctgttttaagaaaaaacaacaaggaagtaaaaccaaagacaggcaggcagcctggcgctaggcccgaaaccaggcctgcgcctgcctggcctaaacccagtagttgaaaatcaattcataacttagaaaccgatgttattcatagattccagacattgtatagaagaacatttgtgaaactccctgccgtgttctgtttctctctgaccgccggtgcatgcagcccctgtcacgtaccgcctgcttgctcaaatcaatgacgaccctttcatgtgaaatcttcggtgttgtgagcccttaaaagggacagaaattgtgcacttggggagctcggattttaaggcagtagcttgccgatgctcccagctgaataaagcccttccttctaca

SEQ ID NO: 282596 - DNA, 1153 bp, Homo sapiens
gcgacacgccctatgccacacaaggacattgaggtgctgctgggccacggggcagacccaggcatcagggacaggcatggccgctctgcgctgcacagggctgccgcccgaggacacctgcttgccgtccagttgctggtcacccagggggccgaggtggatgcgcgggacaccctgggcctcacacccctgcatcacgcctctcgggaaggccacgtggaggttgccggctgcctgctggacaggggtgcccaggtggatgctaccggctggctccgaaagacccccctacacctggctgcagagcgagggcatgggcctaccgtggggcttctgctgagccgaggggccagccccactctgcggacgcagtgggccgaggtggcccagatgcctgagggggacctgccccaggcgctgcctgaacttggagggggggagaaggagtgtgagggcatagagtccacgggctgagccagacagcaggctccaggctccaccgccccagtgatttccaggctctctggctgaggctgcctgcctggaggggacatcagggaagaggcttccggaggaggggatgggagaaagtaggggatgtggcttgagctgcagtcacaggccttggctggaccagggatggcccccagctcccaggagggcccactgaccctgcagctccagccttctccatacttcaacaaagaatgagttgtggcaatgagggaagagagaccctctcatagtgttttatactcagtacctgttttaagaaaaaacaacaaggaagtaaaaccaaagacaggcaggcagcctggcgctaggcccgaaaccaggcctgcgcctgcctggcctaaacccagtagttgaaaatcaattcataacttagaaaccgatgttattcatagattccagacattgtatagaagaacatttgtgaaactccctgccgtgttctgtttctctctgaccgccggtgcatgcagcccctgtcacgtaccgcctgcttgctcaaatcaatgacgaccctttcatgtgaaatcttcggtgttgtgagcccttaaaagggacagaaattgtgcacttggggagctcggattttaaggcagtagcttgccgatgctcccagctgaataaagcccttccttctaca

SEQ ID NO: 282597 - DNA, 1269 bp, Homo sapiens
cagaacctcaccctgccctcctccccagcctggaatcgggaggaggggccggcacccacccctgggtgggcttagccagctgggacaggagtgggtgagggggctgcccgagggtgggccccatggagagccctgtgaggccttccaggggcacatcggggtacatccaaggctgcgcttcctgggggaggtggcgtctgagcaactttcgtccacaagcatgttcctgcttgtcctccccaaccgcctggcctttgttccccaggagggcagccgaactggggccctggcagccagcaggggagggagtatgttggacagggggctgtgcccgaaggcagggccttcctaagtggctgagtaaacagcgtcaggtggcctcagcctggcccaggggaccagctgtgttctcccaccccctgcaaggctgaagctgccaccattcagcttttcagcagcagacactccaccccaaagcctgcagaagggattttgtgaagagggtcaccaggctgagcctcggccagaacccgtctacagaggaccctcagccagagcagaaagctcctgagccagctcccttgggtaacagagccaagcccctctgaaggctaagtggtaactggaatggggggctccagttggcctgggacacggctgggggcaggccagaggcctccacagtggatgtaggatccctgctcccccccagatggactcccagaggcctgagcccagagaggaggaggaggaggaacaggaactgcggtggatggagctggactccgaagaggccctgggaaccaggacagaggggcctagtgttgtccagggctgggggcacctgctccaggccgtgtggaggggccctgcaggcctggtgacgcagctgctgcggcaaggtgccagcgtggaggagagggaccacgcaggccggaccccgctccacctggccgtgctgcggggccacgcgcccctggtgcgtctcctgctgcagcgaggggccccggtgggcgcggtggaccgggcggggcgcaccgcgctgcacgaggccgcctggcacggacactcgcgggtggccgagctgctgctgcagcgcggggcctcggcggcggctcgctccgggacgggcctcacgccgctgcactgggccgctgccctgggccacacgctgctggccgcgcgcctgctggaggctccgggcccgggacccgcggcagcggaggcggaggacgcgcgcggctggacggcggcgcactgggcggccgc

SEQ ID NO: 282598 - DNA, 525 bp, Homo sapiens
gcggccgccctaggccgctcccaggtacgtcccgccctccgcccggcagtgatgggagggggcgcagggccaggatccccagagacgtgccaccggggcagctggagccaggctgggggacggtgtccaggcacgaaggccctgagcgcgcccccggctgtgcccctccggtgtagccccgtcccgtggagaccagggcgggatccgaggcccggggctcggcttcatgctggtggcagcaacagactctccgccagcgccgggcctgtgcctgagacccccgttcctgggcagcgggcagggtgttggctgcagatccttggatttgctctaaggactcttagggggaaaagtggacgtttccaagcaggccagccttgggttcggcctcacaacatgaggaagtggtgtcaggagagacaggccgctgcggggacagaagaggcctgggctgggcaaacgcctggtggctctgcccctcgcctaccgggctgaggccggcccctgcttttctctcctcttcta

SEQ ID NO: 282599 - DNA, 2050 bp, Homo sapiens
cagaacctcaccctgccctcctccccagcctggaatcgggaggaggggccggcacccacccctgggtgggcttagccagctgggacaggagtgggtgagggggctgcccgagggtgggccccatggagagccctgtgaggccttccaggggcacatcggggtacatccaaggctgcgcttcctgggggaggtggcgtctgagcaactttcgtccacaagcatgttcctgcttgtcctccccaaccgcctggcctttgttccccaggagggcagccgaactggggccctggcagccagcaggggagggagtatgttggacagggggctgtgcccgaaggcagggccttcctaagtggctgagtaaacagcgtcaggtggcctcagcctggcccaggggaccagctgtgttctcccaccccctgcaaggctgaagctgccaccattcagcttttcagcagcagacactccaccccaaagcctgcagaagggattttgtgaagagggtcaccaggctgagcctcggccagaacccgtctacagaggaccctcagccagagcagaaagctcctgagccagctcccttgggtaacagagccaagcccctctgaaggctaagtggtaactggaatggggggctccagttggcctgggacacggctgggggcaggccagaggcctccacagtggatgtaggatccctgctcccccccagatggactcccagaggcctgagcccagagaggaggaggaggaggaacaggaactgcggtggatggagctggactccgaagaggccctgggaaccaggacagaggggcctagtgttgtccagggctgggggcacctgctccaggccgtgtggaggggccctgcaggcctggtgacgcagctgctgcggcaaggtgccagcgtggaggagaggacattgaggtgctgctgggccacggggcagacccaggcatcagggacaggcatggccgctctgcgctgcacagggctgccgcccgaggacacctgcttgccgtccagttgctggtcacccagggggccgaggtggatgcgcgggacaccctgggcctcacacccctgcatcacgcctctcgggaaggccacgtggaggttgccggctgcctgctggacaggggtgcccaggtggatgctaccggctggctccgaaagacccccctacacctggctgcagagcgagggcatgggcctaccgtggggcttctgctgagccgaggggccagccccactctgcggacgcagtgggccgaggtggcccagatgcctgagggggacctgccccaggcgctgcctgaacttggagggggggagaaggagtgtgagggcatagagtccacgggctgagccagacagcaggctccaggctccaccgccccagtgatttccaggctctctggctgaggctgcctgcctggaggggacatcagggaagaggcttccggaggaggggatgggagaaagtaggggatgtggcttgagctgcagtcacaggccttggctggaccagggatggcccccagctcccaggagggcccactgaccctgcagctccagccttctccatacttcaacaaagaatgagttgtggcaatgagggaagagagaccctctcatagtgttttatactcagtacctgttttaagaaaaaacaacaaggaagtaaaaccaaagacaggcaggcagcctggcgctaggcccgaaaccaggcctgcgcctgcctggcctaaacccagtagttgaaaatcaattcataacttagaaaccgatgttattcatagattccagacattgtatagaagaacatttgtgaaactccctgccgtgttctgtttctctctgaccgccggtgcatgcagcccctgtcacgtaccgcctgcttgctcaaatcaatgacgaccctttcatgtgaaatcttcggtgttgtgagcccttaaaagggacagaaattgtgcacttggggagctcggattttaaggcagtagcttgccgatgctcccagctgaataaagcccttccttctaca

SEQ ID NO: 282600 - DNA, 1923 bp, Homo sapiens
cagaacctcaccctgccctcctccccagcctggaatcgggaggaggggccggcacccacccctgggtgggcttagccagctgggacaggagtgggtgagggggctgcccgagggtgggccccatggagagccctgtgaggccttccaggggcacatcggggtacatccaaggctgcgcttcctgggggaggtggcgtctgagcaactttcgtccacaagcatgttcctgcttgtcctccccaaccgcctggcctttgttccccaggagggcagccgaactggggccctggcagccagcaggggagggagtatgttggacagggggctgtgcccgaaggcagggccttcctaagtggctgagtaaacagcgtcaggtggcctcagcctggcccaggggaccagctgtgttctcccaccccctgcaaggctgaagctgccaccattcagcttttcagcagcagacactccaccccaaagcctgcagaagggattttgtgaagagggtcaccaggctgagcctcggccagaacccgtctacagaggaccctcagccagagcagaaagctcctgagccagctcccttggatggactcccagaggcctgagcccagagaggaggaggaggaggaacaggaactgcggtggatggagctggactccgaagaggccctgggaaccaggacagaggggcctagtgttgtccagggctgggggcacctgctccaggccgtgtggaggggccctgcaggcctggtgacgcagctgctgcggcaaggtgccagcgtggaggagaggacattgaggtgctgctgggccacggggcagacccaggcatcagggacaggcatggccgctctgcgctgcacagggctgccgcccgaggacacctgcttgccgtccagttgctggtcacccagggggccgaggtggatgcgcgggacaccctgggcctcacacccctgcatcacgcctctcgggaaggccacgtggaggttgccggctgcctgctggacaggggtgcccaggtggatgctaccggctggctccgaaagacccccctacacctggctgcagagcgagggcatgggcctaccgtggggcttctgctgagccgaggggccagccccactctgcggacgcagtgggccgaggtggcccagatgcctgagggggacctgccccaggcgctgcctgaacttggagggggggagaaggagtgtgagggcatagagtccacgggctgagccagacagcaggctccaggctccaccgccccagtgatttccaggctctctggctgaggctgcctgcctggaggggacatcagggaagaggcttccggaggaggggatgggagaaagtaggggatgtggcttgagctgcagtcacaggccttggctggaccagggatggcccccagctcccaggagggcccactgaccctgcagctccagccttctccatacttcaacaaagaatgagttgtggcaatgagggaagagagaccctctcatagtgttttatactcagtacctgttttaagaaaaaacaacaaggaagtaaaaccaaagacaggcaggcagcctggcgctaggcccgaaaccaggcctgcgcctgcctggcctaaacccagtagttgaaaatcaattcataacttagaaaccgatgttattcatagattccagacattgtatagaagaacatttgtgaaactccctgccgtgttctgtttctctctgaccgccggtgcatgcagcccctgtcacgtaccgcctgcttgctcaaatcaatgacgaccctttcatgtgaaatcttcggtgttgtgagcccttaaaagggacagaaattgtgcacttggggagctcggattttaaggcagtagcttgccgatgctcccagctgaataaagcccttccttctaca

SEQ ID NO: 282601 - DNA, 854 bp, Homo sapiens
cagaacctcaccctgccctcctccccagcctggaatcgggaggaggggccggcacccacccctgggtgggcttagccagctgggacaggagtgggtgagggggctgcccgagggtgggccccatggagagccctgtgaggccttccaggggcacatcggggtacatccaaggctgcgcttcctgggggaggtggcgtctgagcaactttcgtccacaagcatgttcctgcttgtcctccccaaccgcctggcctttgttccccaggagggcagccgaactggggccctggcagccagcaggggagggagtatgttggacagggggctgtgcccgaaggcagggccttcctaagtggctgagtaaacagcgtcaggtggcctcagcctggcccaggggaccagctgtgttctcccaccccctgcaaggctgaagctgccaccattcagcttttcagcagcagacactccaccccaaagcctgcagaagggattttgtgaagagggtcaccaggctgagcctcggccagaacccgtctacagaggaccctcagccagagcagaaagctcctgagccagctcccttggatggactcccagaggcctgagcccagagaggaggaggaggaggaacaggaactgcggtggatggagctggactccgaagaggccctgggaaccaggacagaggggcctagtgttgtccagggctgggggcacctgctccaggccgtgtggaggggccctgcaggcctggtgacgcagctgctgcggcaaggtgccagcgtggaggagagaaggtagagctgttcttaaatttattaaaaaaaaataaaagggaatctcagtgtctgtta

SEQ ID NO: 282602 - DNA, 233 bp, Homo sapiens
agaagaacaggctgggcagggggaggcaggcagacactgatgcatgtgtatgtgcggtgtgtgtcattcatctcagcagcccccagagcccctcacggagatgtggagaacatctgccatcaaggcccttaatgctacaggacaagcaaacctcagcctggaggcacttttccagattttgtcggtggttccagtttataacaacctcacaatttatactacggtaatgagcg

SEQ ID NO: 282603 - DNA, 5073 bp, Homo sapiens
  misc_feature (3621)..(3621): n is a, c, g, or t
ttacccgggctacgagcagcggctgcaggtctccaagttgcggccgctggagcccgagccatgcggaccgcggaccgggaggcgcgcccggggcttccgtccctgctgctgctgctgctggccggggccgggctgtcagccgcctcgcccccagcagcgccgcgcttcaacgtgagcctggactcggtccccgagctgcgctggctgcccgtgctgcggcactacgacttggacttggtgcgcgccgcgatggcgcaagtcatcggggacagagtccccaagtgggtgcacgtgttaatcggaaaagtggtcctggagctggagcgcttcctgccccagcccttcaccggcgagatccgcggcatgtgtgacttcatgaacctcagcctggcggactgccttctggtcaacctggcctacgagtcctccgtgttctgcaccagtattgtggctcaagactccagaggccacatttaccatggtcggaatttggattatccttttgggaatgtcttacgcaagctgacagtggatgtgcaattcttaaagaatgggcagattgcattcacaggaactacttttattggctatgtaggattatggactggccagagcccacacaagtttacagtttctggtgatgaacgagaccctgagtgagtcggaaaacttcgaagcagctgttggcaagttggccaagactccccttattgctgatgtttattacattgttggtggcacgtccccccgggagggggtggtcatcacgaggaacagagatggcccagcagacatttggcctctagatcctttgaatggagcgtggttccgagttgagacaaattacgaccactggaagccagcacccaaggaagatgaccggagaacatctgccatcaaggcccttaatgctacaggacaagcaaacctcagcctggaggcacttttccagtgaaagcaggccaggtgcggtggctcacgcctgtaatcccagccctttgggaggccaaggcgggtggaacacttgaggtcaggagttcaagaccagcctggccaacatggtgaaacctcgtctctactaaaaatacaaaaatcaaccaggcatgacggtgcacgcctgttatcacagctacttgggaagcagcggctggagaattgcttgaacctgggaagtcgaggctgcaagtgagctgagatcatgccatggcagtctagcctgggcaacagagcgagactctgtttcaaaaaaaaaaagaaaagaaaactaattagtcagtattctgctactcaaacaaatgagctatttggataacaaagcatacccagtggtctgctagtaaaccagctctttgtgtgggaagggacaaatgaaaaaattcccaaatttgtagcatttgttgacttccatggtgtgaatactcccacatggctgatttcaggcttatagttggctcatacacttcctgcatatttaataattggccctcaccagactgtaggagctagctccaatgcactattgactgtacccttcatagcggggcacaatgttgcccttttaatagtcattttttaaatgggggttaataaactacttttgtgttcttatagtttttttaggtaattatagaagtgatgaatatatctggctgggcgcagtggctcacatctgtaatcctagtactttggaagccgaggcgggtggatcacttgaggtcaggagttcgagaccagcctggccaacatggtgaaacctcatctctactaaaaatacaaaaattagccaggcgtcatggtgcgtgcctgtaatcccagctacttgggaggtggaggcaggaaaatcactcgaatccgggagacagaggttgcagtgagctgagattgcactccagcctgggcgacagagggagactccgtcttaaaaaaaaaaaaaaaaaaaaaaaaaagaagtgatgaatatatcttttaaaaattagtattataataaaatagttacatttattttaataaaacaaagcattttctctgctttgaacagccctcataattttacatggtggcagtggccagttggctgtattataattgagttaagcattctccagttgttagattttcctctattaaaactctgaaataaacatattcgtttgcctctcccctgcttactttcagattatttcccttggctgaattcccagaagtaggattactgagttaacagttatgaatgtttaaatggtttctgaaatggtttggtcaaaataaaattgttagaaattataaacagtttaccaagtagtgtttttctctgttgtatacttgaaaattcaagagaaactgcttttaagtgacaatcaccatggagccagaattaacacagacttctgactctcaggccctttacatgtaatgattaacctcaactgaggctgttcagttgtattaggttaatagaaataagtgtagctgtatctgaaaaaaagaaaaagaaacaacaaaaaagtagtctgaacaaaggcagttagctctatgctgcccctttgtgccatgctgcaaaattacacccacctgcaatacatctccatcctctgctgtggctcatcagtagagaaaatactaaaacagtaatggagagcagaactatgactaaagtaaacgagcaattaaggtcctgttcagggaacctccattacccttggacgagctctgcacttgcttacagtgctgtctttaactgggtgtatgatttagctgtggacccagtgctactaattctgcctgtttctgaacaacccagctccgatattttgcacatgcacctcaactggattccaagacaaatgtgtgtacatgtgggcacatgtgctcaagttgtttaggtctcttgttatacggaatgtgtaatcaatgacactatacttttcatccttagatctgggcaaggtggaggggcggggcaggtgccttgatcctggagctttagaggccctcctctggaattcctctagttgtgataccacccccccaaagcatggtgtaaggaatctgctggaccaagggcatttgcccacctggagtctgcccaagtacccaggaccctgtaattctcagcctgaacagccccacctccacttccagggtttgtgttttcctcttccctgggtgatattctcctgatggtggtgcatggccactgagagagagcacaggggcaggtgcttgctggggaatgtgaaggcggtgatgtcacatgtgtgcaagtaaggcccttgtgggtaggacagagccagggtgagggccaaggcttggtctcccccactgccttggggtagagctctgaggagtcttgagattttatttatttattttttatgagacagagtctcactctgttgcccaggctggagtgcagtggcgcaatctcagctcagtgcaacctctgcctcccaagtttaagcaattctcctgcctcagcctccctagtagctgggatttcaggcaccaccacacccagctaattaagtctgagaattttaagttccaacttggccttccacagtgttgtcaaaataggaggaaagtgcactttgacctcttgattcatagatttaaaatatnctggcataaagggccttgtcccagatctcaagtgttagggaagcacttggtcattttcttccctttctggcatattagagaaaatgatgtgtacataaaatttcctcataattttcagcctcacaatttatactacggtaatgagcgccggtagcccagacaagtacatgactaggatcagaaacccgagtagaaagtaagtcagcagaagagcgagttcgcccgtgctgtgaaaggtttgttgttactgttttgtggagagggggtgaggtgggtgtgtgctggtatttcttacagagggtggtaacatccttaaaatgtatacatatataatattttctgacaagcatctggcattgtcatttgtgtcagattgtcatcattagatattttatttggaattgtttgtatgaaaaccaatcttcggcggggcgtgatggctcatgactgtaatttcagcactttgagaggcagaggcaggcagatcacttgaggtcaggagttcaagaccagcctggccaacatggtgaaaccccatctctactaaaactacaaaaaaactgttagccaggtgtggtggtgggtacccaaaatcccgactactcaggagctgaggtaggagaatcacttgaactcgggaggtggagtttgtagtgagctgagatcacaccactgcactccagcctgggaaacagagtgagactccattaaaaaaaaaaaaaaaatcagtctttgaattaaatgcgtttttttcttcccttacagatgattttttaaaaaatgaaattcttgaagagctgcaccttaaaaaataagacaaagtgaaagtattgtattatgttacaaacaatgcaggctccttcctcatttaactttacaaccttgcgaagtgggtccaggagatttggagtttgtggtaaagccagtaatgggcattgtcctgcattcccttcccttcatggtttgcctcgatcctctctaagcttctatcctggcctgaataactcaaagataattggtctcagagatcaagccatatcctcaggccttatttccatcttctcatgattctgccatcatacctttgcttctccgctaatgaaatgagctggcaagacctctgttcattgtgaagtgcttctgaaagagcctaagaaaaaaggctcatctgaaagaaatggagaactctatttcgaaccaagcctgtttgaatgtgtgttagtctgatctttgatcatgtgtttccatgtaatgggagtctcgttttttataatgtttctaacgttttattgaaaaacctatggccctccttctttctcaatagctactttcttactgctttttgaaaataatatgcaaccaaattatttcttaatgtcacataattaagtaataaaatgtcaaaagaaatgttggcaaggagaataaaaaaatttccaagaaacttaaagt

SEQ ID NO: 282604 - DNA, 5150 bp, Homo sapiens
  misc_feature (3698)..(3698): n is a, c, g, or t
ttacccgggctacgagcagcggctgcaggtctccaagttgcggccgctggagcccgagccatgcggaccgcggaccgggaggcgcgcccggggcttccgtccctgctgctgctgctgctggccggggccgggctgtcagccgcctcgcccccagcagcgccgcgcttcaacgtgagcctggactcggtccccgagctgcgctggctgcccgtgctgcggcactacgacttggacttggtgcgcgccgcgatggcgcaagtcatcggggacagagtccccaagtgggtgcacgtgttaatcggaaaagtggtcctggagctggagcgcttcctgccccagcccttcaccggcgagatccgcggcatgtgtgacttcatgaacctcagcctggcggactgccttctggtcaacctggcctacgagtcctccgtgttctgcaccagtattgtggctcaagactccagaggccacatttaccatggtcggaatttggattatccttttgggaatgtcttacgcaagctgacagtggatgtgcaattcttaaagaatgggcagattgcattcacaggaactacttttattggctatgtaggattatggactggccagagcccacacaagtttacagtttctggtgatgaacgagataaaggctggtggtgggagaatgctatcgctgccctgtttcggagacacattcccgtcagctggctgatccgcgctaccctgagtgagtcggaaaacttcgaagcagctgttggcaagttggccaagactccccttattgctgatgtttattacattgttggtggcacgtccccccgggagggggtggtcatcacgaggaacagagatggcccagcagacatttggcctctagatcctttgaatggagcgtggttccgagttgagacaaattacgaccactggaagccagcacccaaggaagatgaccggagaacatctgccatcaaggcccttaatgctacaggacaagcaaacctcagcctggaggcacttttccagtgaaagcaggccaggtgcggtggctcacgcctgtaatcccagccctttgggaggccaaggcgggtggaacacttgaggtcaggagttcaagaccagcctggccaacatggtgaaacctcgtctctactaaaaatacaaaaatcaaccaggcatgacggtgcacgcctgttatcacagctacttgggaagcagcggctggagaattgcttgaacctgggaagtcgaggctgcaagtgagctgagatcatgccatggcagtctagcctgggcaacagagcgagactctgtttcaaaaaaaaaaagaaaagaaaactaattagtcagtattctgctactcaaacaaatgagctatttggataacaaagcatacccagtggtctgctagtaaaccagctctttgtgtgggaagggacaaatgaaaaaattcccaaatttgtagcatttgttgacttccatggtgtgaatactcccacatggctgatttcaggcttatagttggctcatacacttcctgcatatttaataattggccctcaccagactgtaggagctagctccaatgcactattgactgtacccttcatagcggggcacaatgttgcccttttaatagtcattttttaaatgggggttaataaactacttttgtgttcttatagtttttttaggtaattatagaagtgatgaatatatctggctgggcgcagtggctcacatctgtaatcctagtactttggaagccgaggcgggtggatcacttgaggtcaggagttcgagaccagcctggccaacatggtgaaacctcatctctactaaaaatacaaaaattagccaggcgtcatggtgcgtgcctgtaatcccagctacttgggaggtggaggcaggaaaatcactcgaatccgggagacagaggttgcagtgagctgagattgcactccagcctgggcgacagagggagactccgtcttaaaaaaaaaaaaaaaaaaaaaaaaaagaagtgatgaatatatcttttaaaaattagtattataataaaatagttacatttattttaataaaacaaagcattttctctgctttgaacagccctcataattttacatggtggcagtggccagttggctgtattataattgagttaagcattctccagttgttagattttcctctattaaaactctgaaataaacatattcgtttgcctctcccctgcttactttcagattatttcccttggctgaattcccagaagtaggattactgagttaacagttatgaatgtttaaatggtttctgaaatggtttggtcaaaataaaattgttagaaattataaacagtttaccaagtagtgtttttctctgttgtatacttgaaaattcaagagaaactgcttttaagtgacaatcaccatggagccagaattaacacagacttctgactctcaggccctttacatgtaatgattaacctcaactgaggctgttcagttgtattaggttaatagaaataagtgtagctgtatctgaaaaaaagaaaaagaaacaacaaaaaagtagtctgaacaaaggcagttagctctatgctgcccctttgtgccatgctgcaaaattacacccacctgcaatacatctccatcctctgctgtggctcatcagtagagaaaatactaaaacagtaatggagagcagaactatgactaaagtaaacgagcaattaaggtcctgttcagggaacctccattacccttggacgagctctgcacttgcttacagtgctgtctttaactgggtgtatgatttagctgtggacccagtgctactaattctgcctgtttctgaacaacccagctccgatattttgcacatgcacctcaactggattccaagacaaatgtgtgtacatgtgggcacatgtgctcaagttgtttaggtctcttgttatacggaatgtgtaatcaatgacactatacttttcatccttagatctgggcaaggtggaggggcggggcaggtgccttgatcctggagctttagaggccctcctctggaattcctctagttgtgataccacccccccaaagcatggtgtaaggaatctgctggaccaagggcatttgcccacctggagtctgcccaagtacccaggaccctgtaattctcagcctgaacagccccacctccacttccagggtttgtgttttcctcttccctgggtgatattctcctgatggtggtgcatggccactgagagagagcacaggggcaggtgcttgctggggaatgtgaaggcggtgatgtcacatgtgtgcaagtaaggcccttgtgggtaggacagagccagggtgagggccaaggcttggtctcccccactgccttggggtagagctctgaggagtcttgagattttatttatttattttttatgagacagagtctcactctgttgcccaggctggagtgcagtggcgcaatctcagctcagtgcaacctctgcctcccaagtttaagcaattctcctgcctcagcctccctagtagctgggatttcaggcaccaccacacccagctaattaagtctgagaattttaagttccaacttggccttccacagtgttgtcaaaataggaggaaagtgcactttgacctcttgattcatagatttaaaatatnctggcataaagggccttgtcccagatctcaagtgttagggaagcacttggtcattttcttccctttctggcatattagagaaaatgatgtgtacataaaatttcctcataattttcagcctcacaatttatactacggtaatgagcgccggtagcccagacaagtacatgactaggatcagaaacccgagtagaaagtaagtcagcagaagagcgagttcgcccgtgctgtgaaaggtttgttgttactgttttgtggagagggggtgaggtgggtgtgtgctggtatttcttacagagggtggtaacatccttaaaatgtatacatatataatattttctgacaagcatctggcattgtcatttgtgtcagattgtcatcattagatattttatttggaattgtttgtatgaaaaccaatcttcggcggggcgtgatggctcatgactgtaatttcagcactttgagaggcagaggcaggcagatcacttgaggtcaggagttcaagaccagcctggccaacatggtgaaaccccatctctactaaaactacaaaaaaactgttagccaggtgtggtggtgggtacccaaaatcccgactactcaggagctgaggtaggagaatcacttgaactcgggaggtggagtttgtagtgagctgagatcacaccactgcactccagcctgggaaacagagtgagactccattaaaaaaaaaaaaaaaatcagtctttgaattaaatgcgtttttttcttcccttacagatgattttttaaaaaatgaaattcttgaagagctgcaccttaaaaaataagacaaagtgaaagtattgtattatgttacaaacaatgcaggctccttcctcatttaactttacaaccttgcgaagtgggtccaggagatttggagtttgtggtaaagccagtaatgggcattgtcctgcattcccttcccttcatggtttgcctcgatcctctctaagcttctatcctggcctgaataactcaaagataattggtctcagagatcaagccatatcctcaggccttatttccatcttctcatgattctgccatcatacctttgcttctccgctaatgaaatgagctggcaagacctctgttcattgtgaagtgcttctgaaagagcctaagaaaaaaggctcatctgaaagaaatggagaactctatttcgaaccaagcctgtttgaatgtgtgttagtctgatctttgatcatgtgtttccatgtaatgggagtctcgttttttataatgtttctaacgttttattgaaaaacctatggccctccttctttctcaatagctactttcttactgctttttgaaaataatatgcaaccaaattatttcttaatgtcacataattaagtaataaaatgtcaaaagaaatgttggcaaggagaataaaaaaatttccaagaaacttaaagt

SEQ ID NO: 282605 - DNA, 4982 bp, Homo sapiens
  misc_feature (3530)..(3530): n is a, c, g, or t
ctcacgccctaaggatgtagccccgctcgcagtgcacacgcagtcgcacgccgccgacctctgagcgggtcagacgcccttgtgctttttgtttctagggacagagtccccaagtgggtgcacgtgttaatcggaaaagtggtcctggagctggagcgcttcctgccccagcccttcaccggcgagatccgcggcatgtgtgacttcatgaacctcagcctggcggactgccttctggtcaacctggcctacgagtcctccgtgttctgcaccagtattgtggctcaagactccagaggccacatttaccatggtcggaatttggattatccttttgggaatgtcttacgcaagctgacagtggatgtgcaattcttaaagaatgggcagattgcattcacaggaactacttttattggctatgtaggattatggactggccagagcccacacaagtttacagtttctggtgatgaacgagataaaggctggtggtgggagaatgctatcgctgccctgtttcggagacacattcccgtcagctggctgatccgcgctaccctgagtgagtcggaaaacttcgaagcagctgttggcaagttggccaagactccccttattgctgatgtttattacattgttggtggcacgtccccccgggagggggtggtcatcacgaggaacagagatggcccagcagacatttggcctctagatcctttgaatggagcgtggttccgagttgagacaaattacgaccactggaagccagcacccaaggaagatgaccggagaacatctgccatcaaggcccttaatgctacaggacaagcaaacctcagcctggaggcacttttccagtgaaagcaggccaggtgcggtggctcacgcctgtaatcccagccctttgggaggccaaggcgggtggaacacttgaggtcaggagttcaagaccagcctggccaacatggtgaaacctcgtctctactaaaaatacaaaaatcaaccaggcatgacggtgcacgcctgttatcacagctacttgggaagcagcggctggagaattgcttgaacctgggaagtcgaggctgcaagtgagctgagatcatgccatggcagtctagcctgggcaacagagcgagactctgtttcaaaaaaaaaaagaaaagaaaactaattagtcagtattctgctactcaaacaaatgagctatttggataacaaagcatacccagtggtctgctagtaaaccagctctttgtgtgggaagggacaaatgaaaaaattcccaaatttgtagcatttgttgacttccatggtgtgaatactcccacatggctgatttcaggcttatagttggctcatacacttcctgcatatttaataattggccctcaccagactgtaggagctagctccaatgcactattgactgtacccttcatagcggggcacaatgttgcccttttaatagtcattttttaaatgggggttaataaactacttttgtgttcttatagtttttttaggtaattatagaagtgatgaatatatctggctgggcgcagtggctcacatctgtaatcctagtactttggaagccgaggcgggtggatcacttgaggtcaggagttcgagaccagcctggccaacatggtgaaacctcatctctactaaaaatacaaaaattagccaggcgtcatggtgcgtgcctgtaatcccagctacttgggaggtggaggcaggaaaatcactcgaatccgggagacagaggttgcagtgagctgagattgcactccagcctgggcgacagagggagactccgtcttaaaaaaaaaaaaaaaaaaaaaaaaaagaagtgatgaatatatcttttaaaaattagtattataataaaatagttacatttattttaataaaacaaagcattttctctgctttgaacagccctcataattttacatggtggcagtggccagttggctgtattataattgagttaagcattctccagttgttagattttcctctattaaaactctgaaataaacatattcgtttgcctctcccctgcttactttcagattatttcccttggctgaattcccagaagtaggattactgagttaacagttatgaatgtttaaatggtttctgaaatggtttggtcaaaataaaattgttagaaattataaacagtttaccaagtagtgtttttctctgttgtatacttgaaaattcaagagaaactgcttttaagtgacaatcaccatggagccagaattaacacagacttctgactctcaggccctttacatgtaatgattaacctcaactgaggctgttcagttgtattaggttaatagaaataagtgtagctgtatctgaaaaaaagaaaaagaaacaacaaaaaagtagtctgaacaaaggcagttagctctatgctgcccctttgtgccatgctgcaaaattacacccacctgcaatacatctccatcctctgctgtggctcatcagtagagaaaatactaaaacagtaatggagagcagaactatgactaaagtaaacgagcaattaaggtcctgttcagggaacctccattacccttggacgagctctgcacttgcttacagtgctgtctttaactgggtgtatgatttagctgtggacccagtgctactaattctgcctgtttctgaacaacccagctccgatattttgcacatgcacctcaactggattccaagacaaatgtgtgtacatgtgggcacatgtgctcaagttgtttaggtctcttgttatacggaatgtgtaatcaatgacactatacttttcatccttagatctgggcaaggtggaggggcggggcaggtgccttgatcctggagctttagaggccctcctctggaattcctctagttgtgataccacccccccaaagcatggtgtaaggaatctgctggaccaagggcatttgcccacctggagtctgcccaagtacccaggaccctgtaattctcagcctgaacagccccacctccacttccagggtttgtgttttcctcttccctgggtgatattctcctgatggtggtgcatggccactgagagagagcacaggggcaggtgcttgctggggaatgtgaaggcggtgatgtcacatgtgtgcaagtaaggcccttgtgggtaggacagagccagggtgagggccaaggcttggtctcccccactgccttggggtagagctctgaggagtcttgagattttatttatttattttttatgagacagagtctcactctgttgcccaggctggagtgcagtggcgcaatctcagctcagtgcaacctctgcctcccaagtttaagcaattctcctgcctcagcctccctagtagctgggatttcaggcaccaccacacccagctaattaagtctgagaattttaagttccaacttggccttccacagtgttgtcaaaataggaggaaagtgcactttgacctcttgattcatagatttaaaatatnctggcataaagggccttgtcccagatctcaagtgttagggaagcacttggtcattttcttccctttctggcatattagagaaaatgatgtgtacataaaatttcctcataattttcagcctcacaatttatactacggtaatgagcgccggtagcccagacaagtacatgactaggatcagaaacccgagtagaaagtaagtcagcagaagagcgagttcgcccgtgctgtgaaaggtttgttgttactgttttgtggagagggggtgaggtgggtgtgtgctggtatttcttacagagggtggtaacatccttaaaatgtatacatatataatattttctgacaagcatctggcattgtcatttgtgtcagattgtcatcattagatattttatttggaattgtttgtatgaaaaccaatcttcggcggggcgtgatggctcatgactgtaatttcagcactttgagaggcagaggcaggcagatcacttgaggtcaggagttcaagaccagcctggccaacatggtgaaaccccatctctactaaaactacaaaaaaactgttagccaggtgtggtggtgggtacccaaaatcccgactactcaggagctgaggtaggagaatcacttgaactcgggaggtggagtttgtagtgagctgagatcacaccactgcactccagcctgggaaacagagtgagactccattaaaaaaaaaaaaaaaatcagtctttgaattaaatgcgtttttttcttcccttacagatgattttttaaaaaatgaaattcttgaagagctgcaccttaaaaaataagacaaagtgaaagtattgtattatgttacaaacaatgcaggctccttcctcatttaactttacaaccttgcgaagtgggtccaggagatttggagtttgtggtaaagccagtaatgggcattgtcctgcattcccttcccttcatggtttgcctcgatcctctctaagcttctatcctggcctgaataactcaaagataattggtctcagagatcaagccatatcctcaggccttatttccatcttctcatgattctgccatcatacctttgcttctccgctaatgaaatgagctggcaagacctctgttcattgtgaagtgcttctgaaagagcctaagaaaaaaggctcatctgaaagaaatggagaactctatttcgaaccaagcctgtttgaatgtgtgttagtctgatctttgatcatgtgtttccatgtaatgggagtctcgttttttataatgtttctaacgttttattgaaaaacctatggccctccttctttctcaatagctactttcttactgctttttgaaaataatatgcaaccaaattatttcttaatgtcacataattaagtaataaaatgtcaaaagaaatgttggcaaggagaataaaaaaatttccaagaaacttaaagt

SEQ ID NO: 282606 - DNA, 4833 bp, Homo sapiens
  misc_feature (3381)..(3381): n is a, c, g, or t
tcgacccacgcgtccgcgaggaacagagatggcccagcagacatttggcctctagatcctttgaatggagcgtggttccgagttgagacaaattacgaccactggaagccagcacccaaggaagatgaccggagaacatctgccatcaaggcccttaatgctacaggacaagcaaacctcagcctggaggcacttttccagattttgtcggtggttccagtttataacaatgaaagcaggccaggtgcggtggctcacgcctgtaatcccagccctttgggaatgtcttacgcaagctgacagtggatgtgcaattcttaaagaatgggcagataaaggctggtggtgggagaatgctatcgctgccctgtttcggagacacattcccgtcagctggctgatccgcgctaccctgagtgagtcggaaaacttcgaagcagctgttggcaagttggccaagactccccttattgctgatgtttattacattgttggtggcacgtccccccgggagggggtggtcatcacgaggaacagagatggcccagcagacatttggcctctagatcctttgaatggagcgtggttccgagttgagacaaattacgaccactggaagccagcacccaaggaagatgaccggagaacatctgccatcaaggcccttaatgctacaggacaagcaaacctcagcctggaggcacttttccagtgaaagcaggccaggtgcggtggctcacgcctgtaatcccagccctttgggaggccaaggcgggtggaacacttgaggtcaggagttcaagaccagcctggccaacatggtgaaacctcgtctctactaaaaatacaaaaatcaaccaggcatgacggtgcacgcctgttatcacagctacttgggaagcagcggctggagaattgcttgaacctgggaagtcgaggctgcaagtgagctgagatcatgccatggcagtctagcctgggcaacagagcgagactctgtttcaaaaaaaaaaagaaaagaaaactaattagtcagtattctgctactcaaacaaatgagctatttggataacaaagcatacccagtggtctgctagtaaaccagctctttgtgtgggaagggacaaatgaaaaaattcccaaatttgtagcatttgttgacttccatggtgtgaatactcccacatggctgatttcaggcttatagttggctcatacacttcctgcatatttaataattggccctcaccagactgtaggagctagctccaatgcactattgactgtacccttcatagcggggcacaatgttgcccttttaatagtcattttttaaatgggggttaataaactacttttgtgttcttatagtttttttaggtaattatagaagtgatgaatatatctggctgggcgcagtggctcacatctgtaatcctagtactttggaagccgaggcgggtggatcacttgaggtcaggagttcgagaccagcctggccaacatggtgaaacctcatctctactaaaaatacaaaaattagccaggcgtcatggtgcgtgcctgtaatcccagctacttgggaggtggaggcaggaaaatcactcgaatccgggagacagaggttgcagtgagctgagattgcactccagcctgggcgacagagggagactccgtcttaaaaaaaaaaaaaaaaaaaaaaaaaagaagtgatgaatatatcttttaaaaattagtattataataaaatagttacatttattttaataaaacaaagcattttctctgctttgaacagccctcataattttacatggtggcagtggccagttggctgtattataattgagttaagcattctccagttgttagattttcctctattaaaactctgaaataaacatattcgtttgcctctcccctgcttactttcagattatttcccttggctgaattcccagaagtaggattactgagttaacagttatgaatgtttaaatggtttctgaaatggtttggtcaaaataaaattgttagaaattataaacagtttaccaagtagtgtttttctctgttgtatacttgaaaattcaagagaaactgcttttaagtgacaatcaccatggagccagaattaacacagacttctgactctcaggccctttacatgtaatgattaacctcaactgaggctgttcagttgtattaggttaatagaaataagtgtagctgtatctgaaaaaaagaaaaagaaacaacaaaaaagtagtctgaacaaaggcagttagctctatgctgcccctttgtgccatgctgcaaaattacacccacctgcaatacatctccatcctctgctgtggctcatcagtagagaaaatactaaaacagtaatggagagcagaactatgactaaagtaaacgagcaattaaggtcctgttcagggaacctccattacccttggacgagctctgcacttgcttacagtgctgtctttaactgggtgtatgatttagctgtggacccagtgctactaattctgcctgtttctgaacaacccagctccgatattttgcacatgcacctcaactggattccaagacaaatgtgtgtacatgtgggcacatgtgctcaagttgtttaggtctcttgttatacggaatgtgtaatcaatgacactatacttttcatccttagatctgggcaaggtggaggggcggggcaggtgccttgatcctggagctttagaggccctcctctggaattcctctagttgtgataccacccccccaaagcatggtgtaaggaatctgctggaccaagggcatttgcccacctggagtctgcccaagtacccaggaccctgtaattctcagcctgaacagccccacctccacttccagggtttgtgttttcctcttccctgggtgatattctcctgatggtggtgcatggccactgagagagagcacaggggcaggtgcttgctggggaatgtgaaggcggtgatgtcacatgtgtgcaagtaaggcccttgtgggtaggacagagccagggtgagggccaaggcttggtctcccccactgccttggggtagagctctgaggagtcttgagattttatttatttattttttatgagacagagtctcactctgttgcccaggctggagtgcagtggcgcaatctcagctcagtgcaacctctgcctcccaagtttaagcaattctcctgcctcagcctccctagtagctgggatttcaggcaccaccacacccagctaattaagtctgagaattttaagttccaacttggccttccacagtgttgtcaaaataggaggaaagtgcactttgacctcttgattcatagatttaaaatatnctggcataaagggccttgtcccagatctcaagtgttagggaagcacttggtcattttcttccctttctggcatattagagaaaatgatgtgtacataaaatttcctcataattttcagcctcacaatttatactacggtaatgagcgccggtagcccagacaagtacatgactaggatcagaaacccgagtagaaagtaagtcagcagaagagcgagttcgcccgtgctgtgaaaggtttgttgttactgttttgtggagagggggtgaggtgggtgtgtgctggtatttcttacagagggtggtaacatccttaaaatgtatacatatataatattttctgacaagcatctggcattgtcatttgtgtcagattgtcatcattagatattttatttggaattgtttgtatgaaaaccaatcttcggcggggcgtgatggctcatgactgtaatttcagcactttgagaggcagaggcaggcagatcacttgaggtcaggagttcaagaccagcctggccaacatggtgaaaccccatctctactaaaactacaaaaaaactgttagccaggtgtggtggtgggtacccaaaatcccgactactcaggagctgaggtaggagaatcacttgaactcgggaggtggagtttgtagtgagctgagatcacaccactgcactccagcctgggaaacagagtgagactccattaaaaaaaaaaaaaaaatcagtctttgaattaaatgcgtttttttcttcccttacagatgattttttaaaaaatgaaattcttgaagagctgcaccttaaaaaataagacaaagtgaaagtattgtattatgttacaaacaatgcaggctccttcctcatttaactttacaaccttgcgaagtgggtccaggagatttggagtttgtggtaaagccagtaatgggcattgtcctgcattcccttcccttcatggtttgcctcgatcctctctaagcttctatcctggcctgaataactcaaagataattggtctcagagatcaagccatatcctcaggccttatttccatcttctcatgattctgccatcatacctttgcttctccgctaatgaaatgagctggcaagacctctgttcattgtgaagtgcttctgaaagagcctaagaaaaaaggctcatctgaaagaaatggagaactctatttcgaaccaagcctgtttgaatgtgtgttagtctgatctttgatcatgtgtttccatgtaatgggagtctcgttttttataatgtttctaacgttttattgaaaaacctatggccctccttctttctcaatagctactttcttactgctttttgaaaataatatgcaaccaaattatttcttaatgtcacataattaagtaataaaatgtcaaaagaaatgttggcaaggagaataaaaaaatttccaagaaacttaaagt

SEQ ID NO: 282607 - DNA, 1834 bp, Homo sapiens
ttacccgggctacgagcagcggctgcaggtctccaagttgcggccgctggagcccgagccatgcggaccgcggaccgggaggcgcgcccggggcttccgtccctgctgctgctgctgctggccggggccgggctgtcagccgcctcgcccccagcagcgccgcgcttcaacgtgagcctggactcggtccccgagctgcgctggctgcccgtgctgcggcactacgacttggacttggtgcgcgccgcgatggcgcaagtcatcggggacagagtccccaagtgggtgcacgtgttaatcggaaaagtggtcctggagctggagcgcttcctgccccagcccttcaccggcgagatccgcggcatgtgtgacttcatgaacctcagcctggcggactgccttctggtcaacctggcctacgagtcctccgtgttctgcaccagtattgtggctcaagactccagaggccacatttaccatggtcggaatttggattatccttttgggaatgtcttacgcaagctgacagtggatgtgcaattcttaaagaatgggcagattgcattcacaggaactacttttattggctatgtaggattatggactggccagagcccacacaagtttacagtttctggtgatgaacgagataaaggctggtggtgggagaatgctatcgctgccctgtttcggagacacattcccgtcagctggctgatccgcgctaccctgagtgagtcggaaaacttcgaagcagctgttggcaagttggccaagactccccttattgctgatgtttattacattgttggtggcacgtccccccgggagggggtggtcatcacgaggaacagagatggcccagcagacatttggcctctagatcctttgaatggagcgtggttccgagttgagacaaattacgaccactggaagccagcacccaaggaagatgaccggagaacatctgccatcaaggcccttaatgctacaggacaagcaaacctcagcctggaggcacttttccagcctcacaatttatactacggtaatgagcgccggtagcccagacaagtacatgactaggatcagaaacccgagtagaaagtaagtcagcagaagagcgagttcgcccgtgctgtgaaagatgattttttaaaaaatgaaattcttgaagagctgcaccttaaaaaataagacaaagtgaaagtattgtattatgttacaaacaatgcaggctccttcctcatttaactttacaaccttgcgaagtgggtccaggagatttggagtttgtggtaaagccagtaatgggcattgtcctgcattcccttcccttcatggtttgcctcgatcctctctaagcttctatcctggcctgaataactcaaagataattggtctcagagatcaagccatatcctcaggccttatttccatcttctcatgattctgccatcatacctttgcttctccgctaatgaaatgagctggcaagacctctgttcattgtgaagtgcttctgaaagagcctaagaaaaaaggctcatctgaaagaaatggagaactctatttcgaaccaagcctgtttgaatgtgtgttagtctgatctttgatcatgtgtttccatgtaatgggagtctcgttttttataatgtttctaacgttttattgaaaaacctatggccctccttctttctcaatagctactttcttactgctttttgaaaataatatgcaaccaaattatttcttaatgtcacataattaagtaataaaatgtcaaaagaaatgttggcaaggagaataaaaaaatttccaagaaacttaaagt

SEQ ID NO: 282608 - DNA, 4773 bp, Homo sapiens
  misc_feature (389)..(389): n is a, c, g, or t
  misc_feature (399)..(400): n is a, c, g, or t
  misc_feature (410)..(410): n is a, c, g, or t
  misc_feature (413)..(413): n is a, c, g, or t
  misc_feature (422)..(422): n is a, c, g, or t
  misc_feature (425)..(425): n is a, c, g, or t
  misc_feature (431)..(431): n is a, c, g, or t
  misc_feature (442)..(442): n is a, c, g, or t
  misc_feature (444)..(444): n is a, c, g, or t
  misc_feature (454)..(454): n is a, c, g, or t
  misc_feature (463)..(463): n is a, c, g, or t
  misc_feature (466)..(466): n is a, c, g, or t
  misc_feature (487)..(489): n is a, c, g, or t
  misc_feature (492)..(492): n is a, c, g, or t
  misc_feature (497)..(497): n is a, c, g, or t
  misc_feature (520)..(521): n is a, c, g, or t
  misc_feature (523)..(524): n is a, c, g, or t
  misc_feature (530)..(532): n is a, c, g, or t
  misc_feature (541)..(541): n is a, c, g, or t
  misc_feature (4202)..(4202): n is a, c, g, or t
aaatcagtattctgctactcaaacaaatgagctatttggataacaaagcatacccagtggtctgctagtaaaccagctctttgtgtgggaagggacaaatgaaaaaattcccaaattcgtagcatttgttgacttccatggtgtgaatactcccacatggctgatttcaggcttatagttggctcatacacttcctgcatatttaataattggccctcaccagactgtaggagctagctccaatgcactattgactgtacccttcatagcggggcacaatgttgcccttttaatagtcattttttaaatgggggttaataaactacttttgtgttcttatagtttttttaggtaattatagaagtgatgaatatatctggctgggcgcngtggctcacnnctgtaatccnagnactttggangcngaggcnggtggatcacntnaggtcagganttcgagacnagnctggccaacatggtgaaaccnnntcnctacnaaaaatacaaaaattagccaggnntnntggtgnnngcctgtaanttgcggccgctggagcccgagccatgcggaccgcggaccgggaggcgcgcccggggcttccgtccctgctgctgctgctgctggccggggccgggctgtcagccgcctcgcccccagcagcgccgcgcttcaacgtgagcctggactcggtccccgagctgcgctggctgcccgtgctgcggcactacgacttggacttggtgcgcgccgcgatggcgcaagtcatcggggacagagtccccaagtgggtgcacgtgttaatcggaaaagtggtcctggagctggagcgcttcctgccccagcccttcaccggcgagatccgcggcatgtgtgacttcatgaacctcagcctggcggactgccttctggtcaacctggcctacgagtcctccgtgttctgcaccagtattgtggctcaagactccagaggccacatttaccatggtcggaatttggattatccttttgggaatgtcttacgcaagctgacagtggatgtgcaattcttaaagaatgggcagattgcattcacaggaactacttttattggctatgtaggattatggactggccagagcccacacaagtttacagtttctggtgatgaacgagataaaggctggtggtgggagaatgctatcgctgccctgtttcggagacacattcccgtcagctggctgatccgcgctaccctgagtgagtcggaaaacttcgaagcagctgttggcaagttggccaagactccccttattgctgatgtttattacattgttggtggcacgtccccccgggagggggtggtcatcacgaggaacagagatggcccagcagacatttggcctctagatcctttgaatggagcgtggttccgagttgagacaaattacgaccactggaagccagcacccaaggaagatgaccggagaacatctgccatcaaggcccttaatgctacaggacaagcaaacctcagcctggaggcacttttccagtgaaagcaggccaggtgcggtggctcacgcctgtaatcccagccctttgggaggccaaggcgggtggaacacttgaggtcaggagttcaagaccagcctggccaacatggtgaaacctcgtctctactaaaaatacaaaaatcaaccaggcatgacggtgcacgcctgttatcacagctacttgggaagcagcggctggagaattgcttgaacctgggaagtcgaggctgcaagtgagctgagatcatgccatggcagtctagcctgggcaacagagcgagactctgtttcaaaaaaaaaaagaaaagaaaactaattagtcagtattctgctactcaaacaaatgagctatttggataacaaagcatacccagtggtctgctagtaaaccagctctttgtgtgggaagggacaaatgaaaaaattcccaaatttgtagcatttgttgacttccatggtgtgaatactcccacatggctgatttcaggcttatagttggctcatacacttcctgcatatttaataattggccctcaccagactgtaggagctagctccaatgcactattgactgtacccttcatagcggggcacaatgttgcccttttaatagtcattttttaaatgggggttaataaactacttttgtgttcttatagtttttttaggtaattatagaagtgatgaatatatctggctgggcgcagtggctcacatctgtaatcctagtactttggaagccgaggcgggtggatcacttgaggtcaggagttcgagaccagcctggccaacatggtgaaacctcatctctactaaaaatacaaaaattagccaggcgtcatggtgcgtgcctgtaatcccagctacttgggaggtggaggcaggaaaatcactcgaatccgggagacagaggttgcagtgagctgagattgcactccagcctgggcgacagagggagactccgtcttaaaaaaaaaaaaaaaaaaaaaaaaaagaagtgatgaatatatcttttaaaaattagtattataataaaatagttacatttattttaataaaacaaagcattttctctgctttgaacagccctcataattttacatggtggcagtggccagttggctgtattataattgagttaagcattctccagttgttagattttcctctattaaaactctgaaataaacatattcgtttgcctctcccctgcttactttcagattatttcccttggctgaattcccagaagtaggattactgagttaacagttatgaatgtttaaatggtttctgaaatggtttggtcaaaataaaattgttagaaattataaacagtttaccaagtagtgtttttctctgttgtatacttgaaaattcaagagaaactgcttttaagtgacaatcaccatggagccagaattaacacagacttctgactctcaggccctttacatgtaatgattaacctcaactgaggctgttcagttgtattaggttaatagaaataagtgtagctgtatctgaaaaaaagaaaaagaaacaacaaaaaagtagtctgaacaaaggcagttagctctatgctgcccctttgtgccatgctgcaaaattacacccacctgcaatacatctccatcctctgctgtggctcatcagtagagaaaatactaaaacagtaatggagagcagaactatgactaaagtaaacgagcaattaaggtcctgttcagggaacctccattacccttggacgagctctgcacttgcttacagtgctgtctttaactgggtgtatgatttagctgtggacccagtgctactaattctgcctgtttctgaacaacccagctccgatattttgcacatgcacctcaactggattccaagacaaatgtgtgtacatgtgggcacatgtgctcaagttgtttaggtctcttgttatacggaatgtgtaatcaatgacactatacttttcatccttagatctgggcaaggtggaggggcggggcaggtgccttgatcctggagctttagaggccctcctctggaattcctctagttgtgataccacccccccaaagcatggtgtaaggaatctgctggaccaagggcatttgcccacctggagtctgcccaagtacccaggaccctgtaattctcagcctgaacagccccacctccacttccagggtttgtgttttcctcttccctgggtgatattctcctgatggtggtgcatggccactgagagagagcacaggggcaggtgcttgctggggaatgtgaaggcggtgatgtcacatgtgtgcaagtaaggcccttgtgggtaggacagagccagggtgagggccaaggcttggtctcccccactgccttggggtagagctctgaggagtcttgagattttatttatttattttttatgagacagagtctcactctgttgcccaggctggagtgcagtggcgcaatctcagctcagtgcaacctctgcctcccaagtttaagcaattctcctgcctcagcctccctagtagctgggatttcaggcaccaccacacccagctaattaagtctgagaattttaagttccaacttggccttccacagtgttgtcaaaataggaggaaagtgcactttgacctcttgattcatagatttaaaatatnctggcataaagggccttgtcccagatctcaagtgttagggaagcacttggtcattttcttccctttctggcatattagagaaaatgatgtgtacataaaatttcctcataattttcagcctcacaatttatactacggtaatgagcgccggtagcccagacaagtacatgactaggatcagaaacccgagtagaaagtaagtcagcagaagagcgagttcgcccgtgctgtgaaagatgattttttaaaaaatgaaattcttgaagagctgcaccttaaaaaataagacaaagtgaaagtattgtattatgttacaaacaatgcaggctccttcctcatttaactttacaaccttgcgaagtgggtccaggagatttggagtttgtggtaaagccagtaatgggcattgtcctgcattcccttcccttcatggtttgcctcgatcctctctaagcttctatcctggcctgaataactcaaagataattggtctcagagatcaagccatatcctcaggccttatttccatcttctcatgattcaccttacagggggatcctcgtcagatgtc

SEQ ID NO: 282609 - DNA, 1716 bp, Homo sapiens
ttacccgggctacgagcagcggctgcaggtctccaagttgcggccgctggagcccgagccatgcggaccgcggaccgggaggcgcgcccggggcttccgtccctgctgctgctgctgctggccggggccgggctgtcagccgcctcgcccccagcagcgccgcgcttcaacgtgagcctggactcggtccccgagctgcgctggctgcccgtgctgcggcactacgacttggacttggtgcgcgccgcgatggcgcaagtcatcggggacagagtccccaagtgggtgcacgtgttaatcggaaaagtggtcctggagctggagcgcttcctgccccagcccttcaccggcgagatccgcggcatgtgtgacttcatgaacctcagcctggcggactgccttctggtcaacctggcctacgagtcctccgtgttctgcaccagtattgtggctcaagactccagaggccacatttaccatggtcggaatttggattatccttttgggaatgtcttacgcaagctgacagtggatgtgcaattcttaaagaatgggcagattgcattcacaggaactacttttattggctatgtaggattatggactggccagagcccacacaagtttacagtttctggtgatgaacgagataaaggctggtggtgggagaatgctatcgctgccctgtttcggagacacattcccgtcagctggctgatccgcgctaccctgagtgagtcggaaaacttcgaagcagctgttggcaagttggccaagactccccttattgctgatgtttattacattgttggtggcacgtccccccgggagggggtggtcatcacgaggaacagagatggcccagcagacatttggcctctagatcctttgaatggagcgtggttccgagttgagacaaattacgaccactggaagccagcacccaaggaagatgaccggagaacatctgccatcaaggcccttaatgctacaggacaagcaaacctcagcctggaggcacttttccagatgattttttaaaaaatgaaattcttgaagagctgcaccttaaaaaataagacaaagtgaaagtattgtattatgttacaaacaatgcaggctccttcctcatttaactttacaaccttgcgaagtgggtccaggagatttggagtttgtggtaaagccagtaatgggcattgtcctgcattcccttcccttcatggtttgcctcgatcctctctaagcttctatcctggcctgaataactcaaagataattggtctcagagatcaagccatatcctcaggccttatttccatcttctcatgattctgccatcatacctttgcttctccgctaatgaaatgagctggcaagacctctgttcattgtgaagtgcttctgaaagagcctaagaaaaaaggctcatctgaaagaaatggagaactctatttcgaaccaagcctgtttgaatgtgtgttagtctgatctttgatcatgtgtttccatgtaatgggagtctcgttttttataatgtttctaacgttttattgaaaaacctatggccctccttctttctcaatagctactttcttactgctttttgaaaataatatgcaaccaaattatttcttaatgtcacataattaagtaataaaatgtcaaaagaaatgttggcaaggagaataaaaaaatttccaagaaacttaaagt

SEQ ID NO: 282610 - DNA, 2509 bp, Homo sapiens
  misc_feature (389)..(389): n is a, c, g, or t
  misc_feature (399)..(400): n is a, c, g, or t
  misc_feature (410)..(410): n is a, c, g, or t
  misc_feature (413)..(413): n is a, c, g, or t
  misc_feature (422)..(422): n is a, c, g, or t
  misc_feature (425)..(425): n is a, c, g, or t
  misc_feature (431)..(431): n is a, c, g, or t
  misc_feature (442)..(442): n is a, c, g, or t
  misc_feature (444)..(444): n is a, c, g, or t
  misc_feature (454)..(454): n is a, c, g, or t
  misc_feature (463)..(463): n is a, c, g, or t
  misc_feature (466)..(466): n is a, c, g, or t
  misc_feature (487)..(489): n is a, c, g, or t
  misc_feature (492)..(492): n is a, c, g, or t
  misc_feature (497)..(497): n is a, c, g, or t
  misc_feature (520)..(521): n is a, c, g, or t
  misc_feature (523)..(524): n is a, c, g, or t
  misc_feature (530)..(532): n is a, c, g, or t
  misc_feature (541)..(541): n is a, c, g, or t
aaatcagtattctgctactcaaacaaatgagctatttggataacaaagcatacccagtggtctgctagtaaaccagctctttgtgtgggaagggacaaatgaaaaaattcccaaattcgtagcatttgttgacttccatggtgtgaatactcccacatggctgatttcaggcttatagttggctcatacacttcctgcatatttaataattggccctcaccagactgtaggagctagctccaatgcactattgactgtacccttcatagcggggcacaatgttgcccttttaatagtcattttttaaatgggggttaataaactacttttgtgttcttatagtttttttaggtaattatagaagtgatgaatatatctggctgggcgcngtggctcacnnctgtaatccnagnactttggangcngaggcnggtggatcacntnaggtcagganttcgagacnagnctggccaacatggtgaaaccnnntcnctacnaaaaatacaaaaattagccaggnntnntggtgnnngcctgtaanttgcggccgctggagcccgagccatgcggaccgcggaccgggaggcgcgcccggggcttccgtccctgctgctgctgctgctggccggggccgggctgtcagccgcctcgcccccagcagcgccgcgcttcaacgtgagcctggactcggtccccgagctgcgctggctgcccgtgctgcggcactacgacttggacttggtgcgcgccgcgatggcgcaagtcatcggggacagagtccccaagtgggtgcacgtgttaatcggaaaagtggtcctggagctggagcgcttcctgccccagcccttcaccggcgagatccgcggcatgtgtgacttcatgaacctcagcctggcggactgccttctggtcaacctggcctacgagtcctccgtgttctgcaccagtattgtggctcaagactccagaggccacatttaccatggtcggaatttggattatccttttgggaatgtcttacgcaagctgacagtggatgtgcaattcttaaagaatgggcagattgcattcacaggaactacttttattggctatgtaggattatggactggccagagcccacacaagtttacagtttctggtgatgaacgagataaaggctggtggtgggagaatgctatcgctgccctgtttcggagacacattcccgtcagctggctgatccgcgctaccctgagtgagtcggaaaacttcgaagcagctgttggcaagttggccaagactccccttattgctgatgtttattacattgttggtggcacgtccccccgggagggggtggtcatcacgaggaacagagatggcccagcagacatttggcctctagatcctttgaatggagcgtggttccgagttgagacaaattacgaccactggaagccagcacccaaggaagatgaccggagaacatctgccatcaaggcccttaatgctacaggacaagcaaacctcagcctggaggcacttttccagtgaaagcaggccaggtgcggtggctcacgcctgtaatcccagccctttgggaggccaaggcgggtggaacacttgaggtcaggagttcaagaccagcctggccaacatggtgaaacctcgtctctactaaaaatacaaaaatcaaccaggcatgacggtgcacgcctgttatcacagctacttgggaagcagcggctggagaattgcttgaacctgggaagtcgaggctgcaagtgagctgagatcatgccatggcagtctagcctgggcaacagagcgagactctgtttcaaaaaaaaaaagaaaagaaaactaattagtcagtattctgctactcaaacaaatgagctatttggataacaaagcatacccagtggtctgctagtaaaccagctctttgtgtgggaagggacaaatgaaaaaattcccaaatttgtagcatttgttgacttccatggtgtgaatactcccacatggctgatttcaggcttatagttggctcatacacttcctgcatatttaataattggccctcaccagactgtaggagctagctccaatgcactattgactgtacccttcatagcggggcacaatgttgcccttttaatagtcattttttaaatgggggttaataaactacttttgtgttcttatagtttttttaggtaattatagaagtgatgaatatatctggctgggcgcggtggctcacgcctgtaatcccagcactttgggaggccgaggcgggcggatcacgaggtcaggagatcgagaccatcccggctaaaacggtgaaaccccgtctctactaaaaatacaaaaaattagccgggcgtagtggcgggcgcctgtagtcccagctacttgggaggctgaggcaggagaatggcgtgaacccgggaggcggagcttgcagtgagccgagatcccgccactgcactccagcctgggcgacagagcgagactccgtctc

SEQ ID NO: 282611 - DNA, 1240 bp, Homo sapiens
ggatcccctggctagtgaatgatgagataaaggctggtggtgggagaatgctatcgctgccctgtttcggagacacattcccgtcagctggctgatccgcgctaccctgagtgagtcggaaaacttcgaagcagctgttggcaagttggccaagactccccttattgctgatgtttattacattgttggtggcacgtccccccgggagggggtggtcatcacgaggaacagagatggcccagcagacatttggcctctagatcctttgaatggagcgtggttccgagttgagacaaattacgaccactggaagccagcacccaaggaagatgaccggagaacatctgccatcaaggcccttaatgctacaggacaagcaaacctcagcctggaggcacttttccagattttgtcggtggttccagtttataacaacctcacaatttatactacggtaatgagcgccggtagcccagacaagtacatgactaggatcagaaacccgagtagaaagtaagtcagcagaagagcgagttcgcccgtgctgtgaaagatgattttttaaaaaatgaaattcttgaagagctgcaccttaaaaaataagacaaagtgaaagtattgtattatgttacaaacaatgcaggctccttcctcatttaactttacaaccttgcgaagtgggtccaggagatttggagtttgtggtaaagccagtaatgggcattgtcctgcattcccttcccttcatggtttgcctcgatcctctctaagcttctatcctggcctgaataactcaaagataattggtctcagagatcaagccatatcctcaggccttatttccatcttctcatgattctgccatcatacctttgcttctccgctaatgaaatgagctggcaagacctctgttcattgtgaagtgcttctgaaagagcctaagaaaaaaggctcatctgaaagaaatggagaactctatttcgaaccaagcctgtttgaatgtgtgttagtctgatctttgatcatgtgtttccatgtaatgggagtctcgttttttataatgtttctaacgttttattgaaaaacctatggccctccttctttctcaatagctactttcttactgctttttgaaaataatatgcaaccaaattatttcttaatgtcacataattaagtaataaaatgtcaaaagaaatgttggcaaggagaataaaaaaatttccaagaaacttaaagt

SEQ ID NO: 282612 - DNA, 1881 bp, Homo sapiens
ttacccgggctacgagcagcggctgcaggtctccaagttgcggccgctggagcccgagccatgcggaccgcggaccgggaggcgcgcccggggcttccgtccctgctgctgctgctgctggccggggccgggctgtcagccgcctcgcccccagcagcgccgcgcttcaacgtgagcctggactcggtccccgagctgcgctggctgcccgtgctgcggcactacgacttggacttggtgcgcgccgcgatggcgcaagtcatcggggacagagtccccaagtgggtgcacgtgttaatcggaaaagtggtcctggagctggagcgcttcctgccccagcccttcaccggcgagatccgcggcatgtgtgacttcatgaacctcagcctggcggactgccttctggtcaacctggcctacgagtcctccgtgttctgcaccagtattgtggctcaagactccagaggccacatttaccatggtcggaatttggattatccttttgggaatgtcttacgcaagctgacagtggatgtgcaattcttaaagaatgggcagattgcattcacaggaactacttttattggctatgtaggattatggactggccagagcccacacaagtttacagtttctggtgatgaacgagataaaggctggtggtgggagaatgctatcgctgccctgtttcggagacacattcccgtcagctggctgatccgcgctaccctgagtgagtcggaaaacttcgaagcagctgttggcaagttggccaagactccccttattgctgatgtttattacattgttggtggcacgtccccccgggagggggtggtcatcacgaggaacagagatggcccagcagacatttggcctctagatcctttgaatggagcgtggttccgagttgagacaaattacgaccactggaagccagcacccaaggaagatgaccggagaacatctgccatcaaggcccttaatgctacaggacaagcaaacctcagcctggaggcacttttccagattttgtcggtggttccagtttataacaacctcacaatttatactacggtaatgagcgccggtagcccagacaagtacatgactaggatcagaaacccgagtagaaagtaagtcagcagaagagcgagttcgcccgtgctgtgaaagtgagcaagaagaacccatcaggtgattgtcaggcctctgagcccaagctaagccatcatatgccctgtgacctgcacgtatacatccagatggcctgaagcaactgaagatccacaaaagaagagaaaatagccagttcctgccttaactgatgacatttcaccattgtgatttgttcctgccccaccctaactgatcaattgactttgtgacaagacaccctccccacccttgcaataatgtactttgtgatattcccccgcccttgtgaatgtactttgtacgatacaccctccccacccttgagaaggtactttgtaatatcctctccgcccttgagaatgtactttgtaagatccacttcctgcctgcaaaaaattgctccgaactccaccgtctatcccaaacctataagaactaatgataatcctaccaccctttgctgactccttttttggactcagcccacgtgcacccaggtgattaaaaagctttattgctcacatgaagcctatttggtggtctcttcacacagatgtgtgtgacagtgataacagtgtcacgtggtttaactacaatgtgtccagatattgaattttgtttaagcctgcttgggatttgttgtgctccccaaatttcaagtttgtgtcttttgttcaattttggaaaatagtcagctatctcagaattgctcacctaaaaaaa

SEQ ID NO: 282613 - DNA, 1042 bp, Homo sapiens
ttacccgggctacgagcagcggctgcaggtctccaagttgcggccgctggagcccgagccatgcggaccgcggaccgggaggcgcgcccggggcttccgtccctgctgctgctgctgctggccggggccgggctgtcagccgcctcgcccccagcagcgccgcgcttcaacgtgagcctggactcggtccccgagctgcgctggctgcccgtgctgcggcactacgacttggacttggtgcgcgccgcgatggcgcaagtcatcggggacagagtccccaagtgggtgcacgtgttaatcggaaaagtggtcctggagctggagcgcttcctgccccagcccttcaccggcgagatccgcggcatgtgtgacttcatgaacctcagcctggcggactgccttctggtcaacctggcctacgagtcctccgtgttctgcaccagtattgtggctcaagactccagaggccacatttaccatggtcggaatttggattatccttttgggaatgtcttacgcaagctgacagtggatgtgcaattcttaaagaatgggcagattgcattcacaggaactacttttattggctatgtaggattatggactggccagagcccacacaagtttacagtttctggtgatgaacgagataaaggctggtggtgggagaatgctatcgctgccctgtttcggagacacattcccgtcagctggctgatccgcgctaccctgagtgagtcggaaaacttcgaagcagctgttggcaagttggccaagactccccttattgctgatgtttattacattgttggtggcacgtccccccgggagggggtggtcatcacgaggaacagagatggcccagcagacatttggcctctagatcctttgaatggagcgtggtcccgagtcaagtctgattacgatcacggagttggtggcaggtcaaccaacaggatcggacaatatcgtccatcaagagcccctgaggctacatggacacagcggtccgcatgccgggatgaccacttttccagatgtt

SEQ ID NO: 282614 - DNA, 5654 bp, Homo sapiens
  misc_feature (389)..(389): n is a, c, g, or t
  misc_feature (399)..(400): n is a, c, g, or t
  misc_feature (410)..(410): n is a, c, g, or t
  misc_feature (413)..(413): n is a, c, g, or t
  misc_feature (422)..(422): n is a, c, g, or t
  misc_feature (425)..(425): n is a, c, g, or t
  misc_feature (431)..(431): n is a, c, g, or t
  misc_feature (442)..(442): n is a, c, g, or t
  misc_feature (444)..(444): n is a, c, g, or t
  misc_feature (454)..(454): n is a, c, g, or t
  misc_feature (463)..(463): n is a, c, g, or t
  misc_feature (466)..(466): n is a, c, g, or t
  misc_feature (487)..(489): n is a, c, g, or t
  misc_feature (492)..(492): n is a, c, g, or t
  misc_feature (497)..(497): n is a, c, g, or t
  misc_feature (520)..(521): n is a, c, g, or t
  misc_feature (523)..(524): n is a, c, g, or t
  misc_feature (530)..(532): n is a, c, g, or t
  misc_feature (541)..(541): n is a, c, g, or t
  misc_feature (4202)..(4202): n is a, c, g, or t
aaatcagtattctgctactcaaacaaatgagctatttggataacaaagcatacccagtggtctgctagtaaaccagctctttgtgtgggaagggacaaatgaaaaaattcccaaattcgtagcatttgttgacttccatggtgtgaatactcccacatggctgatttcaggcttatagttggctcatacacttcctgcatatttaataattggccctcaccagactgtaggagctagctccaatgcactattgactgtacccttcatagcggggcacaatgttgcccttttaatagtcattttttaaatgggggttaataaactacttttgtgttcttatagtttttttaggtaattatagaagtgatgaatatatctggctgggcgcngtggctcacnnctgtaatccnagnactttggangcngaggcnggtggatcacntnaggtcagganttcgagacnagnctggccaacatggtgaaaccnnntcnctacnaaaaatacaaaaattagccaggnntnntggtgnnngcctgtaanttgcggccgctggagcccgagccatgcggaccgcggaccgggaggcgcgcccggggcttccgtccctgctgctgctgctgctggccggggccgggctgtcagccgcctcgcccccagcagcgccgcgcttcaacgtgagcctggactcggtccccgagctgcgctggctgcccgtgctgcggcactacgacttggacttggtgcgcgccgcgatggcgcaagtcatcggggacagagtccccaagtgggtgcacgtgttaatcggaaaagtggtcctggagctggagcgcttcctgccccagcccttcaccggcgagatccgcggcatgtgtgacttcatgaacctcagcctggcggactgccttctggtcaacctggcctacgagtcctccgtgttctgcaccagtattgtggctcaagactccagaggccacatttaccatggtcggaatttggattatccttttgggaatgtcttacgcaagctgacagtggatgtgcaattcttaaagaatgggcagattgcattcacaggaactacttttattggctatgtaggattatggactggccagagcccacacaagtttacagtttctggtgatgaacgagataaaggctggtggtgggagaatgctatcgctgccctgtttcggagacacattcccgtcagctggctgatccgcgctaccctgagtgagtcggaaaacttcgaagcagctgttggcaagttggccaagactccccttattgctgatgtttattacattgttggtggcacgtccccccgggagggggtggtcatcacgaggaacagagatggcccagcagacatttggcctctagatcctttgaatggagcgtggttccgagttgagacaaattacgaccactggaagccagcacccaaggaagatgaccggagaacatctgccatcaaggcccttaatgctacaggacaagcaaacctcagcctggaggcacttttccagtgaaagcaggccaggtgcggtggctcacgcctgtaatcccagccctttgggaggccaaggcgggtggaacacttgaggtcaggagttcaagaccagcctggccaacatggtgaaacctcgtctctactaaaaatacaaaaatcaaccaggcatgacggtgcacgcctgttatcacagctacttgggaagcagcggctggagaattgcttgaacctgggaagtcgaggctgcaagtgagctgagatcatgccatggcagtctagcctgggcaacagagcgagactctgtttcaaaaaaaaaaagaaaagaaaactaattagtcagtattctgctactcaaacaaatgagctatttggataacaaagcatacccagtggtctgctagtaaaccagctctttgtgtgggaagggacaaatgaaaaaattcccaaatttgtagcatttgttgacttccatggtgtgaatactcccacatggctgatttcaggcttatagttggctcatacacttcctgcatatttaataattggccctcaccagactgtaggagctagctccaatgcactattgactgtacccttcatagcggggcacaatgttgcccttttaatagtcattttttaaatgggggttaataaactacttttgtgttcttatagtttttttaggtaattatagaagtgatgaatatatctggctgggcgcagtggctcacatctgtaatcctagtactttggaagccgaggcgggtggatcacttgaggtcaggagttcgagaccagcctggccaacatggtgaaacctcatctctactaaaaatacaaaaattagccaggcgtcatggtgcgtgcctgtaatcccagctacttgggaggtggaggcaggaaaatcactcgaatccgggagacagaggttgcagtgagctgagattgcactccagcctgggcgacagagggagactccgtcttaaaaaaaaaaaaaaaaaaaaaaaaaagaagtgatgaatatatcttttaaaaattagtattataataaaatagttacatttattttaataaaacaaagcattttctctgctttgaacagccctcataattttacatggtggcagtggccagttggctgtattataattgagttaagcattctccagttgttagattttcctctattaaaactctgaaataaacatattcgtttgcctctcccctgcttactttcagattatttcccttggctgaattcccagaagtaggattactgagttaacagttatgaatgtttaaatggtttctgaaatggtttggtcaaaataaaattgttagaaattataaacagtttaccaagtagtgtttttctctgttgtatacttgaaaattcaagagaaactgcttttaagtgacaatcaccatggagccagaattaacacagacttctgactctcaggccctttacatgtaatgattaacctcaactgaggctgttcagttgtattaggttaatagaaataagtgtagctgtatctgaaaaaaagaaaaagaaacaacaaaaaagtagtctgaacaaaggcagttagctctatgctgcccctttgtgccatgctgcaaaattacacccacctgcaatacatctccatcctctgctgtggctcatcagtagagaaaatactaaaacagtaatggagagcagaactatgactaaagtaaacgagcaattaaggtcctgttcagggaacctccattacccttggacgagctctgcacttgcttacagtgctgtctttaactgggtgtatgatttagctgtggacccagtgctactaattctgcctgtttctgaacaacccagctccgatattttgcacatgcacctcaactggattccaagacaaatgtgtgtacatgtgggcacatgtgctcaagttgtttaggtctcttgttatacggaatgtgtaatcaatgacactatacttttcatccttagatctgggcaaggtggaggggcggggcaggtgccttgatcctggagctttagaggccctcctctggaattcctctagttgtgataccacccccccaaagcatggtgtaaggaatctgctggaccaagggcatttgcccacctggagtctgcccaagtacccaggaccctgtaattctcagcctgaacagccccacctccacttccagggtttgtgttttcctcttccctgggtgatattctcctgatggtggtgcatggccactgagagagagcacaggggcaggtgcttgctggggaatgtgaaggcggtgatgtcacatgtgtgcaagtaaggcccttgtgggtaggacagagccagggtgagggccaaggcttggtctcccccactgccttggggtagagctctgaggagtcttgagattttatttatttattttttatgagacagagtctcactctgttgcccaggctggagtgcagtggcgcaatctcagctcagtgcaacctctgcctcccaagtttaagcaattctcctgcctcagcctccctagtagctgggatttcaggcaccaccacacccagctaattaagtctgagaattttaagttccaacttggccttccacagtgttgtcaaaataggaggaaagtgcactttgacctcttgattcatagatttaaaatatnctggcataaagggccttgtcccagatctcaagtgttagggaagcacttggtcattttcttccctttctggcatattagagaaaatgatgtgtacataaaatttcctcataattttcagcctcacaatttatactacggtaatgagcgccggtagcccagacaagtacatgactaggatcagaaacccgagtagaaagtaagtcagcagaagagcgagttcgcccgtgctgtgaaaggtttgttgttactgttttgtggagagggggtgaggtgggtgtgtgctggtatttcttacagagggtggtaacatccttaaaatgtatacatatataatattttctgacaagcatctggcattgtcatttgtgtcagattgtcatcattagatattttatttggaattgtttgtatgaaaaccaatcttcggcggggcgtgatggctcatgactgtaatttcagcactttgagaggcagaggcaggcagatcacttgaggtcaggagttcaagaccagcctggccaacatggtgaaaccccatctctactaaaactacaaaaaaactgttagccaggtgtggtggtgggtacccaaaatcccgactactcaggagctgaggtaggagaatcacttgaactcgggaggtggagtttgtagtgagctgagatcacaccactgcactccagcctgggaaacagagtgagactccattaaaaaaaaaaaaaaaatcagtctttgaattaaatgcgtttttttcttcccttacagatgattttttaaaaaatgaaattcttgaagagctgcaccttaaaaaataagacaaagtgaaagtattgtattatgttacaaacaatgcaggctccttcctcatttaactttacaaccttgcgaagtgggtccaggagatttggagtttgtggtaaagccagtaatgggcattgtcctgcattcccttcccttcatggtttgcctcgatcctctctaagcttctatcctggcctgaataactcaaagataattggtctcagagatcaagccatatcctcaggccttatttccatcttctcatgattctgccatcatacctttgcttctccgctaatgaaatgagctggcaagacctctgttcattgtgaagtgcttctgaaagagcctaagaaaaaaggctcatctgaaagaaatggagaactctatttcgaaccaagcctgtttgaatgtgtgttagtctgatctttgatcatgtgtttccatgtaatgggagtctcgttttttataatgtttctaacgttttattgaaaaacctatggccctccttctttctcaatagctactttcttactgctttttgaaaataatatgcaaccaaattatttcttaatgtcacataattaagtaataaaatgtcaaaagaaatgttggcaaggagaataaaaaaatttccaagaaacttaaagt

SEQ ID NO: 282615 - DNA, 5753 bp, Homo sapiens
  misc_feature (389)..(389): n is a, c, g, or t
  misc_feature (399)..(400): n is a, c, g, or t
  misc_feature (410)..(410): n is a, c, g, or t
  misc_feature (413)..(413): n is a, c, g, or t
  misc_feature (422)..(422): n is a, c, g, or t
  misc_feature (425)..(425): n is a, c, g, or t
  misc_feature (431)..(431): n is a, c, g, or t
  misc_feature (442)..(442): n is a, c, g, or t
  misc_feature (444)..(444): n is a, c, g, or t
  misc_feature (454)..(454): n is a, c, g, or t
  misc_feature (463)..(463): n is a, c, g, or t
  misc_feature (466)..(466): n is a, c, g, or t
  misc_feature (487)..(489): n is a, c, g, or t
  misc_feature (492)..(492): n is a, c, g, or t
  misc_feature (497)..(497): n is a, c, g, or t
  misc_feature (520)..(521): n is a, c, g, or t
  misc_feature (523)..(524): n is a, c, g, or t
  misc_feature (530)..(532): n is a, c, g, or t
  misc_feature (541)..(541): n is a, c, g, or t
  misc_feature (4202)..(4202): n is a, c, g, or t
aaatcagtattctgctactcaaacaaatgagctatttggataacaaagcatacccagtggtctgctagtaaaccagctctttgtgtgggaagggacaaatgaaaaaattcccaaattcgtagcatttgttgacttccatggtgtgaatactcccacatggctgatttcaggcttatagttggctcatacacttcctgcatatttaataattggccctcaccagactgtaggagctagctccaatgcactattgactgtacccttcatagcggggcacaatgttgcccttttaatagtcattttttaaatgggggttaataaactacttttgtgttcttatagtttttttaggtaattatagaagtgatgaatatatctggctgggcgcngtggctcacnnctgtaatccnagnactttggangcngaggcnggtggatcacntnaggtcagganttcgagacnagnctggccaacatggtgaaaccnnntcnctacnaaaaatacaaaaattagccaggnntnntggtgnnngcctgtaanttgcggccgctggagcccgagccatgcggaccgcggaccgggaggcgcgcccggggcttccgtccctgctgctgctgctgctggccggggccgggctgtcagccgcctcgcccccagcagcgccgcgcttcaacgtgagcctggactcggtccccgagctgcgctggctgcccgtgctgcggcactacgacttggacttggtgcgcgccgcgatggcgcaagtcatcggggacagagtccccaagtgggtgcacgtgttaatcggaaaagtggtcctggagctggagcgcttcctgccccagcccttcaccggcgagatccgcggcatgtgtgacttcatgaacctcagcctggcggactgccttctggtcaacctggcctacgagtcctccgtgttctgcaccagtattgtggctcaagactccagaggccacatttaccatggtcggaatttggattatccttttgggaatgtcttacgcaagctgacagtggatgtgcaattcttaaagaatgggcagattgcattcacaggaactacttttattggctatgtaggattatggactggccagagcccacacaagtttacagtttctggtgatgaacgagataaaggctggtggtgggagaatgctatcgctgccctgtttcggagacacattcccgtcagctggctgatccgcgctaccctgagtgagtcggaaaacttcgaagcagctgttggcaagttggccaagactccccttattgctgatgtttattacattgttggtggcacgtccccccgggagggggtggtcatcacgaggaacagagatggcccagcagacatttggcctctagatcctttgaatggagcgtggttccgagttgagacaaattacgaccactggaagccagcacccaaggaagatgaccggagaacatctgccatcaaggcccttaatgctacaggacaagcaaacctcagcctggaggcacttttccagtgaaagcaggccaggtgcggtggctcacgcctgtaatcccagccctttgggaggccaaggcgggtggaacacttgaggtcaggagttcaagaccagcctggccaacatggtgaaacctcgtctctactaaaaatacaaaaatcaaccaggcatgacggtgcacgcctgttatcacagctacttgggaagcagcggctggagaattgcttgaacctgggaagtcgaggctgcaagtgagctgagatcatgccatggcagtctagcctgggcaacagagcgagactctgtttcaaaaaaaaaaagaaaagaaaactaattagtcagtattctgctactcaaacaaatgagctatttggataacaaagcatacccagtggtctgctagtaaaccagctctttgtgtgggaagggacaaatgaaaaaattcccaaatttgtagcatttgttgacttccatggtgtgaatactcccacatggctgatttcaggcttatagttggctcatacacttcctgcatatttaataattggccctcaccagactgtaggagctagctccaatgcactattgactgtacccttcatagcggggcacaatgttgcccttttaatagtcattttttaaatgggggttaataaactacttttgtgttcttatagtttttttaggtaattatagaagtgatgaatatatctggctgggcgcagtggctcacatctgtaatcctagtactttggaagccgaggcgggtggatcacttgaggtcaggagttcgagaccagcctggccaacatggtgaaacctcatctctactaaaaatacaaaaattagccaggcgtcatggtgcgtgcctgtaatcccagctacttgggaggtggaggcaggaaaatcactcgaatccgggagacagaggttgcagtgagctgagattgcactccagcctgggcgacagagggagactccgtcttaaaaaaaaaaaaaaaaaaaaaaaaaagaagtgatgaatatatcttttaaaaattagtattataataaaatagttacatttattttaataaaacaaagcattttctctgctttgaacagccctcataattttacatggtggcagtggccagttggctgtattataattgagttaagcattctccagttgttagattttcctctattaaaactctgaaataaacatattcgtttgcctctcccctgcttactttcagattatttcccttggctgaattcccagaagtaggattactgagttaacagttatgaatgtttaaatggtttctgaaatggtttggtcaaaataaaattgttagaaattataaacagtttaccaagtagtgtttttctctgttgtatacttgaaaattcaagagaaactgcttttaagtgacaatcaccatggagccagaattaacacagacttctgactctcaggccctttacatgtaatgattaacctcaactgaggctgttcagttgtattaggttaatagaaataagtgtagctgtatctgaaaaaaagaaaaagaaacaacaaaaaagtagtctgaacaaaggcagttagctctatgctgcccctttgtgccatgctgcaaaattacacccacctgcaatacatctccatcctctgctgtggctcatcagtagagaaaatactaaaacagtaatggagagcagaactatgactaaagtaaacgagcaattaaggtcctgttcagggaacctccattacccttggacgagctctgcacttgcttacagtgctgtctttaactgggtgtatgatttagctgtggacccagtgctactaattctgcctgtttctgaacaacccagctccgatattttgcacatgcacctcaactggattccaagacaaatgtgtgtacatgtgggcacatgtgctcaagttgtttaggtctcttgttatacggaatgtgtaatcaatgacactatacttttcatccttagatctgggcaaggtggaggggcggggcaggtgccttgatcctggagctttagaggccctcctctggaattcctctagttgtgataccacccccccaaagcatggtgtaaggaatctgctggaccaagggcatttgcccacctggagtctgcccaagtacccaggaccctgtaattctcagcctgaacagccccacctccacttccagggtttgtgttttcctcttccctgggtgatattctcctgatggtggtgcatggccactgagagagagcacaggggcaggtgcttgctggggaatgtgaaggcggtgatgtcacatgtgtgcaagtaaggcccttgtgggtaggacagagccagggtgagggccaaggcttggtctcccccactgccttggggtagagctctgaggagtcttgagattttatttatttattttttatgagacagagtctcactctgttgcccaggctggagtgcagtggcgcaatctcagctcagtgcaacctctgcctcccaagtttaagcaattctcctgcctcagcctccctagtagctgggatttcaggcaccaccacacccagctaattaagtctgagaattttaagttccaacttggccttccacagtgttgtcaaaataggaggaaagtgcactttgacctcttgattcatagatttaaaatatnctggcataaagggccttgtcccagatctcaagtgttagggaagcacttggtcattttcttccctttctggcatattagagaaaatgatgtgtacataaaatttcctcataattttcagcctcacaatttatactacggtaatgagcgccggtagcccagacaagtacatgactaggatcagaaacccgagtagaaagtaagtcagcagaagagcgagttcgcccgtgctgtgaaaggtttgttgttactgttttgtggagagggggtgaggtgggtgtgtgctggtatttcttacagagggtggtaacatccttaaaatgtatacatatataatattttctgacaagcatctggcattgtcatttgtgtcagattgtcatcattagatattttatttggaattgtttgtatgaaaaccaatcttcggcggggcgtgatggctcatgactgtaatttcagcactttgagaggcagaggcaggcagatcacttgaggtcaggagttcaagaccagcctggccaacatggtgaaaccccatctctactaaaactacaaaaaaactgttagccaggtgtggtggtgggtacccaaaatcccgactactcaggagctgaggtaggagaatcacttgaactcgggaggtggagtttgtagtgagctgagatcacaccactgcactccagcctgggaaacagagtgagactccattaaaaaaaaaaaaaaaatcagtctttgaattaaatgcgtttttttcttcccttacagatgattttttaaaaaatgaaattcttgaagagctgcaccttaaaaaataagacaaagtgaaagtattgtattatgttacaaacaatgcaggctccttcctcatttaactttacaaccttgcgaagtgggtccaggagatttggagtttgtggtaaagccagtaatgggcattgtcctgcattcccttcccttcatggtttgcctcgatcctctctaagcttctatcctggcctgaataactcaaagataattggtctcagagatcaagccatatcctcaggccttatttccatcttctcatgattctgccatcatacctttgcttctccgctaatgaaatgagctggcaagacctctgttcattgtgaagtgcttctgaaagagcctaagaaaaaaggctcatctgaaagaaatggagaactctatttcgaaccaagcctgtttgaatgtgtgttagtctgatctttgatcatgtgtttccatgtaatgggagtctcgttttttataatgtttctaacgttttattgaaaaacctatggccctccttctttctcaatagctactttcttactgctttttgaaaataatatgcaaccaaattatttcttaatgtcacataattaagtaataaaatgtcaaaagaaatgttggcaaggagaataaaaaacctatggccctgcttctttctcaatagctactttcttactgctttgtgaaaataatatgcaaccattttattacttaattatgtgacattaagaaataatttggttgcatattattttc

SEQ ID NO: 282616 - DNA, 5125 bp, Homo sapiens
  misc_feature (389)..(389): n is a, c, g, or t
  misc_feature (399)..(400): n is a, c, g, or t
  misc_feature (410)..(410): n is a, c, g, or t
  misc_feature (413)..(413): n is a, c, g, or t
  misc_feature (422)..(422): n is a, c, g, or t
  misc_feature (425)..(425): n is a, c, g, or t
  misc_feature (431)..(431): n is a, c, g, or t
  misc_feature (442)..(442): n is a, c, g, or t
  misc_feature (444)..(444): n is a, c, g, or t
  misc_feature (454)..(454): n is a, c, g, or t
  misc_feature (463)..(463): n is a, c, g, or t
  misc_feature (466)..(466): n is a, c, g, or t
  misc_feature (487)..(489): n is a, c, g, or t
  misc_feature (492)..(492): n is a, c, g, or t
  misc_feature (497)..(497): n is a, c, g, or t
  misc_feature (520)..(521): n is a, c, g, or t
  misc_feature (523)..(524): n is a, c, g, or t
  misc_feature (530)..(532): n is a, c, g, or t
  misc_feature (541)..(541): n is a, c, g, or t
  misc_feature (4202)..(4202): n is a, c, g, or t
aaatcagtattctgctactcaaacaaatgagctatttggataacaaagcatacccagtggtctgctagtaaaccagctctttgtgtgggaagggacaaatgaaaaaattcccaaattcgtagcatttgttgacttccatggtgtgaatactcccacatggctgatttcaggcttatagttggctcatacacttcctgcatatttaataattggccctcaccagactgtaggagctagctccaatgcactattgactgtacccttcatagcggggcacaatgttgcccttttaatagtcattttttaaatgggggttaataaactacttttgtgttcttatagtttttttaggtaattatagaagtgatgaatatatctggctgggcgcngtggctcacnnctgtaatccnagnactttggangcngaggcnggtggatcacntnaggtcagganttcgagacnagnctggccaacatggtgaaaccnnntcnctacnaaaaatacaaaaattagccaggnntnntggtgnnngcctgtaanttgcggccgctggagcccgagccatgcggaccgcggaccgggaggcgcgcccggggcttccgtccctgctgctgctgctgctggccggggccgggctgtcagccgcctcgcccccagcagcgccgcgcttcaacgtgagcctggactcggtccccgagctgcgctggctgcccgtgctgcggcactacgacttggacttggtgcgcgccgcgatggcgcaagtcatcggggacagagtccccaagtgggtgcacgtgttaatcggaaaagtggtcctggagctggagcgcttcctgccccagcccttcaccggcgagatccgcggcatgtgtgacttcatgaacctcagcctggcggactgccttctggtcaacctggcctacgagtcctccgtgttctgcaccagtattgtggctcaagactccagaggccacatttaccatggtcggaatttggattatccttttgggaatgtcttacgcaagctgacagtggatgtgcaattcttaaagaatgggcagattgcattcacaggaactacttttattggctatgtaggattatggactggccagagcccacacaagtttacagtttctggtgatgaacgagataaaggctggtggtgggagaatgctatcgctgccctgtttcggagacacattcccgtcagctggctgatccgcgctaccctgagtgagtcggaaaacttcgaagcagctgttggcaagttggccaagactccccttattgctgatgtttattacattgttggtggcacgtccccccgggagggggtggtcatcacgaggaacagagatggcccagcagacatttggcctctagatcctttgaatggagcgtggttccgagttgagacaaattacgaccactggaagccagcacccaaggaagatgaccggagaacatctgccatcaaggcccttaatgctacaggacaagcaaacctcagcctggaggcacttttccagtgaaagcaggccaggtgcggtggctcacgcctgtaatcccagccctttgggaggccaaggcgggtggaacacttgaggtcaggagttcaagaccagcctggccaacatggtgaaacctcgtctctactaaaaatacaaaaatcaaccaggcatgacggtgcacgcctgttatcacagctacttgggaagcagcggctggagaattgcttgaacctgggaagtcgaggctgcaagtgagctgagatcatgccatggcagtctagcctgggcaacagagcgagactctgtttcaaaaaaaaaaagaaaagaaaactaattagtcagtattctgctactcaaacaaatgagctatttggataacaaagcatacccagtggtctgctagtaaaccagctctttgtgtgggaagggacaaatgaaaaaattcccaaatttgtagcatttgttgacttccatggtgtgaatactcccacatggctgatttcaggcttatagttggctcatacacttcctgcatatttaataattggccctcaccagactgtaggagctagctccaatgcactattgactgtacccttcatagcggggcacaatgttgcccttttaatagtcattttttaaatgggggttaataaactacttttgtgttcttatagtttttttaggtaattatagaagtgatgaatatatctggctgggcgcagtggctcacatctgtaatcctagtactttggaagccgaggcgggtggatcacttgaggtcaggagttcgagaccagcctggccaacatggtgaaacctcatctctactaaaaatacaaaaattagccaggcgtcatggtgcgtgcctgtaatcccagctacttgggaggtggaggcaggaaaatcactcgaatccgggagacagaggttgcagtgagctgagattgcactccagcctgggcgacagagggagactccgtcttaaaaaaaaaaaaaaaaaaaaaaaaaagaagtgatgaatatatcttttaaaaattagtattataataaaatagttacatttattttaataaaacaaagcattttctctgctttgaacagccctcataattttacatggtggcagtggccagttggctgtattataattgagttaagcattctccagttgttagattttcctctattaaaactctgaaataaacatattcgtttgcctctcccctgcttactttcagattatttcccttggctgaattcccagaagtaggattactgagttaacagttatgaatgtttaaatggtttctgaaatggtttggtcaaaataaaattgttagaaattataaacagtttaccaagtagtgtttttctctgttgtatacttgaaaattcaagagaaactgcttttaagtgacaatcaccatggagccagaattaacacagacttctgactctcaggccctttacatgtaatgattaacctcaactgaggctgttcagttgtattaggttaatagaaataagtgtagctgtatctgaaaaaaagaaaaagaaacaacaaaaaagtagtctgaacaaaggcagttagctctatgctgcccctttgtgccatgctgcaaaattacacccacctgcaatacatctccatcctctgctgtggctcatcagtagagaaaatactaaaacagtaatggagagcagaactatgactaaagtaaacgagcaattaaggtcctgttcagggaacctccattacccttggacgagctctgcacttgcttacagtgctgtctttaactgggtgtatgatttagctgtggacccagtgctactaattctgcctgtttctgaacaacccagctccgatattttgcacatgcacctcaactggattccaagacaaatgtgtgtacatgtgggcacatgtgctcaagttgtttaggtctcttgttatacggaatgtgtaatcaatgacactatacttttcatccttagatctgggcaaggtggaggggcggggcaggtgccttgatcctggagctttagaggccctcctctggaattcctctagttgtgataccacccccccaaagcatggtgtaaggaatctgctggaccaagggcatttgcccacctggagtctgcccaagtacccaggaccctgtaattctcagcctgaacagccccacctccacttccagggtttgtgttttcctcttccctgggtgatattctcctgatggtggtgcatggccactgagagagagcacaggggcaggtgcttgctggggaatgtgaaggcggtgatgtcacatgtgtgcaagtaaggcccttgtgggtaggacagagccagggtgagggccaaggcttggtctcccccactgccttggggtagagctctgaggagtcttgagattttatttatttattttttatgagacagagtctcactctgttgcccaggctggagtgcagtggcgcaatctcagctcagtgcaacctctgcctcccaagtttaagcaattctcctgcctcagcctccctagtagctgggatttcaggcaccaccacacccagctaattaagtctgagaattttaagttccaacttggccttccacagtgttgtcaaaataggaggaaagtgcactttgacctcttgattcatagatttaaaatatnctggcataaagggccttgtcccagatctcaagtgttagggaagcacttggtcattttcttccctttctggcatattagagaaaatgatgtgtacataaaatttcctcataattttcagcctcacaatttatactacggtaatgagcgccggtagcccagacaagtacatgactaggatcagaaacccgagtagaaagtaagtcagcagaagagcgagttcgcccgtgctgtgaaagatgattttttaaaaaatgaaattcttgaagagctgcaccttaaaaaataagacaaagtgaaagtattgtattatgttacaaacaatgcaggctccttcctcatttaactttacaaccttgcgaagtgggtccaggagatttggagtttgtggtaaagccagtaatgggcattgtcctgcattcccttcccttcatggtttgcctcgatcctctctaagcttctatcctggcctgaataactcaaagataattggtctcagagatcaagccatatcctcaggccttatttccatcttctcatgattctgccatcatacctttgcttctccgctaatgaaatgagctggcaagacctctgttcattgtgaagtgcttctgaaagagcctaagaaaaaaggctcatctgaaagaaatggagaactctatttcgaaccaagcctgtttgaatgtgtgttagtctgatctttgatcatgtgtttccatgtaatgggagtctcgttttttataatgtttctaacgttttattgaaaaacctatggccctccttctttctcaatagctactttcttactgctttttgaaaataatatgcaaccaaattatttcttaatgtcacataattaagtaataaaatgtcaaaagaaatgttggcaaggagaataaaaaaatttccaagaaacttaaagt

SEQ ID NO: 282617 - DNA, 5241 bp, Homo sapiens
  misc_feature (3789)..(3789): n is a, c, g, or t
ctcacgccctaaggatgtagccccgctcgcagtgcacacgcagtcgcacgccgccgacctctgagcgggtcagacgcccttgtgctttttgtttctagggacagagtccccaagtgggtgcacgtgttaatcggaaaagtggtcctggagctggagcgcttcctgccccagcccttcaccggcgagatccgcggcatgtgtgacttcatgaacctcagcctggcggactgccttctggtcaacctggcctacgagtcctccgtgttgagtgccccaagcccgcgcggagtaacgcggggcttgcgggggcccccgacacagactagcgggaggagacatattttccgtgtgataaaaacagggcggtgcctgcttgcctagaaacctccagcgcttcctctttgcctctctgggtaaatctgagctgcacatcgtaggcttcgagagggaaagcagattctccgattcaacactaaactttccctctacgtgtagccccgggttttctcttccccaatccaggttctgcaccagtattgtggctcaagactccagaggccacatttaccatggtcggaatttggattatccttttgggaatgtcttacgcaagctgacagtggatgtgcaattcttaaagaatgggcagattgcattcacaggaactacttttattggctatgtaggattatggactggccagagcccacacaagtttacagtttctggtgatgaacgagataaaggctggtggtgggagaatgctatcgctgccctgtttcggagacacattcccgtcagctggctgatccgcgctaccctgagtgagtcggaaaacttcgaagcagctgttggcaagttggccaagactccccttattgctgatgtttattacattgttggtggcacgtccccccgggagggggtggtcatcacgaggaacagagatggcccagcagacatttggcctctagatcctttgaatggagcgtggttccgagttgagacaaattacgaccactggaagccagcacccaaggaagatgaccggagaacatctgccatcaaggcccttaatgctacaggacaagcaaacctcagcctggaggcacttttccagtgaaagcaggccaggtgcggtggctcacgcctgtaatcccagccctttgggaggccaaggcgggtggaacacttgaggtcaggagttcaagaccagcctggccaacatggtgaaacctcgtctctactaaaaatacaaaaatcaaccaggcatgacggtgcacgcctgttatcacagctacttgggaagcagcggctggagaattgcttgaacctgggaagtcgaggctgcaagtgagctgagatcatgccatggcagtctagcctgggcaacagagcgagactctgtttcaaaaaaaaaaagaaaagaaaactaattagtcagtattctgctactcaaacaaatgagctatttggataacaaagcatacccagtggtctgctagtaaaccagctctttgtgtgggaagggacaaatgaaaaaattcccaaatttgtagcatttgttgacttccatggtgtgaatactcccacatggctgatttcaggcttatagttggctcatacacttcctgcatatttaataattggccctcaccagactgtaggagctagctccaatgcactattgactgtacccttcatagcggggcacaatgttgcccttttaatagtcattttttaaatgggggttaataaactacttttgtgttcttatagtttttttaggtaattatagaagtgatgaatatatctggctgggcgcagtggctcacatctgtaatcctagtactttggaagccgaggcgggtggatcacttgaggtcaggagttcgagaccagcctggccaacatggtgaaacctcatctctactaaaaatacaaaaattagccaggcgtcatggtgcgtgcctgtaatcccagctacttgggaggtggaggcaggaaaatcactcgaatccgggagacagaggttgcagtgagctgagattgcactccagcctgggcgacagagggagactccgtcttaaaaaaaaaaaaaaaaaaaaaaaaaagaagtgatgaatatatcttttaaaaattagtattataataaaatagttacatttattttaataaaacaaagcattttctctgctttgaacagccctcataattttacatggtggcagtggccagttggctgtattataattgagttaagcattctccagttgttagattttcctctattaaaactctgaaataaacatattcgtttgcctctcccctgcttactttcagattatttcccttggctgaattcccagaagtaggattactgagttaacagttatgaatgtttaaatggtttctgaaatggtttggtcaaaataaaattgttagaaattataaacagtttaccaagtagtgtttttctctgttgtatacttgaaaattcaagagaaactgcttttaagtgacaatcaccatggagccagaattaacacagacttctgactctcaggccctttacatgtaatgattaacctcaactgaggctgttcagttgtattaggttaatagaaataagtgtagctgtatctgaaaaaaagaaaaagaaacaacaaaaaagtagtctgaacaaaggcagttagctctatgctgcccctttgtgccatgctgcaaaattacacccacctgcaatacatctccatcctctgctgtggctcatcagtagagaaaatactaaaacagtaatggagagcagaactatgactaaagtaaacgagcaattaaggtcctgttcagggaacctccattacccttggacgagctctgcacttgcttacagtgctgtctttaactgggtgtatgatttagctgtggacccagtgctactaattctgcctgtttctgaacaacccagctccgatattttgcacatgcacctcaactggattccaagacaaatgtgtgtacatgtgggcacatgtgctcaagttgtttaggtctcttgttatacggaatgtgtaatcaatgacactatacttttcatccttagatctgggcaaggtggaggggcggggcaggtgccttgatcctggagctttagaggccctcctctggaattcctctagttgtgataccacccccccaaagcatggtgtaaggaatctgctggaccaagggcatttgcccacctggagtctgcccaagtacccaggaccctgtaattctcagcctgaacagccccacctccacttccagggtttgtgttttcctcttccctgggtgatattctcctgatggtggtgcatggccactgagagagagcacaggggcaggtgcttgctggggaatgtgaaggcggtgatgtcacatgtgtgcaagtaaggcccttgtgggtaggacagagccagggtgagggccaaggcttggtctcccccactgccttggggtagagctctgaggagtcttgagattttatttatttattttttatgagacagagtctcactctgttgcccaggctggagtgcagtggcgcaatctcagctcagtgcaacctctgcctcccaagtttaagcaattctcctgcctcagcctccctagtagctgggatttcaggcaccaccacacccagctaattaagtctgagaattttaagttccaacttggccttccacagtgttgtcaaaataggaggaaagtgcactttgacctcttgattcatagatttaaaatatnctggcataaagggccttgtcccagatctcaagtgttagggaagcacttggtcattttcttccctttctggcatattagagaaaatgatgtgtacataaaatttcctcataattttcagcctcacaatttatactacggtaatgagcgccggtagcccagacaagtacatgactaggatcagaaacccgagtagaaagtaagtcagcagaagagcgagttcgcccgtgctgtgaaaggtttgttgttactgttttgtggagagggggtgaggtgggtgtgtgctggtatttcttacagagggtggtaacatccttaaaatgtatacatatataatattttctgacaagcatctggcattgtcatttgtgtcagattgtcatcattagatattttatttggaattgtttgtatgaaaaccaatcttcggcggggcgtgatggctcatgactgtaatttcagcactttgagaggcagaggcaggcagatcacttgaggtcaggagttcaagaccagcctggccaacatggtgaaaccccatctctactaaaactacaaaaaaactgttagccaggtgtggtggtgggtacccaaaatcccgactactcaggagctgaggtaggagaatcacttgaactcgggaggtggagtttgtagtgagctgagatcacaccactgcactccagcctgggaaacagagtgagactccattaaaaaaaaaaaaaaaatcagtctttgaattaaatgcgtttttttcttcccttacagatgattttttaaaaaatgaaattcttgaagagctgcaccttaaaaaataagacaaagtgaaagtattgtattatgttacaaacaatgcaggctccttcctcatttaactttacaaccttgcgaagtgggtccaggagatttggagtttgtggtaaagccagtaatgggcattgtcctgcattcccttcccttcatggtttgcctcgatcctctctaagcttctatcctggcctgaataactcaaagataattggtctcagagatcaagccatatcctcaggccttatttccatcttctcatgattctgccatcatacctttgcttctccgctaatgaaatgagctggcaagacctctgttcattgtgaagtgcttctgaaagagcctaagaaaaaaggctcatctgaaagaaatggagaactctatttcgaaccaagcctgtttgaatgtgtgttagtctgatctttgatcatgtgtttccatgtaatgggagtctcgttttttataatgtttctaacgttttattgaaaaacctatggccctccttctttctcaatagctactttcttactgctttttgaaaataatatgcaaccaaattatttcttaatgtcacataattaagtaataaaatgtcaaaagaaatgttggcaaggagaataaaaaaatttccaagaaacttaaagt

SEQ ID NO: 282618 - DNA, 1863 bp, Homo sapiens
ttacccgggctacgagcagcggctgcaggtctccaagttgcggccgctggagcccgagccatgcggaccgcggaccgggaggcgcgcccggggcttccgtccctgctgctgctgctgctggccggggccgggctgtcagccgcctcgcccccagcagcgccgcgcttcaacgtgagcctggactcggtccccgagctgcgctggctgcccgtgctgcggcactacgacttggacttggtgcgcgccgcgatggcgcaagtcatcggggacagagtccccaagtgggtgcacgtgttaatcggaaaagtggtcctggagctggagcgcttcctgccccagcccttcaccggcgagatccgcggcatgtgtgacttcatgaacctcagcctggcggactgccttctggtcaacctggcctacgagtcctccgtgttctgcaccagtattgtggctcaagactccagaggccacatttaccatggtcggaatttggattatccttttgggaatgtcttacgcaagctgacagtggatgtgcaattcttaaagaatgggcagattgcattcacaggaactacttttattggctatgtaggattatggactggccagagcccacacaagtttacagtttctggtgatgaacgagataaaggctggtggtgggagaatgctatcgctgccctgtttcggagacacattcccgtcagctggctgatccgcgctaccctgagtgagtcggaaaacttcgaagcagctgttggcaagttggccaagactccccttattgctgatgtttattacattgttggtggcacgtccccccgggagggggtggtcatcacgaggaacagagatggcccagcagacatttggcctctagatcctttgaatggagcgtggttccgagttgagacaaattacgaccactggaagccagcacccaaggaagatgaccggagaacatctgccatcaaggcccttaatgctacaggacaagcaaacctcagcctggaggcacttttccagattttgtcggtggttccagtttataacaacctcacaatttatactacggtaatgagcgccggtagcccagacaagtacatgactaggatcagaaacccgagtagaaagtaagtcagcagaagagcgagttcgcccgtgctgtgaaagatgattttttaaaaaatgaaattcttgaagagctgcaccttaaaaaataagacaaagtgaaagtattgtattatgttacaaacaatgcaggctccttcctcatttaactttacaaccttgcgaagtgggtccaggagatttggagtttgtggtaaagccagtaatgggcattgtcctgcattcccttcccttcatggtttgcctcgatcctctctaagcttctatcctggcctgaataactcaaagataattggtctcagagatcaagccatatcctcaggccttatttccatcttctcatgattctgccatcatacctttgcttctccgctaatgaaatgagctggcaagacctctgttcattgtgaagtgcttctgaaagagcctaagaaaaaaggctcatctgaaagaaatggagaactctatttcgaaccaagcctgtttgaatgtgtgttagtctgatctttgatcatgtgtttccatgtaatgggagtctcgttttttataatgtttctaacgttttattgaaaaacctatggccctccttctttctcaatagctactttcttactgctttttgaaaataatatgcaaccaaattatttcttaatgtcacataattaagtaataaaatgtcaaaagaaatgttggcaaggagaataaaaaaatttccaagaaacttaaagt

SEQ ID NO: 282619 - DNA, 5143 bp, Homo sapiens
  misc_feature (389)..(389): n is a, c, g, or t
  misc_feature (399)..(400): n is a, c, g, or t
  misc_feature (410)..(410): n is a, c, g, or t
  misc_feature (413)..(413): n is a, c, g, or t
  misc_feature (422)..(422): n is a, c, g, or t
  misc_feature (425)..(425): n is a, c, g, or t
  misc_feature (431)..(431): n is a, c, g, or t
  misc_feature (442)..(442): n is a, c, g, or t
  misc_feature (444)..(444): n is a, c, g, or t
  misc_feature (454)..(454): n is a, c, g, or t
  misc_feature (463)..(463): n is a, c, g, or t
  misc_feature (466)..(466): n is a, c, g, or t
  misc_feature (487)..(489): n is a, c, g, or t
  misc_feature (492)..(492): n is a, c, g, or t
  misc_feature (497)..(497): n is a, c, g, or t
  misc_feature (520)..(521): n is a, c, g, or t
  misc_feature (523)..(524): n is a, c, g, or t
  misc_feature (530)..(532): n is a, c, g, or t
  misc_feature (541)..(541): n is a, c, g, or t
  misc_feature (4202)..(4202): n is a, c, g, or t
aaatcagtattctgctactcaaacaaatgagctatttggataacaaagcatacccagtggtctgctagtaaaccagctctttgtgtgggaagggacaaatgaaaaaattcccaaattcgtagcatttgttgacttccatggtgtgaatactcccacatggctgatttcaggcttatagttggctcatacacttcctgcatatttaataattggccctcaccagactgtaggagctagctccaatgcactattgactgtacccttcatagcggggcacaatgttgcccttttaatagtcattttttaaatgggggttaataaactacttttgtgttcttatagtttttttaggtaattatagaagtgatgaatatatctggctgggcgcngtggctcacnnctgtaatccnagnactttggangcngaggcnggtggatcacntnaggtcagganttcgagacnagnctggccaacatggtgaaaccnnntcnctacnaaaaatacaaaaattagccaggnntnntggtgnnngcctgtaanttgcggccgctggagcccgagccatgcggaccgcggaccgggaggcgcgcccggggcttccgtccctgctgctgctgctgctggccggggccgggctgtcagccgcctcgcccccagcagcgccgcgcttcaacgtgagcctggactcggtccccgagctgcgctggctgcccgtgctgcggcactacgacttggacttggtgcgcgccgcgatggcgcaagtcatcggggacagagtccccaagtgggtgcacgtgttaatcggaaaagtggtcctggagctggagcgcttcctgccccagcccttcaccggcgagatccgcggcatgtgtgacttcatgaacctcagcctggcggactgccttctggtcaacctggcctacgagtcctccgtgttctgcaccagtattgtggctcaagactccagaggccacatttaccatggtcggaatttggattatccttttgggaatgtcttacgcaagctgacagtggatgtgcaattcttaaagaatgggcagattgcattcacaggaactacttttattggctatgtaggattatggactggccagagcccacacaagtttacagtttctggtgatgaacgagataaaggctggtggtgggagaatgctatcgctgccctgtttcggagacacattcccgtcagctggctgatccgcgctaccctgagtgagtcggaaaacttcgaagcagctgttggcaagttggccaagactccccttattgctgatgtttattacattgttggtggcacgtccccccgggagggggtggtcatcacgaggaacagagatggcccagcagacatttggcctctagatcctttgaatggagcgtggttccgagttgagacaaattacgaccactggaagccagcacccaaggaagatgaccggagaacatctgccatcaaggcccttaatgctacaggacaagcaaacctcagcctggaggcacttttccagtgaaagcaggccaggtgcggtggctcacgcctgtaatcccagccctttgggaggccaaggcgggtggaacacttgaggtcaggagttcaagaccagcctggccaacatggtgaaacctcgtctctactaaaaatacaaaaatcaaccaggcatgacggtgcacgcctgttatcacagctacttgggaagcagcggctggagaattgcttgaacctgggaagtcgaggctgcaagtgagctgagatcatgccatggcagtctagcctgggcaacagagcgagactctgtttcaaaaaaaaaaagaaaagaaaactaattagtcagtattctgctactcaaacaaatgagctatttggataacaaagcatacccagtggtctgctagtaaaccagctctttgtgtgggaagggacaaatgaaaaaattcccaaatttgtagcatttgttgacttccatggtgtgaatactcccacatggctgatttcaggcttatagttggctcatacacttcctgcatatttaataattggccctcaccagactgtaggagctagctccaatgcactattgactgtacccttcatagcggggcacaatgttgcccttttaatagtcattttttaaatgggggttaataaactacttttgtgttcttatagtttttttaggtaattatagaagtgatgaatatatctggctgggcgcagtggctcacatctgtaatcctagtactttggaagccgaggcgggtggatcacttgaggtcaggagttcgagaccagcctggccaacatggtgaaacctcatctctactaaaaatacaaaaattagccaggcgtcatggtgcgtgcctgtaatcccagctacttgggaggtggaggcaggaaaatcactcgaatccgggagacagaggttgcagtgagctgagattgcactccagcctgggcgacagagggagactccgtcttaaaaaaaaaaaaaaaaaaaaaaaaaagaagtgatgaatatatcttttaaaaattagtattataataaaatagttacatttattttaataaaacaaagcattttctctgctttgaacagccctcataattttacatggtggcagtggccagttggctgtattataattgagttaagcattctccagttgttagattttcctctattaaaactctgaaataaacatattcgtttgcctctcccctgcttactttcagattatttcccttggctgaattcccagaagtaggattactgagttaacagttatgaatgtttaaatggtttctgaaatggtttggtcaaaataaaattgttagaaattataaacagtttaccaagtagtgtttttctctgttgtatacttgaaaattcaagagaaactgcttttaagtgacaatcaccatggagccagaattaacacagacttctgactctcaggccctttacatgtaatgattaacctcaactgaggctgttcagttgtattaggttaatagaaataagtgtagctgtatctgaaaaaaagaaaaagaaacaacaaaaaagtagtctgaacaaaggcagttagctctatgctgcccctttgtgccatgctgcaaaattacacccacctgcaatacatctccatcctctgctgtggctcatcagtagagaaaatactaaaacagtaatggagagcagaactatgactaaagtaaacgagcaattaaggtcctgttcagggaacctccattacccttggacgagctctgcacttgcttacagtgctgtctttaactgggtgtatgatttagctgtggacccagtgctactaattctgcctgtttctgaacaacccagctccgatattttgcacatgcacctcaactggattccaagacaaatgtgtgtacatgtgggcacatgtgctcaagttgtttaggtctcttgttatacggaatgtgtaatcaatgacactatacttttcatccttagatctgggcaaggtggaggggcggggcaggtgccttgatcctggagctttagaggccctcctctggaattcctctagttgtgataccacccccccaaagcatggtgtaaggaatctgctggaccaagggcatttgcccacctggagtctgcccaagtacccaggaccctgtaattctcagcctgaacagccccacctccacttccagggtttgtgttttcctcttccctgggtgatattctcctgatggtggtgcatggccactgagagagagcacaggggcaggtgcttgctggggaatgtgaaggcggtgatgtcacatgtgtgcaagtaaggcccttgtgggtaggacagagccagggtgagggccaaggcttggtctcccccactgccttggggtagagctctgaggagtcttgagattttatttatttattttttatgagacagagtctcactctgttgcccaggctggagtgcagtggcgcaatctcagctcagtgcaacctctgcctcccaagtttaagcaattctcctgcctcagcctccctagtagctgggatttcaggcaccaccacacccagctaattaagtctgagaattttaagttccaacttggccttccacagtgttgtcaaaataggaggaaagtgcactttgacctcttgattcatagatttaaaatatnctggcataaagggccttgtcccagatctcaagtgttagggaagcacttggtcattttcttccctttctggcatattagagaaaatgatgtgtacataaaatttcctcataattttcagcctcacaatttatactacggtaatgagcgccggtagcccagacaagtacatgactaggatcagaaacccgagtagaaagtaagtcagcagaagagcgagttcgcccgtgctgtgaaagtgagcaagaagaacccatcaggtgattgtcaggcctctgagcccaagctaagccatcatatgccctgtgacctgcacgtatacatccagatggcctgaagcaactgaagatccacaaaagaagagaaaatagccagttcctgccttaactgatgacatttcaccattgtgatttgttcctgccccaccctaactgatcaattgactttgtgacaagacaccctccccacccttgcaataatgtactttgtgatattcccccgcccttgtgaatgtactttgtacgatacaccctccccacccttgagaaggtactttgtaatatcctctccgcccttgagaatgtactttgtaagatccacttcctgcctgcaaaaaattgctccgaactccaccgtctatcccaaacctataagaactaatgataatcctaccaccctttgctgactccttttttggactcagcccacgtgcacccaggtgattaaaaagctttattgctcacatgaagcctatttggtggtctcttcacacagatgtgtgtgacagtgataacagtgtcacgtggtttaactacaatgtgtccagatattgaattttgtttaagcctgcttgggatttgttgtgctccccaaatttcaagtttgtgtcttttgttcaattttggaaaatagtcagctatctcagaattgctcacctaaaaaaa

SEQ ID NO: 282620 - DNA, 3060 bp, Homo sapiens
  misc_feature (389)..(389): n is a, c, g, or t
  misc_feature (399)..(400): n is a, c, g, or t
  misc_feature (410)..(410): n is a, c, g, or t
  misc_feature (413)..(413): n is a, c, g, or t
  misc_feature (422)..(422): n is a, c, g, or t
  misc_feature (425)..(425): n is a, c, g, or t
  misc_feature (431)..(431): n is a, c, g, or t
  misc_feature (442)..(442): n is a, c, g, or t
  misc_feature (444)..(444): n is a, c, g, or t
  misc_feature (454)..(454): n is a, c, g, or t
  misc_feature (463)..(463): n is a, c, g, or t
  misc_feature (466)..(466): n is a, c, g, or t
  misc_feature (487)..(489): n is a, c, g, or t
  misc_feature (492)..(492): n is a, c, g, or t
  misc_feature (497)..(497): n is a, c, g, or t
  misc_feature (520)..(521): n is a, c, g, or t
  misc_feature (523)..(524): n is a, c, g, or t
  misc_feature (530)..(532): n is a, c, g, or t
  misc_feature (541)..(541): n is a, c, g, or t
aaatcagtattctgctactcaaacaaatgagctatttggataacaaagcatacccagtggtctgctagtaaaccagctctttgtgtgggaagggacaaatgaaaaaattcccaaattcgtagcatttgttgacttccatggtgtgaatactcccacatggctgatttcaggcttatagttggctcatacacttcctgcatatttaataattggccctcaccagactgtaggagctagctccaatgcactattgactgtacccttcatagcggggcacaatgttgcccttttaatagtcattttttaaatgggggttaataaactacttttgtgttcttatagtttttttaggtaattatagaagtgatgaatatatctggctgggcgcngtggctcacnnctgtaatccnagnactttggangcngaggcnggtggatcacntnaggtcagganttcgagacnagnctggccaacatggtgaaaccnnntcnctacnaaaaatacaaaaattagccaggnntnntggtgnnngcctgtaanttgcggccgctggagcccgagccatgcggaccgcggaccgggaggcgcgcccggggcttccgtccctgctgctgctgctgctggccggggccgggctgtcagccgcctcgcccccagcagcgccgcgcttcaacgtgagcctggactcggtccccgagctgcgctggctgcccgtgctgcggcactacgacttggacttggtgcgcgccgcgatggcgcaagtcatcggggacagagtccccaagtgggtgcacgtgttaatcggaaaagtggtcctggagctggagcgcttcctgccccagcccttcaccggcgagatccgcggcatgtgtgacttcatgaacctcagcctggcggactgccttctggtcaacctggcctacgagtcctccgtgttctgcaccagtattgtggctcaagactccagaggccacatttaccatggtcggaatttggattatccttttgggaatgtcttacgcaagctgacagtggatgtgcaattcttaaagaatgggcagattgcattcacaggaactacttttattggctatgtaggattatggactggccagagcccacacaagtttacagtttctggtgatgaacgagataaaggctggtggtgggagaatgctatcgctgccctgtttcggagacacattcccgtcagctggctgatccgcgctaccctgagtgagtcggaaaacttcgaagcagctgttggcaagttggccaagactccccttattgctgatgtttattacattgttggtggcacgtccccccgggagggggtggtcatcacgaggaacagagatggcccagcagacatttggcctctagatcctttgaatggagcgtggttccgagttgagacaaattacgaccactggaagccagcacccaaggaagatgaccggagaacatctgccatcaaggcccttaatgctacaggacaagcaaacctcagcctggaggcacttttccagtgaaagcaggccaggtgcggtggctcacgcctgtaatcccagccctttgggaggccaaggcgggtggaacacttgaggtcaggagttcaagaccagcctggccaacatggtgaaacctcgtctctactaaaaatacaaaaatcaaccaggcatgacggtgcacgcctgttatcacagctacttgggaagcagcggctggagaattgcttgaacctgggaagtcgaggctgcaagtgagctgagatcatgccatggcagtctagcctgggcaacagagcgagactctgtttcaaaaaaaaaaagaaaagaaaactaattagtcagtattctgctactcaaacaaatgagctatttggataacaaagcatacccagtggtctgctagtaaaccagctctttgtgtgggaagggacaaatgaaaaaattcccaaatttgtagcatttgttgacttccatggtgtgaatactcccacatggctgatttcaggcttatagttggctcatacacttcctgcatatttaataattggccctcaccagactgtaggagctagctccaatgcactattgactgtacccttcatagcggggcacaatgttgcccttttaatagtcattttttaaatgggggttaataaactacttttgtgttcttatagtttttttaggtaattatagaagtgatgaatatatctggctgggcgcagtggctcacatctgtaatcctagtactttggaagccgaggcgggtggatcacttgaggtcaggagttcgagaccagcctggccaacatggtgaaacctcatctctactaaaaatacaaaaattagccaggcgtcatggtgcgtgcctgtaatcccagctacttgggaggtggaggcaggaaaatcactcgaatccgggagacagaggttgcagtgagctgagattgcactccagcctgggcgacagagggagactccgtcttaaaaaaaaaaaaaaaaaaaaaaaaaagaagtgatgaatatatcttttaaaaattagtattataataaaatagttacatttattttaataaaacaaagcattttctctgctttgaacagccctcataattttacatggtggcagtggccagttggctgtattataattgagttaagcattctccagttgttagattttcctctattaaaactctgaaataaacatattcgtttgcctctcccctgcttactttcagattatttcccttggctgaattcccagaagtaggattactgagttaacagttatgaatgtttaaatggtttctgaaatggtttggtcaaaataaaattgttagaaattataaacagtttaccaagtagtgtttttctctgttgtatacttgaaaattcaagagaaactgcttttaagtgacaatcaccatggagccagaattaacacagacttctgactctcaggccctttacatgtaatgattaacctcaactgaggctgttcagttgtattaggttaatagaaataagtgtagctgtatctga

SEQ ID NO: 282621 - DNA, 1734 bp, Homo sapiens
ttacccgggctacgagcagcggctgcaggtctccaagttgcggccgctggagcccgagccatgcggaccgcggaccgggaggcgcgcccggggcttccgtccctgctgctgctgctgctggccggggccgggctgtcagccgcctcgcccccagcagcgccgcgcttcaacgtgagcctggactcggtccccgagctgcgctggctgcccgtgctgcggcactacgacttggacttggtgcgcgccgcgatggcgcaagtcatcggggacagagtccccaagtgggtgcacgtgttaatcggaaaagtggtcctggagctggagcgcttcctgccccagcccttcaccggcgagatccgcggcatgtgtgacttcatgaacctcagcctggcggactgccttctggtcaacctggcctacgagtcctccgtgttctgcaccagtattgtggctcaagactccagaggccacatttaccatggtcggaatttggattatccttttgggaatgtcttacgcaagctgacagtggatgtgcaattcttaaagaatgggcagattgcattcacaggaactacttttattggctatgtaggattatggactggccagagcccacacaagtttacagtttctggtgatgaacgagataaaggctggtggtgggagaatgctatcgctgccctgtttcggagacacattcccgtcagctggctgatccgcgctaccctgagtgagtcggaaaacttcgaagcagctgttggcaagttggccaagactccccttattgctgatgtttattacattgttggtggcacgtccccccgggagggggtggtcatcacgaggaacagagatggcccagcagacatttggcctctagatcctttgaatggagcgtggttccgagttgagacaaattacgaccactggaagccagcacccaaggaagatgaccggagaacatctgccatcaaggcccttaatgctacaggacaagcaaacctcagcctggaggcacttttccagtgagcaagaagaacccatcaggtgattgtcaggcctctgagcccaagctaagccatcatatgccctgtgacctgcacgtatacatccagatggcctgaagcaactgaagatccacaaaagaagagaaaatagccagttcctgccttaactgatgacatttcaccattgtgatttgttcctgccccaccctaactgatcaattgactttgtgacaagacaccctccccacccttgcaataatgtactttgtgatattcccccgcccttgtgaatgtactttgtacgatacaccctccccacccttgagaaggtactttgtaatatcctctccgcccttgagaatgtactttgtaagatccacttcctgcctgcaaaaaattgctccgaactccaccgtctatcccaaacctataagaactaatgataatcctaccaccctttgctgactccttttttggactcagcccacgtgcacccaggtgattaaaaagctttattgctcacatgaagcctatttggtggtctcttcacacagatgtgtgtgacagtgataacagtgtcacgtggtttaactacaatgtgtccagatattgaattttgtttaagcctgcttgggatttgttgtgctccccaaatttcaagtttgtgtcttttgttcaattttggaaaatagtcagctatctcagaattgctcacctaaaaaaa

SEQ ID NO: 282622 - DNA, 981 bp, Homo sapiens
agctgattcctagagtatcacatggaccatcatcgctgaatggagcgtggttccgagttgagacaaattacgaccactggaagccagcacccaaggaagatgaccggagaacatctgccatcaaggcccttaatgctacaggacaagcaaacctcagcctggaggcacttttccagcctcacaatttatactacggtaatgagcgccggtagcccagacaagtacatgactaggatcagaaacccgagtagaaagtaagtcagcagaagagcgagttcgcccgtgctgtgaaagatgattttttaaaaaatgaaattcttgaagagctgcaccttaaaaaataagacaaagtgaaagtattgtattatgttacaaacaatgcaggctccttcctcatttaactttacaaccttgcgaagtgggtccaggagatttggagtttgtggtaaagccagtaatgggcattgtcctgcattcccttcccttcatggtttgcctcgatcctctctaagcttctatcctggcctgaataactcaaagataattggtctcagagatcaagccatatcctcaggccttatttccatcttctcatgattctgccatcatacctttgcttctccgctaatgaaatgagctggcaagacctctgttcattgtgaagtgcttctgaaagagcctaagaaaaaaggctcatctgaaagaaatggagaactctatttcgaaccaagcctgtttgaatgtgtgttagtctgatctttgatcatgtgtttccatgtaatgggagtctcgttttttataatgtttctaacgttttattgaaaaacctatggccctccttctttctcaatagctactttcttactgctttttgaaaataatatgcaaccaaattatttcttaatgtcacataattaagtaataaaatgtcaaaagaaatgttggcaaggagaataaaaaaatttccaagaaacttaaagt

SEQ ID NO: 282623 - DNA, 1234 bp, Homo sapiens
  misc_feature (942)..(942): n is a, c, g, or t
  misc_feature (973)..(973): n is a, c, g, or t
ttacccgggctacgagcagcggctgcaggtctccaagttgcggccgctggagcccgagccatgcggaccgcggaccgggaggcgcgcccggggcttccgtccctgctgctgctgctgctggccggggccgggctgtcagccgcctcgcccccagcagcgccgcgcttcaacgtgagcctggactcggtccccgagctgcgctggctgcccgtgctgcggcactacgacttggacttggtgcgcgccgcgatggcgcaagtcatcggggacagagtccccaagtgggtgcacgtgttaatcggaaaagtggtcctggagctggagcgcttcctgccccagcccttcaccggcgagatccgcggcatgtgtgacttcatgaacctcagcctggcggactgccttctggtcaacctggcctacgagtcctccgtgttctgcaccagtattgtggctcaagactccagaggccacatttaccatggtcggaatttggattatccttttgggaatgtcttacgcaagctgacagtggatgtgcaattcttaaagaatgggcagattgcattcacaggaactacttttattggctatgtaggattatggactggccagagcccacacaagtttacagtttctggtgatgaacgagataaaggctggtggtgggagaatgctatcgctgccctgtttcggagacacattcccgtcagctggctgatccgcgctaccctgagtgagtcggaaaacttcgaagcagctgttggcaagttggccaagactccccttattgctgatgtttattacattgttggtggcacgtccccccgggagggggtggtcatcacgaggaacagagatggcccagcagacatttggcctctagatcctttgaatggagcacctctggtcttgcaaggttgttcttggaaacgctttttacanatgtgaaaagggagacaggtggagtcagtgnttccaaacttgaccatagatcagaatcacctgtagggcttcacaaaatacagattgctgagttctgcctccagagtttctgatttagtaggtctggagtagggcctgagaatttgagtatctgagttcccagataatgatgatgctctggatctgggaccacactgtgggattcattggtttaagaacctaaactgaagtctcatagcgggtaacccgaagaccttggcttaaacaggcatttatctacattacctttgca

SEQ ID NO: 282624 - DNA, 732 bp, Homo sapiens
acaagatgatgtgctctgttgtaggtggttccgagttgagacaaattacgaccactggaagccagcacccaaggaagatgaccggaggtaggctgctacgtgctttctggtttgcagtgttttcttatggtcaggagaatatgcccattctgtcacaggaactggcaagacctatgggtgctatcctctcccagaaaatgtacctgagccccttcgccagtgccttggctgggaagggagtgttgtgtggaggagagcagtgggcagagcctctcagcagctgggcgggtgttgggaggctgtcagggtcaggagccctagagcccaccaccagctctgctagtgactcactgggtggctctcgggcctctgtttaccagtctgtaaaatgaaagcaaagggccaggttcatggtcttctaggcaagatatttttagaaggaaattatttcccttatttaaacaataaataaaccagtcaagggtttttattgtcccttcaagttgtaaacattctataattataagtcagcacagttccaaagtgcaggtagctatatacgttgccttggctttactaccccacaagtttggccactgttcagttctgcagccacacattttcatcatcccagctttctggagcagatggtgccaaccgtcccagctgctggatgaattccactgtggtgggctgggcctcagcaggaaacaggcttggggccagaatctg

SEQ ID NO: 282625 - DNA, 194 bp, Homo sapiens
tacatggggggctgggatctaccccaggggctgagtaaagaaaccaggccactgtgtaatgcttctgcatctgatcaccttagaccccgacccaaaaccccaaaccactctccatcctccccagactcgcagactgctgacttctctaagccatctttctgattttctcctctgctcaaccccatgtgccgctc

SEQ ID NO: 282626 - DNA, 210 bp, Homo sapiens
aaaagaaagagctttaatgtttggaatagattctgcatcaaaagaagcaacttatcatcttgccaaacctcagcctcgtcattgttttggagcaagaaagagaattgaacctcactcatgttttgttgcctgtaccattgaacaaggccctgactgttaagactaatgttgagacccttgttttctttgcagactgcatcatctgctatt

SEQ ID NO: 282627 - DNA, 353 bp, Homo sapiens
caaaaaattggagtcaccccacgggcatgttcccaggcactgggacaactcttttccaaagaaagacccaaaaatcgtacaaataagtccaaatgaagcatgatgggaaatcagggactaattctgcttggaggacagggaaggctttcaaagctcttacaatgaaacatggcaataaacaaaatctcatttactgttggaaagatctgggagcaatgttagaagaaaagttaacaaaaaggtaaaaggattttaggagccaatataactactaataatgaaaatacctgtgagaaaattattcccaactagatgactacctattacaaataaatatttttctctaacctatt

SEQ ID NO: 282628 - DNA, 326 bp, Homo sapiens
gtgaggctggaacatgagaaatccactgtgaattgtgagatgtgagacaagcgcttgtgtggggctagattgtgactggctttatatgccattataaatattagttggtggttgaggggaccttggaagctctggctctttcagagttaacttgtaccataaccacagaatttgtattagttctatacaattcatgctgaattgagagactccacatttccattaaagtatgcctaatagtagacagtaataaatgcttgtctttaactgataaaggtcacaccgatttctctaattttttggaaatctccattttatcataaata

SEQ ID NO: 282629 - DNA, 931 bp, Homo sapiens
caggagccagagatagagggacggagaccaagactcggagtagttcatgaagagagagaagaggggaacaaggcgaggcttaaaaggaaaagggaaaacaggaagcgaccattcccagagacggacagacagacaaacccaaggagggtgaagtcaactgtcttcccggcctgttgggagccctcccctcactttgaactgggccaaaggagtccagcccacaaggcgtctgaggaagggatgtctctgcccaactggagaatctcctcaagggctcagctgcgaaacacctgtcactcaaccaggagatttactccaaatttcaagtccagctttttagaaagtagaagactgtctactccccaggtatggagcccaggccctgaggcaggacgatgagaaaaccaaggcactgaaagctggaaaggggcagaccagacgcaaacactgctttcttgactccactcactacaagctgcttccttaagcctaaacttggctcttgcctcacaggactatcttgcaggaacctagcaacccaccttgccccatcctgaggcagaggaggcagagatcacagacagcattctctccattacctacagacggagaattaaagcgcagagaagctgcgagggacaattgtggtgatcatgacaagacagccctcgggatctgaatccacatccaccttgatgggttgagaggactagaaaccagagaacacccccatctctaatgccgcaagaggcccctgatgcaggatcttgcaggaataagaaggctccatggaacgggacgaggcaggagcagagaggagccatgatacgttaactctcccagtcaccccactgatcaaaaccttaagacttgaggattctggttccttgtgctgggggtctccatctatccccactcaagcacaagaacc

SEQ ID NO: 282630 - DNA, 902 bp, Homo sapiens
caggagccagagatagagggacggagaccaagactcggagtagttcatgaagagagagaagaggggaacaaggcgaggcttaaaaggaaaagggaaaacaggaagcgaccattcccagagacggacagacagacaaacccaaggagggtgaagtcaactgtcttcccggcctgttgggagccctcccctcactttgaactgggccaaaggagtccagcccacaaggcgtctgaggaagggatgtctctgcccaactggagaatctcctcaagggctcagctgcgaaacacctgtcactcaaccaggagatttactccaaatttcaagtccagctttttagaaagtagaagactgtctactccccagatgagaaaaccaaggcactgaaagctggaaaggggcagaccagacgcaaacactgctttcttgactccactcactacaagctgcttccttaagcctaaacttggctcttgcctcacaggactatcttgcaggaacctagcaacccaccttgccccatcctgaggcagaggaggcagagatcacagacagcattctctccattacctacagacggagaattaaagcgcagagaagctgcgagggacaattgtggtgatcatgacaagacagccctcgggatctgaatccacatccaccttgatgggttgagaggactagaaaccagagaacacccccatctctaatgccgcaagaggcccctgatgcaggatcttgcaggaataagaaggctccatggaacgggacgaggcaggagcagagaggagccatgatacgttaactctcccagtcaccccactgatcaaaaccttaagacttgaggattctggttccttgtgctgggggtctccatctatccccactcaagcacaagaacc

SEQ ID NO: 282631 - DNA, 1763 bp, Homo sapiens
cccagaaaaaacgacaacgcgagaaaaattagtatttttgcacttcacaaattaatgaccatgagctcgtttttgataaactccaactacatcgagcccaagttccctcccttcgaggagtacgcgcagcacagcggctcgggcggcgcagacggcggcccgggcgggggccccggctaccagcagcccccagcgcccccgacccagcacctgccgctgcagcagccccagctccctcacgcgggcggcggccgagagccccctgcctcctactacgcgccgcggaccgcccgcgagcccgcctaccctgctgccgcgctgtaccccgcgcatggggccgcggacaccgcctacccctatggctaccgcggcggcgccagccccgggcggccgccccagcccgagcagcccccggcgcaagccaagggcccagcgcacggcctgcatgcgagccacgtcctgcagccccagccgccgccgcccctgcagcctcgcgccgtgcccccagcggccccgcggcgctgcgaggcggcccccgccaccccaggcgtcccggcagggggcagcgcccccgcgtgcccgctgctcttggccgacaagagcccgctgggcctgaagggcaaggagcccgtggtgtacccctggatgaagaagatccatgtcagcgccgttaaccccagttataacggaggggagcctaagcgctctcgaaccgcctacacccggcagcaggtcttggagctggagaaggagttccacttcaatcgctacctgacccggcggcgccgcatcgagatcgcccacacgctctgtttgtctgagcgccaggtcaagatctggtttcagaaccggaggatgaagtggaagaaagaccacaaactgcccaacaccaagatgcgatcctccaattcggcctcggcctctgccggcccaccagggaaagcacaaactcagagcccacacctccatccccacccccacccgagcacctccacacccgttccctcctccatataatcttctagagatcttaaccagtttctatcccttacctgcttttctcttctcttctcctgctccgttcctcatccacccctccccatctggaccataatagacaccaaaacaaacccaaattggtaaaaagaataatcaaaaagaagacattatccggttaagagtctgtgctggttgccacccaagagagaacagttgtccaggatgctggctggtggaacaacctgctggcccgaaacaaggctgccaggtgtggatacctgagaaggactacttggtatcaaatacttttgagatggctacagtcagctagctggacagcccatgctgactggggacatacacttgcatctttgttgaaagcagaagaagacagaccctttccccaccttccttacctcctcttcccccattaaggcagctcatccaagcttgtatttaactgaataaatgagtagacattgtggacctcacaagattatttaattcttaagatgtgtagaccttgatggtaggtgtgacatgttagtttttcttacttgcatttatttaagacactgttacagagatactgttgtcaccttctggggcacggtctttggggagaggggagtgcatttagacttatgtggaactgtacaaattgtgatgtggctacatagaaagccatgtgctaagaataaactccatttaaaaaacattaaaaatctaagattcatgtgttttctaagcttttcattaagaaa

SEQ ID NO: 282632 - DNA, 1172 bp, Homo sapiens
caaggcgttctgggggcgcacgctggttcagggaacactctggctttgggattctgcaatcggagagactacctgtagtcctgaggcctgtaggcctggctgctctgaggaggattggctatggcaaagaaggacggctttggctccaggagagggctgtgaagggcagaggccgcacctgtgtgctttgggctctggtctgggctagcgagctggctggaccgaggtggccttcaaggtcccacacctacatactcccagaccaccctccaggctggcagaggtggagctgttcaatgggcagcccagggcaagggcagacagtggggcccagctcgccgtcctgccccccttggagagaaactgaaagcttgtttctaccaacagtccaactcggtcctggcctgcaaccgggcgtcctacgagtacggggcctcgtgtttctattctgataaggacctcagtggcgcctcgccctcgggcagtggcaagcagaggggccccggggactacctgcacttttctcccgagcagcagtacaaacccgacagcagcagcgggcagggcaaagcactccatgacgaaggcgccgaccggaagtacacgagcccggtttacccttggatgcagcggatgaactcctgcgcgggtgctgtgtatgggagccatgggcgccgaggccgccagacctacacgcgctaccagacactggagctggagaaggagttccacttcaaccgctacctgacacggcgccgccgcatcgagatcgccaacgcgctctgcctcaccgagcgccagatcaagatctggttccagaaccgccgcatgaagtggaaaaaggaaaacaagctcatcaattccacgcagcccagcggggaggactcagaggcaaaggcgggcgagtagatgcctgggcagggaccaggccagcgctgcaacctccttcggctttgcccccttgccctcgcctgttccccaacttttctccccgcctgctcccatctgggggcttccgcagcttcaggggagcccggagctttgcaagcgtctgtgcatttatttcttacaaaacaaaacaaaacaaaacaaaacaaaacaaaacaaaacaaaacaaaacctcacacacagccaataccagcggtggagcggggcgcactgcacacacccag

SEQ ID NO: 282633 - DNA, 1543 bp, Homo sapiens
tacaactttgcaatacaactttatgagttgttcggcccttccattggccgctgtcggtcatgtggatgagaaccgtgaacatgaacttttttataatttcccttgcgagaatagagccgcattcttttgctccgctccgtcctgcctgcttcggagctctgccttccagccgggctcggctgtgctttgtccggagatggcgagcgaagggaagccccggccaggccaggcctggcggctcccgctggagattgggcgcgctccgttcccggcgccgcggcagcagctttgcaactcgcaacctggctaatttcctgcgtcctctggcaccaggaaagaggacaattcttctctcgggctgcccaagcgacagctgtcagaggggcaggagcttctgggagccaccgtgctacgtgtgccgcctggccattcaaactgtcaattttaggtccagaagtgtccaaaccacaagttctcaaaactctctgaaaaatggctccctccgagttaaggtcttggagctggagaaggagttccacttcaatcgctacctgacccggcggcgccgcatcgagatcgcccacacgctctgtttgtctgagcgccaggtcaagatctggtttcagaaccggaggatgaagtggaagaaagaccacaaactgcccaacaccaagatgcgatcctccaattcggcctcggcctctgccggcccaccagggaaagcacaaactcagagcccacacctccatccccacccccacccgagcacctccacacccgttccctcctccatataatcttctagagatcttaaccagtttctatcccttacctgcttttctcttctcttctcctgctccgttcctcatccacccctccccatctggaccataatagacaccaaaacaaacccaaattggtaaaaagaataatcaaaaagaagacattatccggttaagagtctgtgctggttgccacccaagagagaacagttgtccaggatgctggctggtggaacaacctgctggcccgaaacaaggctgccaggtgtggatacctgagaaggactacttggtatcaaatacttttgagatggctacagtcagctagctggacagcccatgctgactggggacatacacttgcatctttgttgaaagcagaagaagacagaccctttccccaccttccttacctcctcttcccccattaaggcagctcatccaagcttgtatttaactgaataaatgagtagacattgtggacctcacaagattatttaattcttaagatgtgtagaccttgatggtaggtgtgacatgttagtttttcttacttgcatttatttaagacactgttacagagatactgttgtcaccttctggggcacggtctttggggagaggggagtgcatttagacttatgtggaactgtacaaattgtgatgtggctacatagaaagccatgtgctaagaataaactccatttaaaaaacattaaaaatctaagattcatgtgttttctaagcttttcattaagaaa

SEQ ID NO: 282634 - DNA, 1317 bp, Homo sapiens
tacaactttgcaatacaactttatgagttgttcggcccttccattggccgctgtcggtcatgtggatgagaaccgtgaacatgaacttttttataatttcccttgcgagaatagagccgcattcttttgctccgctccgtcctgcctgcttcggagctctgccttccagccgggctcggctgtgctttgtccggagatggcgagcgaagggaagccccggccaggccaggcctggcggctcccgctggagattgggcgcgctccgttcccggcgccgcggcagcagctttgcaactcgcaacctggctaatttcctgcgtcctctggcaccaggaaagaggacaattcttctctcgggctgcccaagcgacagctgtcagaggggcaggagcttctgggagccaccgttaattcagccagagttctccgctcgttgccggcttcccttcgcccggtttttcgatgagagaggtgtctgaagcgctgggagggggaataggtgcgtgggtggaattcttgtttctaccaacagtccaactcggtcctggcctgcaaccgggcgtcctacgagtacggggcctcgtgtttctattctgataaggacctcagtggcgcctcgccctcgggcagtggcaagcagaggggccccggggactacctgcacttttctcccgagcagcagtacaaacccgacagcagcagcgggcagggcaaagcactccatgacgaaggcgccgaccggaagtacacgagcccggtttacccttggatgcagcggatgaactcctgcgcgggtgctgtgtatgggagccatgggcgccgaggccgccagacctacacgcgctaccagacactggagctggagaaggagttccacttcaaccgctacctgacacggcgccgccgcatcgagatcgccaacgcgctctgcctcaccgagcgccagatcaagatctggttccagaaccgccgcatgaagtggaaaaaggaaaacaagctcatcaattccacgcagcccagcggggaggactcagaggcaaaggcgggcgagtagatgcctgggcagggaccaggccagcgctgcaacctccttcggctttgcccccttgccctcgcctgttccccaacttttctccccgcctgctcccatctgggggcttccgcagcttcaggggagcccggagctttgcaagcgtctgtgcatttatttcttacaaaacaaaacaaaacaaaacaaaacaaaacaaaacaaaacaaaacaaaacctcacacacagccaataccagcggtggagcggggcgcactgcacacacccag

SEQ ID NO: 282635 - DNA, 1704 bp, Homo sapiens
cccagaaaaaacgacaacgcgagaaaaattagtatttttgcacttcacaaattaatgaccatgagctcgtttttgataaactccaactacatcgagcccaagttccctcccttcgaggagtacgcgcagcacagcggctcgggcggcgcagacggcggcccgggcgggggccccggctaccagcagcccccagcgcccccgacccagcacctgccgctgcagcagccccagctccctcacgcgggcggcggccgagagccccctgcctcctactacgcgccgcggaccgcccgcgagcccgcctaccctgctgccgcgctgtaccccgcgcatggggccgcggacaccgcctacccctatggctaccgcggcggcgccagccccgggcggccgccccagcccgagcagcccccggcgcaagccaagggcccagcgcacggcctgcatgcgagccacgtcctgcagccccagccgccgccgcccctgcagcctcgcgccgtgcccccagcggccccgcggcgctgcgaggcggcccccgccaccccaggcgtcccggcagggggcagcgcccccgcgtgcccgctgctcttggccgacaagagcccgctgggcctgaagggcaaggagcccgtggtgtacccctggatgaagaagatccatgtcagcgccgttaaccccagttataacggaggggagcctaagcgctctcgaaccgcctacacccggcagcaggtcttggagctggagaaggagttccacttcaatcgctacctgacccggcggcgccgcatcgagatcgcccacacgctctgtttgtctgagcgccaggtcaagatctggtttcagaaccggaggatgaagtggaagaaagaccacaaactgcccaacaccaagatgcgatcctccaattcggcctcggcctctgccggcccaccagggaaagcacaaactcagagcccacacctccatccccacccccacccgagcacctccacacccgttccctcctccatataatcttctagagatcttaaccagtttctatcccttacctgcttttctcttctcttctcctgctccgttcctcatccacccctccccatctggaccataatagacaccaaaacaaacccaaattggtaaaaagaataatcaaaaagaagacattatccggttaagagtctgtgctggttgccacccaagagagaacagttgtccaggatgctggctggtggaacaacctgctggcccgaaacaaggctgccaggtgtggatacagcccatgctgactggggacatacacttgcatctttgttgaaagcagaagaagacagaccctttccccaccttccttacctcctcttcccccattaaggcagctcatccaagcttgtatttaactgaataaatgagtagacattgtggacctcacaagattatttaattcttaagatgtgtagaccttgatggtaggtgtgacatgttagtttttcttacttgcatttatttaagacactgttacagagatactgttgtcaccttctggggcacggtctttggggagaggggagtgcatttagacttatgtggaactgtacaaattgtgatgtggctacatagaaagccatgtgctaagaataaactccatttaaaaaacattaaaaatctaagattcatgtgttttctaagcttttcattaagaaa

SEQ ID NO: 282636 - DNA, 973 bp, Homo sapiens
atgagttcctattttgtgaatcccactttccccgggagccttcccagcggccaggactccttcttgggccagctgcccctctaccaggctggctatgacgcgctgaggcccttcccggcctcgtacggggcgtcgagtctcccggacaagacgtacacctcaccttgtttccttgtttctaccaacagtccaactcggtcctggcctgcaaccgggcgtcctacgagtacggggcctcgtgtttctattctgataaggacctcagtggcgcctcgccctcgggcagtggcaagcagaggggccccggggactacctgcacttttctcccgagcagcagtacaaacccgacagcagcagcgggcagggcaaagcactccatgacgaaggcgccgaccggaagtacacgagcccggtttacccttggatgcagcggatgaactcctgcgcgggtgctgtgtatgggagccatgggcgccgaggccgccagacctacacgcgctaccagacactggagctggagaaggagttccacttcaaccgctacctgacacggcgccgccgcatcgagatcgccaacgcgctctgcctcaccgagcgccagatcaagatctggttccagaaccgccgcatgaagtggaaaaaggaaaacaagctcatcaattccacgcagcccagcggggaggactcagaggcaaaggcgggcgagtagatgcctgggcagggaccaggccagcgctgcaacctccttcggctttgcccccttgccctcgcctgttccccaacttttctccccgcctgctcccatctgggggcttccgcagcttcaggggagcccggagctttgcaagcgtctgtgcatttatttcttacaaaacaaaacaaaacaaaacaaaacaaaacaaaacaaaacaaaacaaaacctcacacacagccaataccagcggtggagcggggcgcactgcacacacccag

SEQ ID NO: 282637 - DNA, 2309 bp, Homo sapiens
cccagaaaaaacgacaacgcgagaaaaattagtatttttgcacttcacaaattaatgaccatgagctcgtttttgataaactccaactacatcgagcccaagttccctcccttcgaggagtacgcgcagcacagcggctcgggcggcgcagacggcggcccgggcgggggccccggctaccagcagcccccagcgcccccgacccagcacctgccgctgcagcagccccagctccctcacgcgggcggcggccgagagccccctgcctcctactacgcgccgcggaccgcccgcgagcccgcctaccctgctgccgcgctgtaccccgcgcatggggccgcggacaccgcctacccctatggctaccgcggcggcgccagccccgggcggccgccccagcccgagcagcccccggcgcaagccaagggcccagcgcacggcctgcatgcgagccacgtcctgcagccccagccgccgccgcccctgcagcctcgcgccgtgcccccagcggccccgcggcgctgcgaggcggcccccgccaccccaggcgtcccggcagggggcagcgcccccgcgtgcccgctgctcttggccgacaagagcccgctgggcctgaagggcaaggagcccgtggtgtacccctggatgaagaagatccatgtcagcgccggtacgtggcgccgcttgggaggcgcgggaggtgggccggggctgggcctgggttcgagggtcggggtcaggagggagaggctcaggggaagggggcctcgggaggggagcccccatctggcccgggctgcggtgagatgtgggtatgtgcgcgccagccagccgcctgatcccaacatgagaacccttttgtacccagggtccctttatcaggagatttacgagacgccaaactgttagggcagtaattatagcccccataaatttaattgccctggcagaggcttcaggccatgtgtctttgaagcttttcttcagccccaatgcccagcaccattctttatggctctcgggtgtttcccgttgtcaatagcctgtgaaacattttctttgccgttttatgtatcttgcgtgaacttggtgtcaggttattatataatgatgatgtccaattgctcttccccaccccaccttctctctcctcctcctttccctctcttccgctccctcctccttggccttctatttcggggttctgggttttcagttaaccccagttataacggaggggagcctaagcgctctcgaaccgcctacacccggcagcaggtcttggagctggagaaggagttccacttcaatcgctacctgacccggcggcgccgcatcgagatcgcccacacgctctgtttgtctgagcgccaggtcaagatctggtttcagaaccggaggatgaagtggaagaaagaccacaaactgcccaacaccaagatgcgatcctccaattcggcctcggcctctgccggcccaccagggaaagcacaaactcagagcccacacctccatccccacccccacccgagcacctccacacccgttccctcctccatataatcttctagagatcttaaccagtttctatcccttacctgcttttctcttctcttctcctgctccgttcctcatccacccctccccatctggaccataatagacaccaaaacaaacccaaattggtaaaaagaataatcaaaaagaagacattatccggttaagagtctgtgctggttgccacccaagagagaacagttgtccaggatgctggctggtggaacaacctgctggcccgaaacaaggctgccaggtgtggatacctgagaaggactacttggtatcaaatacttttgagatggctacagtcagctagctggacagcccatgctgactggggacatacacttgcatctttgttgaaagcagaagaagacagaccctttccccaccttccttacctcctcttcccccattaaggcagctcatccaagcttgtatttaactgaataaatgagtagacattgtggacctcacaagattatttaattcttaagatgtgtagaccttgatggtaggtgtgacatgttagtttttcttacttgcatttatttaagacactgttacagagatactgttgtcaccttctggggcacggtctttggggagaggggagtgcatttagacttatgtggaactgtacaaattgtgatgtggctacatagaaagccatgtgctaagaataaactccatttaaaaaacattaaaaatctaagattcatgtgttttctaagcttttcattaagaaa

SEQ ID NO: 282638 - DNA, 1001 bp, Homo sapiens
  misc_feature (894)..(894): n is a, c, g, or t
  misc_feature (902)..(902): n is a, c, g, or t
  misc_feature (908)..(909): n is a, c, g, or t
gagttaacttcctgacccaggaagtggcagcaacagaggggactagcagcgaatatactttacaccaaatctcagaagattcagaacttagatgagtggggcccaggacaggaaccctggagccttggaaggaggggagccccatctccccagaagagcagtgaccccagcagagaggggcctggtgtatcactggaggaaatagcctgccaaggaatacacgtcttcagaagaaattctgtgtggcttcaagagactgatcaaattgtgagaggaaaacagcctacccggtcctcttttcttcaatacaaaatgagataataggggttggaaggaaaaccttcaagacctatggaagtcagttgcagccagctcatcacatagaggtgcaggtgaggtgtattttcatcacggtggaaaattctggctgcttcatctccatctctagagccaatattggagcttttcaataaaagctatggcctcaaccaccagcaccaagaagatgatggaggaagccacctgctccatctgcctgagcctgatgacgaacccagtaagcatcaactgtggacacagctactgccacttgtgtataacagacttctttaaaaacccaagccaaaagcaactgaggcaggagacattctgctgtccccagtgtcgggctccatttcatatggatagcctccgacccaacaagcagctgggaagcctcattgaagccctcaaagagacggatcaagaaatgtcatgtgaggaacacggagagcagttccacctgttctgcgaagacgaggggcagctcatctgctggcgctgtgagcgggcaccacagcacaaagggcacaccacagctcttgttgaagacgtatgccagggctacaagggagnccgaagcnggcaanngagccatggaacgagtcgggcaaagtggcacgaaggataaacggaaaaagggatcgacaacacgcggaaaacagggccaagagacaactagg

SEQ ID NO: 282639 - DNA, 445 bp, Homo sapiens
ccttactttaatcaaatgtataagaagtaaatatgaatattatatggcagaagcaggaagcaacagttgtgtctagatgtcagaggcatggctgggcctccatctctgcctaagggagatataaaagagttcaaactattgcccatgttccccagggtcagaagttctaattatgatgatagaggctgggttgtaagtagtaagtgaagggtagcagaatatgccatctttggcataagaagtattttgagttgaagacaattgagaaaaaaaatagattaaaaacaaacaaacacctctgccctctccctatttgcctaaaagcaggatatgaaattgtgaaggtgtcttcttactcggggaagaacaaaagttagtcaccagagactttagactcttatcagcctggacatagcaccagagaagtcttttttttaaaaaaaaa

SEQ ID NO: 282640 - DNA, 513 bp, Homo sapiens
gtcacgccggtaatcccagcactttgggaggccgaggcgagtggatcacctgaggtcaggagtttgagaccagcttggccaacatggtgaaaccctgtctgtagaaaaatgtcagggctcagcccagaaattgctgcaggtgaggctgtgtacttggagtagggaaaaaaggtatgttatagtgctattaaaggagaatggtaaggaagcatgggaagataaagtaatgtttcttttagatgtacatcagtgccatcaggctggccttcactaatttatagggtacctttatgtcaattagaaaaataaacttctgagggaacacagcttggccaaatgaaaccacgggataacatttaccactgtttgcctccttggcccatgtgcagagaaccctggttgttgactctctcctgggattgggctatccatgatagccctatcccaggagaaggaaaacgatacgaagcagacggatgaggaagtgttccatctcctgtaatggctagcagg

SEQ ID NO: 282641 - DNA, 3552 bp, Homo sapiens
gagttaacttcctgacccaggaagtggcagcaacagaggggactagcagcgaatatgtaagtgtctgagcagtgaaggttacggaaaaggtccaggctaaggttttctcagtggatatactttacaccaaatctcagaagattcagaacttagatgagtggggcccaggacaggaaccctggagccttggaaggaggggagccccatctccccagaagagcagtgaccccagcagagaggggcctggtgtatcactggaggaaatagcctgccaaggaatacacgtcttcagaagaaattctgtgtggcttcaagagactgatcaaattgtgagaggaaaacagcctacccggtcctcttttcttcaatacaaaatgagataataggggttggaaggaaaaccttcaagacctatggaagtcagttgcagccagctcatcacatagaggtgcaggtgaggtgtattttcatcacggtggaaaattctggctgcttcatctccatctctagagccaatattggagcttttcaataaaagctatggcctcaaccaccagcaccaagaagatgatggaggaagccacctgctccatctgcctgagcctgatgacgaacccagtaagcatcaactgtggacacagctactgccacttgtgtataacagacttctttaaaaacccaagccaaaagcaactgaggcaggagacattctgctgtccccagtgtcgggctccatttcatatggatagcctccgacccaacaagcagctgggaagcctcattgaagccctcaaagagacggatcaagaaatgtcatgtgaggaacacggagagcagttccacctgttctgcgaagacgaggggcagctcatctgctggcgctgtgagcgggcaccacagcacaaagggcacaccacagctcttgttgaagacgtatgccagggctacaaggaaaagctccagaaagctgtgacaaaactgaagcaacttgaagacagatgtacggagcagaagctgtccacagcaatgcgaataactaaatggaaagagaaggtacagattcagagacaaaaaatccggtctgactttaagaatctccagtgtttcctacatgaggaagagaagtcttatctctggaggctggagaaagaagaacaacagactctgagtagactgagggactatgaggctggtctggggctgaagagcaatgaactcaagagccacatcctggaactggaggaaaaatgtcagggctcagcccagaaattgctgcagaatgtgaatgacactttgagcaggagttgggctgtgaagctggaaacatcagaggctgtctccttggaacttcatactatgtgcaatgtttccaagctttacttcgatgtgaagaaaatgttaaggagtcatcaagttagtgtgactctggatccagatacagctcatcacgaactaattctctctgaggatcggagacaagtgactcgtggatacacccaggagaatcaggacacatcttccaggagatttactgccttcccctgtgtcttgggttgtgaaggcttcacctcaggaagacgttactttgaagtggatgttggcgaaggaaccggatgggatttaggagtttgtatggaaaatgtgcagaggggcactggcatgaagcaagagcctcagtctggattctggaccctcaggctgtgcaaaaagaaaggctatgtagcacttacttctcccccaacttcccttcatctgcatgagcagcccctgcttgtgggaatttttctggactatgaggccggagttgtatccttttataacgggaatactggctgccacatctttactttcccgaaggcttccttctctgatactctccggccctatttccaggtttatcaatattctcctttgtttctgcctcccccaggtgactaaggaaaagagcagaagctccttggtttaaccagcacagagaaaataatataaatcccataagggcagacgtttggtctgttttcttcgctgtcatttccttagtagttagactagtgctgagattttagtggatatataattgatttatgttgaatatatggacttagcaactaaaaataccacagatggttaacctggactggggcaaagcaagataatagtgatgatcgtatgttgctgtctccatccgtctttaatgggtcagggctttgatttccaagggtcttcaggtgatgagtaggggtacccacaagtcagaaggtctgcgttctcctagtttgtttgctgccatttgaactcatgtagggaatgaaagaaagctgcaattatccgccaactgcatttaaaacaaaacaaaacagaaaaatcaaaataacattgactcttccaaccactgacatgttgtttaataatctaagcggcagtcctggaggctaccagacttactgagttctacctgagaaacagccaagcaaagtgtgagagaagggttaagactggcttacaatgagatgcttcaaatgaaaagggaattatgagtaaaattgaactttgatgggggattcagttctggaaaagaatttggtattttccagtctgctaggaccaattaccttgaaatattttaaaatctcagtaaatagttattgctgaaatggctgttggcagttcttattatgattcagagaagagcaaatagaccttaacttcattttgaaaaagaccaaattaccatacccgagtgagtaatgacaggactacaactaaaacataaacaacattaatgatgaccataaaaagtcacaaaattgctaaatgttataatttagagttgacataaaaattgatggccaggcatggtggctcacgcctgtaatcccagaactatgtgaggctgaggcaggtggatcacttgaggtcaggagttcaacaccagcctggccaacatggtgaaaccctgtctctactaaaaatacaaaaattagccgggcatggtggtaggggcctgtaacccagctactcgtgaggccaaggcaggagaattgcttgagcctgcagcagctgcagtaagccaagatcatgctgtgcctcaaggaaaaaaaaaattaatgtttactgatatttgttgaagtcctacaacatcacctctgagaataggagaaatgaagcaacagttgtgtctagatgtcagaggcatggctgggcctccatctctgcctaagggagatataaaagagttcaaactattgcccatgttccccagggtcagaagttctaattatgatgatagaggctgggttgtaagtagtaagtgaagggtagcagaatatgccatctttggcataagaagtattttgagttgaagacaattgagaaaaaaaatagattaaaaacaaacaaacacctctgccctctccctatttgcctaaaagcaggatatgaaattgtgaaggtgtcttcttactcggggaagaacaaaagttagtcaccagagactttagactcttatcagcctggacatagcaccagagaagtcttttttttaaaaaaaaa

SEQ ID NO: 282642 - DNA, 2868 bp, Homo sapiens
gtgactatactgtaaggctgagtgtatagcatgattgctttaccactgtgtgatacctgctaccaccatcttagtggcagtggcccagtctcagggctgtgcacagattcaccactaaggacctttatgataagtgttctctaatctgggctcactgtgaaggaaatccgatcaccaaaagctagtccttacagagggagcatggacaaagctcctggccctcagacttcagcaaggatgagaatagatgcaaatgttgataaacatcctgccatgctgaatctcccagaagctggtaggaattattccatctgggtatccatcaatacctaagactggtgggaattactttgtttgagtatccatcaatatctaagactaagactagggtaactctctttacttcttcgggtaaagcaaagaagaatagccctgcatgacaagccccatgaaataccgatgttcccatgctcaccttttctttttgtttctttatagaatgtgaatgacactttgagcaggtaagtcctgtttgaatgcaggaggggaggggtgtgcgtatatagaaatgaatggaatgcacctctgaagaaatctctcgcctctgcttattctaggagttgggctgtgaagctggaaacatcagaggctgtctccttggaacttcatactatgtgcaatgtttccaagctttacttcgatgtgaagaaaatgttaaggagtcatcaagttagtgtgactctggatccagatacagctcatcacgaactaattctctctgaggatcggagacaagtgactcgtggatacacccaggagaatcaggacacatcttccaggagatttactgccttcccctgtgtcttgggttgtgaaggcttcacctcaggaagacgttactttgaagtggatgttggcgaaggaaccggatgggatttaggagtttgtatggaaaatgtgcagaggggcactggcatgaagcaagagcctcagtctggattctggaccctcaggctgtgcaaaaagaaaggctatgtagcacttacttctcccccaacttcccttcatctgcatgagcagcccctgcttgtgggaatttttctggactatgaggccggagttgtatccttttataacgggaatactggctgccacatctttactttcccgaaggcttccttctctgatactctccggccctatttccaggtttatcaatattctcctttgtttctgcctcccccaggtgactaaggaaaagagcagaagctccttggtttaaccagcacagagaaaataatataaatcccataagggcagacgtttggtctgttttcttcgctgtcatttccttagtagttagactagtgctgagattttagtggatatataattgatttatgttgaatatatggacttagcaactaaaaataccacagatggttaacctggactggggcaaagcaagataatagtgatgatcgtatgttgctgtctccatccgtctttaatgggtcagggctttgatttccaagggtcttcaggtgatgagtaggggtacccacaagtcagaaggtctgcgttctcctagtttgtttgctgccatttgaactcatgtagggaatgaaagaaagctgcaattatccgccaactgcatttaaaacaaaacaaaacagaaaaatcaaaataacattgactcttccaaccactgacatgttgtttaataatctaagcggcagtcctggaggctaccagacttactgagttctacctgagaaacagccaagcaaagtgtgagagaagggttaagactggcttacaatgagatgcttcaaatgaaaagggaattatgagtaaaattgaactttgatgggggattcagttctggaaaagaatttggtattttccagtctgctaggaccaattaccttgaaatattttaaaatctcagtaaatagttattgctgaaatggctgttggcagttcttattatgattcagagaagagcaaatagaccttaacttcattttgaaaaagaccaaattaccatacccgagtgagtaatgacaggactacaactaaaacataaacaacattaatgatgaccataaaaagtcacaaaattgctaaatgttataatttagagttgacataaaaattgatggccaggcatggtggctcacgcctgtaatcccagaactatgtgaggctgaggcaggtggatcacttgaggtcaggagttcaacaccagcctggccaacatggtgaaaccctgtctctactaaaaatacaaaaattagccgggcatggtggtaggggcctgtaacccagctactcgtgaggccaaggcaggagaattgcttgagcctgcagcagctgcagtaagccaagatcatgctgtgcctcaaggaaaaaaaaaattaatgtttactgatatttgttgaagtcctacaacatcacctctgagaataggagaaatgaagcaacagttgtgtctagatgtcagaggcatggctgggcctccatctctgcctaagggagatataaaagagttcaaactattgcccatgttccccagggtcagaagttctaattatgatgatagaggctgggttgtaagtagtaagtgaagggtagcagaatatgccatctttggcataagaagtattttgagttgaagacaattgagaaaaaaaatagattaaaaacaaacaaacacctctgccctctccctatttgcctaaaagcaggatatgaaattgtgaaggtgtcttcttactcggggaagaacaaaagttagtcaccagagactttagactcttatcagcctggacatagcaccagagaagtcttttttttaaaaaaaaa

SEQ ID NO: 282643 - DNA, 2655 bp, Homo sapiens
gagttaacttcctgacccaggaagtggcagcaacagaggggactagcagcgaatatactttacaccaaatctcagaagattcagaacttagatgagtggggcccaggacaggaaccctggagccttggaaggaggggagccccatctccccagaagagcagtgaccccagcagagaggggcctggtgtatcactggaggaaatagcctgccaaggaatacacgtcttcagaagaaattctgtgtggcttcaagagactgatcaaattgtgagaggaaaacagcctacccggtcctcttttcttcaatacaaaatgagataataggggttggaaggaaaaccttcaagacctatggaagtcagttgcagccagctcatcacatagaggtgcaggtgaggtgtattttcatcacggtggaaaattctggctgcttcatctccatctctagagccaatattggagcttttcaataaaagctatggcctcaaccaccagcaccaagaagatgatggaggaagccacctgctccatctgcctgagcctgatgacgaacccagtaagcatcaactgtggacacagctactgccacttgtgtataacagacttctttaaaaacccaagccaaaagcaactgaggcaggagacattctgctgtccccagtgtcgggctccatttcatatggatagcctccgacccaacaagcagctgggaagcctcattgaagccctcaaagagacggatcaagaaatgtcatgtgaggaacacggagagcagttccacctgttctgcgaagacgaggggcagctcatctgctggcgctgtgagcgggcaccacagcacaaagggcacaccacagctcttgttgaagacgtatgccagggctacaaggaaaagctccagaaagctgtgacaaaactgaagcaacttgaagacagatgtacggagcagaagctgtccacagcaatgcgaataactaaatggaaagagaaggtacagattcagagacaaaaaatccggtctgactttaagaatctccagtgtttcctacatgaggaagagaagtcttatctctggaggctggagaaagaagaacaacagactctgagtagactgagggactatgaggctggtctggggctgaagagcaatgaactcaagagccacatcctggaactggaggaaaaatgtcagggctcagcccagaaattgctgcagaatgtgaatgacactttgagcaggagttgggctgtgaagctggaaacatcagaggctgtctccttggaacttcatactatgtgcaatgtttccaagctttacttcgatgtgaagaaaatgttaaggagtcatcaagttagtgtgactctggatccagatacagctcatcacgaactaattctctctgaggatcggagacaagtgactcgtggatacacccaggagaatcaggacacatcttccaggagatttactgccttcccctgtgtcttgggttgtgaaggcttcacctcaggaagacgttactttgaagtggatgttggcgaaggaaccggatgggatttaggagtttgtatggaaaatgtgcagaggggcactggcatgaagcaagagcctcagtctggattctggaccctcaggctgtgcaaaaagaaaggctatgtagcacttacttctcccccaacttcccttcatctgcatgagcagcccctgcttgtgggaatttttctggactatgaggccggagttgtatccttttataacgggaatactggctgccacatctttactttcccgaaggcttccttctctgatactctccggccctatttccaggtttatcaatattctcctttgtttctgcctcccccaggtgactaaggaaaagagcagaagctccttggtttaaccagcacagagaaaataatataaatcccataagggcagacgtttggtctgttttcttcgctgtcatttccttagtagttagactagtgctgagattttagtggatatataattgatttatgttgaatatatggacttagcaactaaaaataccacagatggttaacctggactggggcaaagcaagataatagtgatgatcgtatgttgctgtctccatccgtctttaatgggtcagggctttgatttccaagggtcttcaggtgatgagtaggggtacccacaagtcagaaggtctgcgttctcctagtttgtttgctgccatttgaactcatgtagggaatgaaagaaagctgcaattatccgccaactgcatttaaaacaaaacaaaacagaaaaatcaaaataacattgactcttccaaccactgacatgttgtttaataatctaagcggcagtcctggaggctaccagacttactgagttctacctgagaaacagccaagcaaagtgtgagagaagggttaagactggcttacaatgagatgcttcaaatgaaaagggaattatgaaatagacaataaactggccaggcacagtggctcatgcctgtactcccagcactttggaaagccgaggcgggcagatcacctgaggtcaggagttaaagaccagcatggccaacacggtgaaaccccatctctactaaaaatacaaaaattagttgggagtggtgatgagcgttactgctg

SEQ ID NO: 282644 - DNA, 2312 bp, Homo sapiens
  misc_feature (2275)..(2275): n is a, c, g, or t
  misc_feature (2282)..(2282): n is a, c, g, or t
  misc_feature (2286)..(2287): n is a, c, g, or t
  misc_feature (2312)..(2312): n is a, c, g, or t
gagttaacttcctgacccaggaagtggcagcaacagaggggactagcagcgaatatactttacaccaaatctcagaagattcagaacttagatgagtggggcccaggacaggaaccctggagccttggaaggaggggagccccatctccccagaagagcagtgaccccagcagagaggggcctggtgtatcactggaggaaatagcctgccaaggaatacacgtcttcagaagaaattctgtgtggcttcaagagactgatcaaattgtgagaggaaaacagcctacccggtcctcttttcttcaatacaaaatgagataataggggttggaaggaaaaccttcaagacctatggaagtcagttgcagccagctcatcacatagaggtgcaggtgaggtgtattttcatcacggtggaaaattctggctgcttcatctccatctctagagccaatattggagcttttcaataaaagctatggcctcaaccaccagcaccaagaagatgatggaggaagccacctgctccatctgcctgagcctgatgacgaacccagtaagcatcaactgtggacacagctactgccacttgtgtataacagacttctttaaaaacccaagccaaaagcaactgaggcaggagacattctgctgtccccagtgtcgggctccatttcatatggatagcctccgacccaacaagcagctgggaagcctcattgaagccctcaaagagacggatcaagaaatgtcatgtgaggaacacggagagcagttccacctgttctgcgaagacgaggggcagctcatctgctggcgctgtgagcgggcaccacagcacaaagggcacaccacagctcttgttgaagacgtatgccagggctacaaggaaaagctccagaaagctgtgacaaaactgaagcaacttgaagacagatgtacggagcagaagctgtccacagcaatgcgaataactaaatggaaagagaaggtacagattcagagacaaaaaatccggtctgactttaagaatctccagtgtttcctacatgaggaagagaagtcttatctctggaggctggagaaagaagaacaacagactctgagtagactgagggactatgaggctggtctggggctgaagagcaatgaactcaagagccacatcctggaactggaggaaaaatgtcagggctcagcccagaaattgctgcagaatgtgaatgacactttgagcaggagttgggctgtgaagctggaaacatcagaggctgtctccttggaacttcatactatgtgcaatgtttccaagctttacttcgatgtgaagaaaatgttaaggagtcatcaagttagtgtgactctggatccagatacagctcatcacgaactaattctctctgaggatcggagacaagtgactcgtggatacacccaggagaatcaggacacatcttccaggagatttactgccttcccctgtgtcttgggttgtgaaggcttcacctcaggaagacgttactttgaagtggatgttggcgaaggaaccggatgggatttaggagtttgtatggaaaatgtgcagaggggcactggcatgaagcaagagcctcagtctggattctggaccctcaggctgtgcaaaaagaaaggctatgtagcacttacttctcccccaacttcccttcatctgcatgagcagcccctgcttgtgggaatttttctggactatgaggccggagttgtatccttttataacgggaatactggctgccacatctttactttcccgaaggcttccttctctgatactctccggccctatttccaggtttatcaatattctcctttgtttctgcctcccccaggtgactaaggaaaagagcagaagctccttggtttaaccagcacagagaaaataatataaatcccataagggcagacgtttggtctgttttcttcgctgtcatttccttagtagttagactagtgctgagattttagtggatatataattgatttatgttgaatatatggacttagcaactaaaaataccacagatggttaacctggactggggcaaagcaagataatagtgatgatcgtatgttgctgtctccatccgtctttaatgggtcagggctttgatttccaagggtcttcaggtgatgagtaggggtacccacaagtcagaaggtctgcgttctcctagtttgtttgctgccatttgaactcatgtagggaatgaaagaaagctgcaattatccgccaagngtagcgntggnnattaagagagtcgttcacgctaagn

SEQ ID NO: 282645 - DNA, 1319 bp, Homo sapiens
gtgactatactgtaaggctgagtgtatagcatgattgctttaccactgtgtgatacctgctaccaccatcttagtggcagtggcccagtctcagggctgtgcacagattcaccactaaggacctttatgataagtgttctctaatctgggctcactgtgaaggaaatccgatcaccaaaagctagtccttacagagggagcatggacaaagctcctggccctcagacttcagcaaggatgagaatagatgcaaatgttgataaacatcctgccatgctgaatctcccagaagctggtaggaattattccatctgggtatccatcaatacctaagactggtgggaattactttgtttgagtatccatcaatatctaagactaagactagggtaactctctttacttcttcgggtaaagcaaagaagaatagccctgcatgacaagccccatgaaataccgatgttcccatgctcaccttttctttttgtttctttatagaatgtgaatgacactttgagcaggtaagtcctgtttgaatgcaggaggggaggggtgtgcgtatatagaaatgaatggaatgcacctctgaagaaatctctcgcctctgcttattctaggagttgggctgtgaagctggaaacatcagaggctgtctccttggaacttcatactatgtgcaatgtttccaagctttacttcgatgtgaagaaaatgttaaggagtcatcaagttagtgtgactctggatccagatacagctcatcacgaactaattctctctgaggatcggagacaagtgactcgtggatacacccaggagaatcaggacacatcttccaggagatttactgccttcccctgtgtcttgggttgtgaaggcttcacctcaggaagacgttactttgaagtggatgttggcgaaggaaccggatgggatttaggagtttgtatggaaaatgtgcagaggggcactggcatgaagcaagagcctcagtctggattctggaccctcaggctgtgcaaaaagaaaggctatgtagcacttacttctcccccaacttcccttcatctgcatgagcagcccctgcttgtgggaatttttctggactatgaggccggagttgtatccttttataacgggaatactggctgccacatctttactttcccgaaggcttccttctctgatactctccggccctatttccaggtttatcaatattctcctttgtttctgcctcccccaggtgactaaggaaaagagcagaagctccttggtttaaccagcacagagaaaataatataaatcccataagggca

SEQ ID NO: 282646 - DNA, 3490 bp, Homo sapiens
gagttaacttcctgacccaggaagtggcagcaacagaggggactagcagcgaatatactttacaccaaatctcagaagattcagaacttagatgagtggggcccaggacaggaaccctggagccttggaaggaggggagccccatctccccagaagagcagtgaccccagcagagaggggcctggtgtatcactggaggaaatagcctgccaaggaatacacgtcttcagaagaaattctgtgtggcttcaagagactgatcaaattgtgagaggaaaacagcctacccggtcctcttttcttcaatacaaaatgagataataggggttggaaggaaaaccttcaagacctatggaagtcagttgcagccagctcatcacatagaggtgcaggtgaggtgtattttcatcacggtggaaaattctggctgcttcatctccatctctagagccaatattggagcttttcaataaaagctatggcctcaaccaccagcaccaagaagatgatggaggaagccacctgctccatctgcctgagcctgatgacgaacccagtaagcatcaactgtggacacagctactgccacttgtgtataacagacttctttaaaaacccaagccaaaagcaactgaggcaggagacattctgctgtccccagtgtcgggctccatttcatatggatagcctccgacccaacaagcagctgggaagcctcattgaagccctcaaagagacggatcaagaaatgtcatgtgaggaacacggagagcagttccacctgttctgcgaagacgaggggcagctcatctgctggcgctgtgagcgggcaccacagcacaaagggcacaccacagctcttgttgaagacgtatgccagggctacaaggaaaagctccagaaagctgtgacaaaactgaagcaacttgaagacagatgtacggagcagaagctgtccacagcaatgcgaataactaaatggaaagagaaggtacagattcagagacaaaaaatccggtctgactttaagaatctccagtgtttcctacatgaggaagagaagtcttatctctggaggctggagaaagaagaacaacagactctgagtagactgagggactatgaggctggtctggggctgaagagcaatgaactcaagagccacatcctggaactggaggaaaaatgtcagggctcagcccagaaattgctgcagaatgtgaatgacactttgagcaggagttgggctgtgaagctggaaacatcagaggctgtctccttggaacttcatactatgtgcaatgtttccaagctttacttcgatgtgaagaaaatgttaaggagtcatcaagttagtgtgactctggatccagatacagctcatcacgaactaattctctctgaggatcggagacaagtgactcgtggatacacccaggagaatcaggacacatcttccaggagatttactgccttcccctgtgtcttgggttgtgaaggcttcacctcaggaagacgttactttgaagtggatgttggcgaaggaaccggatgggatttaggagtttgtatggaaaatgtgcagaggggcactggcatgaagcaagagcctcagtctggattctggaccctcaggctgtgcaaaaagaaaggctatgtagcacttacttctcccccaacttcccttcatctgcatgagcagcccctgcttgtgggaatttttctggactatgaggccggagttgtatccttttataacgggaatactggctgccacatctttactttcccgaaggcttccttctctgatactctccggccctatttccaggtttatcaatattctcctttgtttctgcctcccccaggtgactaaggaaaagagcagaagctccttggtttaaccagcacagagaaaataatataaatcccataagggcagacgtttggtctgttttcttcgctgtcatttccttagtagttagactagtgctgagattttagtggatatataattgatttatgttgaatatatggacttagcaactaaaaataccacagatggttaacctggactggggcaaagcaagataatagtgatgatcgtatgttgctgtctccatccgtctttaatgggtcagggctttgatttccaagggtcttcaggtgatgagtaggggtacccacaagtcagaaggtctgcgttctcctagtttgtttgctgccatttgaactcatgtagggaatgaaagaaagctgcaattatccgccaactgcatttaaaacaaaacaaaacagaaaaatcaaaataacattgactcttccaaccactgacatgttgtttaataatctaagcggcagtcctggaggctaccagacttactgagttctacctgagaaacagccaagcaaagtgtgagagaagggttaagactggcttacaatgagatgcttcaaatgaaaagggaattatgagtaaaattgaactttgatgggggattcagttctggaaaagaatttggtattttccagtctgctaggaccaattaccttgaaatattttaaaatctcagtaaatagttattgctgaaatggctgttggcagttcttattatgattcagagaagagcaaatagaccttaacttcattttgaaaaagaccaaattaccatacccgagtgagtaatgacaggactacaactaaaacataaacaacattaatgatgaccataaaaagtcacaaaattgctaaatgttataatttagagttgacataaaaattgatggccaggcatggtggctcacgcctgtaatcccagaactatgtgaggctgaggcaggtggatcacttgaggtcaggagttcaacaccagcctggccaacatggtgaaaccctgtctctactaaaaatacaaaaattagccgggcatggtggtaggggcctgtaacccagctactcgtgaggccaaggcaggagaattgcttgagcctgcagcagctgcagtaagccaagatcatgctgtgcctcaaggaaaaaaaaaattaatgtttactgatatttgttgaagtcctacaacatcacctctgagaataggagaaatgaagcaacagttgtgtctagatgtcagaggcatggctgggcctccatctctgcctaagggagatataaaagagttcaaactattgcccatgttccccagggtcagaagttctaattatgatgatagaggctgggttgtaagtagtaagtgaagggtagcagaatatgccatctttggcataagaagtattttgagttgaagacaattgagaaaaaaaatagattaaaaacaaacaaacacctctgccctctccctatttgcctaaaagcaggatatgaaattgtgaaggtgtcttcttactcggggaagaacaaaagttagtcaccagagactttagactcttatcagcctggacatagcaccagagaagtcttttttttaaaaaaaaa

SEQ ID NO: 282647 - DNA, 3394 bp, Homo sapiens
gagttaacttcctgacccaggaagtggcagcaacagaggggactagcagcgaatatgtaagtgtctgagcagtgaaggttacggaaaaggtccaggctaaggttttctcagtggatatactttacaccaaatctcagaagattcagaacttagatgagtggggcccaggacaggaaccctggagccttggaaggaggggagccccatctccccagaagagcagtgaccccagcagagaggggcctggtgtatcactggaggaaatagcctgccaaggaatacacgtcttcagaagaaattctgtgtggcttcaagagactgatcaaattgtgagaggaaaacagcctacccgagccaatattggagcttttcaataaaagctatggcctcaaccaccagcaccaagaagatgatggaggaagccacctgctccatctgcctgagcctgatgacgaacccagtaagcatcaactgtggacacagctactgccacttgtgtataacagacttctttaaaaacccaagccaaaagcaactgaggcaggagacattctgctgtccccagtgtcgggctccatttcatatggatagcctccgacccaacaagcagctgggaagcctcattgaagccctcaaagagacggatcaagaaatgtcatgtgaggaacacggagagcagttccacctgttctgcgaagacgaggggcagctcatctgctggcgctgtgagcgggcaccacagcacaaagggcacaccacagctcttgttgaagacgtatgccagggctacaaggaaaagctccagaaagctgtgacaaaactgaagcaacttgaagacagatgtacggagcagaagctgtccacagcaatgcgaataactaaatggaaagagaaggtacagattcagagacaaaaaatccggtctgactttaagaatctccagtgtttcctacatgaggaagagaagtcttatctctggaggctggagaaagaagaacaacagactctgagtagactgagggactatgaggctggtctggggctgaagagcaatgaactcaagagccacatcctggaactggaggaaaaatgtcagggctcagcccagaaattgctgcagaatgtgaatgacactttgagcaggagttgggctgtgaagctggaaacatcagaggctgtctccttggaacttcatactatgtgcaatgtttccaagctttacttcgatgtgaagaaaatgttaaggagtcatcaagttagtgtgactctggatccagatacagctcatcacgaactaattctctctgaggatcggagacaagtgactcgtggatacacccaggagaatcaggacacatcttccaggagatttactgccttcccctgtgtcttgggttgtgaaggcttcacctcaggaagacgttactttgaagtggatgttggcgaaggaaccggatgggatttaggagtttgtatggaaaatgtgcagaggggcactggcatgaagcaagagcctcagtctggattctggaccctcaggctgtgcaaaaagaaaggctatgtagcacttacttctcccccaacttcccttcatctgcatgagcagcccctgcttgtgggaatttttctggactatgaggccggagttgtatccttttataacgggaatactggctgccacatctttactttcccgaaggcttccttctctgatactctccggccctatttccaggtttatcaatattctcctttgtttctgcctcccccaggtgactaaggaaaagagcagaagctccttggtttaaccagcacagagaaaataatataaatcccataagggcagacgtttggtctgttttcttcgctgtcatttccttagtagttagactagtgctgagattttagtggatatataattgatttatgttgaatatatggacttagcaactaaaaataccacagatggttaacctggactggggcaaagcaagataatagtgatgatcgtatgttgctgtctccatccgtctttaatgggtcagggctttgatttccaagggtcttcaggtgatgagtaggggtacccacaagtcagaaggtctgcgttctcctagtttgtttgctgccatttgaactcatgtagggaatgaaagaaagctgcaattatccgccaactgcatttaaaacaaaacaaaacagaaaaatcaaaataacattgactcttccaaccactgacatgttgtttaataatctaagcggcagtcctggaggctaccagacttactgagttctacctgagaaacagccaagcaaagtgtgagagaagggttaagactggcttacaatgagatgcttcaaatgaaaagggaattatgagtaaaattgaactttgatgggggattcagttctggaaaagaatttggtattttccagtctgctaggaccaattaccttgaaatattttaaaatctcagtaaatagttattgctgaaatggctgttggcagttcttattatgattcagagaagagcaaatagaccttaacttcattttgaaaaagaccaaattaccatacccgagtgagtaatgacaggactacaactaaaacataaacaacattaatgatgaccataaaaagtcacaaaattgctaaatgttataatttagagttgacataaaaattgatggccaggcatggtggctcacgcctgtaatcccagaactatgtgaggctgaggcaggtggatcacttgaggtcaggagttcaacaccagcctggccaacatggtgaaaccctgtctctactaaaaatacaaaaattagccgggcatggtggtaggggcctgtaacccagctactcgtgaggccaaggcaggagaattgcttgagcctgcagcagctgcagtaagccaagatcatgctgtgcctcaaggaaaaaaaaaattaatgtttactgatatttgttgaagtcctacaacatcacctctgagaataggagaaatgaagcaacagttgtgtctagatgtcagaggcatggctgggcctccatctctgcctaagggagatataaaagagttcaaactattgcccatgttccccagggtcagaagttctaattatgatgatagaggctgggttgtaagtagtaagtgaagggtagcagaatatgccatctttggcataagaagtattttgagttgaagacaattgagaaaaaaaatagattaaaaacaaacaaacacctctgccctctccctatttgcctaaaagcaggatatgaaattgtgaaggtgtcttcttactcggggaagaacaaaagttagtcaccagagactttagactcttatcagcctggacatagcaccagagaagtcttttttttaaaaaaaaa

SEQ ID NO: 282648 - DNA, 3444 bp, Homo sapiens
gagttaacttcctgacccaggaagtggcagcaacagaggggactagcagcgaatatactttacaccaaatctcagaagattcagaacttagatgagtggggcccaggacaggaaccctggagccttggaaggaggggagccccatctccccagaagagcagtgaccccagcagagaggggcctggtgtatcactggaggaaatagcctgccaaggaatacacgtcttcagaagaaattctgtgtggcttcaagagactgatcaaattgtgagaggaaaacagcctacccggtcctcttttcttcaatacaaaatgagataataggggttggaaggaaaaccttcaagacctatggaagtcagttgcagccagctcatcacatagaggtgcaggtgaggtgtattttcatcacggtggaaaattctggctgcttcatctccatctctagagccaatattggagcttttcaataaaagctatggcctcaaccaccagcaccaagaagatgatggaggaagccacctgctccatctgcctgagcctgatgacgaacccagtaagcatcaactgtggacacagctactgccacttgtgtataacagacttctttaaaaacccaagccaaaagcaactgaggcaggagacattctgctgtccccagtgtcgggctccatttcatatggatagcctccgacccaacaagcagctgggaagcctcattgaagccctcaaagagacggatcaagaaatgtcatgtgaggaacacggagagcagttccacctgttctgcgaagacgaggggcagctcatctgctggcgctgtgagcgggcaccacagcacaaagggcacaccacagctcttgttgaagacgtatgccagggctacaaggaaaagctccagaaagctgtgacaaaactgaagcaacttgaagacagatgtacggagcagaagctgtccacagcaatgcgaataactaaatggaaagagaaggtacagattcagagacaaaaaatccggtctgactttaagaatctccagtgtttcctacatgaggaagagaagtcttatctctggaggctggagaaagaagaacaacagactctgagtagactgagggactatgaggctggtctggggctgaagagcaatgaactcaagagccacatcctggaactggaggaaaaatgtcagggctcagcccagaaattgctgcagaatgtgaatgacactttgagcaggagttgggctgtgaagctggaaacatcagaggctgtctccttggaacttcatactatgtgcaatgtttccaagctttacttcgatgtgaagaaaatgttaaggagtcatcaagttagtgtgactctggatccagatacagctcatcacgaactaattctctctgaggatcggagacaagtgactcgtggatacacccaggagaatcaggacacatcttccaggagatttactgccttcccctgtgtcttgggttgtgaaggcttcacctcaggaagacgttactttgaagtggatgttggcgaaggaaccggatgggatttaggagtttgtatggaaaatgtgcagaggggcactggcatgaagcaagagcctcagtctggattctggaccctcaggctgtgcaaaaagaaaggctatgtagcacttacttctcccccaacttcccttcatctgcatgagcagcccctgcttgtgggaatactggctgccacatctttactttcccgaaggcttccttctctgatactctccggccctatttccaggtttatcaatattctcctttgtttctgcctcccccaggtgactaaggaaaagagcagaagctccttggtttaaccagcacagagaaaataatataaatcccataagggcagacgtttggtctgttttcttcgctgtcatttccttagtagttagactagtgctgagattttagtggatatataattgatttatgttgaatatatggacttagcaactaaaaataccacagatggttaacctggactggggcaaagcaagataatagtgatgatcgtatgttgctgtctccatccgtctttaatgggtcagggctttgatttccaagggtcttcaggtgatgagtaggggtacccacaagtcagaaggtctgcgttctcctagtttgtttgctgccatttgaactcatgtagggaatgaaagaaagctgcaattatccgccaactgcatttaaaacaaaacaaaacagaaaaatcaaaataacattgactcttccaaccactgacatgttgtttaataatctaagcggcagtcctggaggctaccagacttactgagttctacctgagaaacagccaagcaaagtgtgagagaagggttaagactggcttacaatgagatgcttcaaatgaaaagggaattatgagtaaaattgaactttgatgggggattcagttctggaaaagaatttggtattttccagtctgctaggaccaattaccttgaaatattttaaaatctcagtaaatagttattgctgaaatggctgttggcagttcttattatgattcagagaagagcaaatagaccttaacttcattttgaaaaagaccaaattaccatacccgagtgagtaatgacaggactacaactaaaacataaacaacattaatgatgaccataaaaagtcacaaaattgctaaatgttataatttagagttgacataaaaattgatggccaggcatggtggctcacgcctgtaatcccagaactatgtgaggctgaggcaggtggatcacttgaggtcaggagttcaacaccagcctggccaacatggtgaaaccctgtctctactaaaaatacaaaaattagccgggcatggtggtaggggcctgtaacccagctactcgtgaggccaaggcaggagaattgcttgagcctgcagcagctgcagtaagccaagatcatgctgtgcctcaaggaaaaaaaaaattaatgtttactgatatttgttgaagtcctacaacatcacctctgagaataggagaaatgaagcaacagttgtgtctagatgtcagaggcatggctgggcctccatctctgcctaagggagatataaaagagttcaaactattgcccatgttccccagggtcagaagttctaattatgatgatagaggctgggttgtaagtagtaagtgaagggtagcagaatatgccatctttggcataagaagtattttgagttgaagacaattgagaaaaaaaatagattaaaaacaaacaaacacctctgccctctccctatttgcctaaaagcaggatatgaaattgtgaaggtgtcttcttactcggggaagaacaaaagttagtcaccagagactttagactcttatcagcctggacatagcaccagagaagtcttttttttaaaaaaaaa

SEQ ID NO: 282649 - DNA, 3586 bp, Homo sapiens
gagttaacttcctgacccaggaagtggcagcaacagaggggactagcagcgaatatactttacaccaaatctcagaagattcagaacttagatgagtggggcccaggacaggaaccctggagccttggaaggaggggagccccatctccccagaagagcagtgaccccagcagagaggggcctggtgtatcactggaggaaatagcctgccaaggaatacacgtcttcagaagaaattctgtgtggcttcaagagactgatcaaattgtgagaggaaaacagcctacccggtcctcttttcttcaatacaaaatgagataataggggttggaaggaaaaccttcaagacctatggaagtcagttgcagccagctcatcacatagaggtgcaggtgaggtgtattttcatcacggtggaaaattctggctgcttcatctccatctctagagccaatattggagcttttcaataaaagctatggcctcaaccaccagcaccaagaagatgatggaggaagccacctgctccatctgcctgagcctgatgacgaacccagtaagcatcaactgtggacacagctactgccacttgtgtataacagacttctttaaaaacccaagccaaaagcaactgaggcaggagacattctgctgtccccagtgtcgggctccatttcatatggatagcctccgacccaacaagcagctgggaagcctcattgaagccctcaaagagacggatcaagaaatgtcatgtgaggaacacggagagcagttccacctgttctgcgaagacgaggggcagctcatctgctggcgctgtgagcgggcaccacagcacaaagggcacaccacagctcttgttgaagacgtatgccagggctacaaggaaaagctccagaaagctgtgacaaaactgaagcaacttgaagacagatgtacggagcagaagctgtccacagcaatgcgaataactaaatggaaagagaaggtacagattcagagacaaaaaatccggtctgactttaagaatctccagtgtttcctacatgaggaagagaagtcttatctctggaggctggagaaagaagaacaacagactctgagtagactgagggactatgaggctggtctggggctgaagagcaatgaactcaagagccacatcctggaactggaggaaaaatgtcagggctcagcccagaaattgctgcagaatgtgaatgacactttgagcaggtaagtcctgtttgaatgcaggaggggaggggtgtgcgtatatagaaatgaatggaatgcacctctgaagaaatctctcgcctctgcttattctaggagttgggctgtgaagctggaaacatcagaggctgtctccttggaacttcatactatgtgcaatgtttccaagctttacttcgatgtgaagaaaatgttaaggagtcatcaagttagtgtgactctggatccagatacagctcatcacgaactaattctctctgaggatcggagacaagtgactcgtggatacacccaggagaatcaggacacatcttccaggagatttactgccttcccctgtgtcttgggttgtgaaggcttcacctcaggaagacgttactttgaagtggatgttggcgaaggaaccggatgggatttaggagtttgtatggaaaatgtgcagaggggcactggcatgaagcaagagcctcagtctggattctggaccctcaggctgtgcaaaaagaaaggctatgtagcacttacttctcccccaacttcccttcatctgcatgagcagcccctgcttgtgggaatttttctggactatgaggccggagttgtatccttttataacgggaatactggctgccacatctttactttcccgaaggcttccttctctgatactctccggccctatttccaggtttatcaatattctcctttgtttctgcctcccccaggtgactaaggaaaagagcagaagctccttggtttaaccagcacagagaaaataatataaatcccataagggcagacgtttggtctgttttcttcgctgtcatttccttagtagttagactagtgctgagattttagtggatatataattgatttatgttgaatatatggacttagcaactaaaaataccacagatggttaacctggactggggcaaagcaagataatagtgatgatcgtatgttgctgtctccatccgtctttaatgggtcagggctttgatttccaagggtcttcaggtgatgagtaggggtacccacaagtcagaaggtctgcgttctcctagtttgtttgctgccatttgaactcatgtagggaatgaaagaaagctgcaattatccgccaactgcatttaaaacaaaacaaaacagaaaaatcaaaataacattgactcttccaaccactgacatgttgtttaataatctaagcggcagtcctggaggctaccagacttactgagttctacctgagaaacagccaagcaaagtgtgagagaagggttaagactggcttacaatgagatgcttcaaatgaaaagggaattatgagtaaaattgaactttgatgggggattcagttctggaaaagaatttggtattttccagtctgctaggaccaattaccttgaaatattttaaaatctcagtaaatagttattgctgaaatggctgttggcagttcttattatgattcagagaagagcaaatagaccttaacttcattttgaaaaagaccaaattaccatacccgagtgagtaatgacaggactacaactaaaacataaacaacattaatgatgaccataaaaagtcacaaaattgctaaatgttataatttagagttgacataaaaattgatggccaggcatggtggctcacgcctgtaatcccagaactatgtgaggctgaggcaggtggatcacttgaggtcaggagttcaacaccagcctggccaacatggtgaaaccctgtctctactaaaaatacaaaaattagccgggcatggtggtaggggcctgtaacccagctactcgtgaggccaaggcaggagaattgcttgagcctgcagcagctgcagtaagccaagatcatgctgtgcctcaaggaaaaaaaaaattaatgtttactgatatttgttgaagtcctacaacatcacctctgagaataggagaaatgaagcaacagttgtgtctagatgtcagaggcatggctgggcctccatctctgcctaagggagatataaaagagttcaaactattgcccatgttccccagggtcagaagttctaattatgatgatagaggctgggttgtaagtagtaagtgaagggtagcagaatatgccatctttggcataagaagtattttgagttgaagacaattgagaaaaaaaatagattaaaaacaaacaaacacctctgccctctccctatttgcctaaaagcaggatatgaaattgtgaaggtgtcttcttactcggggaagaacaaaagttagtcaccagagactttagactcttatcagcctggacatagcaccagagaagtcttttttttaaaaaaaaa

SEQ ID NO: 282650 - DNA, 2590 bp, Homo sapiens
gagttaacttcctgacccaggaagtggcagcaacagaggggactagcagcgaatatactttacaccaaatctcagaagattcagaacttagatgagtggggcccaggacaggaaccctggagccttggaaggaggggagccccatctccccagaagagcagtgaccccagcagagaggggcctggtgtatcactggaggaaatagcctgccaaggaatacacgtcttcagaagaaattctgtgtggcttcaagagactgatcaaattgtgagaggaaaacagcctacccggtcctcttttcttcaatacaaaatgagataataggggttggaaggaaaaccttcaagacctatggaagtcagttgcagccagctcatcacatagaggtgcaggtgaggtgtattttcatcacggtggaaaattctggctgcttcatctccatctctagagccaatattggagcttttcaataaaagctatggcctcaaccaccagcaccaagaagatgatggaggaagccacctgctccatctgcctgagcctgatgacgaacccagtaagcatcaactgtggacacagctactgccacttgtgtataacagacttctttaaaaacccaagccaaaagcaactgaggcaggagacattctgctgtccccagtgtcgggctccatttcatatggatagcctccgacccaacaagcagctgggaagcctcattgaagccctcaaagagacggatcaagaaatgtcatgtgaggaacacggagagcagttccacctgttctgcgaagacgaggggcagctcatctgctggcgctgtgagcgggcaccacagcacaaagggcacaccacagctcttgttgaagacgtatgccagggctacaaggaaaagctccagaaagctgtgacaaaactgaagcaacttgaagacagatgtacggagcagaagctgtccacagcaatgcgaataactaaatggaaagagaaggtacagattcagagacaaaaaatccggtctgactttaagaatctccagtgtttcctacatgaggaagagaagtcttatctctggaggctggagaaagaagaacaacagactctgagtagactgagggactatgaggctggtctggggctgaagagcaatgaactcaagagccacatcctggaactggaggaaaaatgtcagggctcagcccagaaattgctgcagaatgtgaatgacactttgagcaggagttgggctgtgaagctggaaacatcagaggctgtctccttggaacttcatactatgtgcaatgtttccaagctttacttcgatgtgaagaaaatgttaaggagtcatcaagttagtgtgactctggatccagatacagctcatcacgaactaattctctctgaggatcggagacaagtgactcgtggatacacccaggagaatcaggacacatcttccaggagatttactgccttcccctgtgtcttgggttgtgaaggcttcacctcaggaagacgttactttgaagtggatgttggcgaaggaaccggatgggatttaggagtttgtatggaaaatgtgcagaggggcactggcatgaagcaagagcctcagtctggattctggaccctcaggctgtgcaaaaagaaaggctatgtagcacttacttctcccccaacttcccttcatctgcatgagcagcccctgcttgtgggaatttttctggactatgaggccggagttgtatccttttataacgggaatactggctgccacatctttactttcccgaaggcttccttctctgatactctccggccctatttccaggtttatcaatattctcctttgtttctgcctcccccaggtgactaaggaaaagagcagaagctccttggtttaaccagcacagagaaaataatataaatcccataagggcagacgtttggtctgttttcttcgctgtcatttccttagtagttagactagtgctgagattttagtggatatataattgatttatgttgaatatatggacttagcaactaaaaataccacagatggttaacctggactggggcaaagcaagataatagtgatgatcgtatgttgctgtctccatccgtctttaatgggtcagggctttgatttccaagggtcttcaggtgatgagtaggggtacccacaagtcagaaggtctgcgttctcctagtttgtttgctgccatttgaactcatgtagggaatgaaagaaagctgcaattatccgccaactgcatttaaaacaaaacaaaacagaaaaatcaaaataacattgactcttccaaccactgacatgttgtttaataatctaagcggcagtcctggaggctaccagacttactgagttctacctgagaaacagccaagcaaagtgtgagagaagggttaagactggcttacaatgagatgcttcaaatgaaaagggaattatgagtaaaattgaactttgatgggggattcagttctggaaaagaatttggtattttccagtctgctaggaccaattaccttgaaatattttaaaatctcagtaaatagttattgctga

SEQ ID NO: 282651 - DNA, 1941 bp, Homo sapiens
gagttaacttcctgacccaggaagtggcagcaacagaggggactagcagcgaatatactttacaccaaatctcagaagattcagaacttagatgagtggggcccaggacaggaaccctggagccttggaaggaggggagccccatctccccagaagagcagtgaccccagcagagaggggcctggtgtatcactggaggaaatagcctgccaaggaatacacgtcttcagaagaaattctgtgtggcttcaagagactgatcaaattgtgagaggaaaacagcctacccggtcctcttttcttcaatacaaaatgagataataggggttggaaggaaaaccttcaagacctatggaagtcagttgcagccagctcatcacatagaggtgcaggtgaggtgtattttcatcacggtggaaaattctggctgcttcatctccatctctagagccaatattggagcttttcaataaaagctatggcctcaaccaccagcaccaagaagatgatggaggaagccacctgctccatctgcctgagcctgatgacgaacccagtaagcatcaactgtggacacagctactgccacttgtgtataacagacttctttaaaaacccaagccaaaagcaactgaggcaggagacattctgctgtccccagtgtcgggctccatttcatatggatagcctccgacccaacaagcagctgggaagcctcattgaagccctcaaagagacggatcaagaaatgtcatgtgaggaacacggagagcagttccacctgttctgcgaagacgaggggcagctcatctgctggcgctgtgagcgggcaccacagcacaaagggcacaccacagctcttgttgaagacgtatgccagggctacaaggaaaagctccagaaagctgtgacaaaactgaagcaacttgaagacagatgtacggagcagaagctgtccacagcaatgcgaataactaaatggaaagagaaggtacagattcagagacaaaaaatccggtctgactttaagaatctccagtgtttcctacatgaggaagagaagtcttatctctggaggctggagaaagaagaacaacagactctgagtagactgagggactatgaggctggtctggggctgaagagcaatgaactcaagagccacatcctggaactggaggaaaaatgtcagggctcagcccagaaattgctgcagaatgtgaatgacactttgagcaggagttgggctgtgaagctggaaacatcagaggctgtctccttggaacttcatactatgtgcaatgtttccaagctttacttcgatgtgaagaaaatgttaaggagtcatcaagttagtgtgactctggatccagatacagctcatcacgaactaattctctctgaggatcggagacaagtgactcgtggatacacccaggagaatcaggacacatcttccaggagatttactgccttcccctgtgtcttgggttgtgaaggcttcacctcaggaagacgttactttgaagtggatgttggcgaaggaaccggatgggatttaggagtttgtatggaaaatgtgcagaggggcactggcatgaagcaagagcctcagtctggattctggaccctcaggctgtgcaaaaagaaaggctatgtagcacttacttctcccccaacttcccttcatctgcatgagcagcccctgcttgtgggaatttttctggactatgaggccggagttgtatccttttataacgggaatactggctgccacatctttactttcccgaaggcttccttctctgatactctccggccctatttccaggtttatcaatattctcctttgtttctgcctcccccaggtgactaaggaaaagagcagaagctccttggtttaaccagcacagagaaaataatataaatcccataagggca

SEQ ID NO: 282652 - DNA, 1698 bp, Homo sapiens
gagttaacttcctgacccaggaagtggcagcaacagaggggactagcagcgaatatactttacaccaaatctcagaagattcagaacttagatgagtggggcccaggacaggaaccctggagccttggaaggaggggagccccatctccccagaagagcagtgaccccagcagagaggggcctggtgtatcactggaggaaatagcctgccaaggaatacacgtcttcagaagaaattctgtgtggcttcaagagactgatcaaattgtgagaggaaaacagcctacccggtcctcttttcttcaatacaaaatgagataataggggttggaaggaaaaccttcaagacctatggaagtcagttgcagccagctcatcacatagaggtgcaggtgaggtgtattttcatcacggtggaaaattctggctgcttcatctccatctctagagccaatattggagcttttcaataaaagctatggcctcaaccaccagcaccaagaagatgatggaggaagccacctgctccatctgcctgagcctgatgacgaacccagtaagcatcaactgtggacacagctactgccacttgtgtataacagacttctttaaaaacccaagccaaaagcaactgaggcaggagacattctgctgtccccagtgtcgggctccatttcatatggatagcctccgacccaacaagcagctgggaagcctcattgaagccctcaaagagacggatcaagaaatgtcatgtgaggaacacggagagcagttccacctgttctgcgaagacgaggggcagctcatctgctggcgctgtgagcgggcaccacagcacaaagggcacaccacagctcttgttgaagacgtatgccagggctacaaggaaaagctccagaaagctgtgacaaaactgaagcaacttgaagacagatgtacggagcagaagctgtccacagcaatgcgaataactaaatggaaagagaaggtacagattcagagacaaaaaatccggtctgactttaagaatctccagtgtttcctacatgaggaagagaagtcttatctctggaggctggagaaagaagaacaacagactctgagtagactgagggactatgaggctggtctggggctgaagagcaatgaactcaagagccacatcctggaactggaggaaaaatgtcagggctcagcccagaaattgctgcagaatgtgaatgacactttgagcaggagttgggctgtgaagctggaaacatcagaggctgtctccttggaacttcatactatgtgcaatgtttccaagctttacttcgatgtgaagaaaatgttaaggagtcatcaaggtatgttcactaaagaattcctgaatactgtggatagaaggggccttatgcagtaaccaagtttaccacctgtcccttggcaggctcacagccagagaggttgtttagttaatttcagtagagctttcatactttctctagttagtatgattcactgctcagtgaatgtgatgagcattgcattctggttatctgtgcaaacctttcaaattcttattctttcacttattagccatgttactccaagtgacttggtttccccctctgaaaaatgaaaatattaacagctcctacttcattgagttatcatcaaaattaaatgcatcaacatgtacaaagtgcttag

SEQ ID NO: 282653 - DNA, 1854 bp, Homo sapiens
gcgggcgggctgctgaggtggctgtcgccggccccgatggacgctcccccgggcggggttgagtcggcgctcagctgcttctctttcaaccaggactgcacatccctagcaattggaactaaagccgggtataagctgttttctctgagttctgtggagcagctggatcaagtccacggaagcaatgaaatcccggacgtctacatcgtggagcgcctcttctccagcagcctggtggtggtagtcagtcacacaaaaccacggcagatgaacgtgtatcacttcaagaaaggcacagagatctgtaattacagctactccagcaacatcttgtccataaggctgaaccggcaaaggctgctggtttgcctagaagagtccatttatattcacaacattaaagacatgaagctgttgaagaccctcctggatattcctgcaaacccaacaggtctatgtgctctctctatcaaccattccaattcttacctggcctatcctggaagcctgacttcaggggagattgtgctttatgatggaaactccctgaaaacagtctgcactattgctgcccatgagggaacactagctgccatcaccttcaatgcctcaggctccaaactagcaagtgcgtctgaaaaaggcacagtcatccgggtgttctctgtccctgatgggcaaaagctctatgagttccggagagggatgaaaaggtatgtgacaatcagctctctagtgttcagtatggattcacaattcctctgcgcctccagtaacaccgagacggtacacatcttcaagctggaacaggtcaccaacagtcgaccagaagagccttcgacctggagtggctacatgggaaagatgtttatggctgctaccaactacctccctacccaggtgtcagacatgatgcatcaggacagggcttttgccactgcacgcttgaacttctccggacagaggaacatctgtaccctctcaacgatccagaagttgccacggctgctagttgcgtcatccagtggacacctttatatgtacaatttggatcctcaggatggaggagagtgtgtcttaatcaaaacccacagcttgcttggctcaggaacaacagaagagaataaagaaaatgacctcagaccttccttacctcagtcttatgcagcgaccgtagccagaccaagtgcatcttcagcctccacggtgccaggttattctgaggacggcggggcgctgcgaggagaagttattcctgaacatgagtttgcgacgggaccagtgtgtcttgatgatgagaatgagtttcctcctataatcttgtgccgtggaaatcagaagggcaaaacgaagcagtcatgatgagaagcacacctcagaaatcaggacatcccccctatcaggtggttttggagaaaacaaggaaggcggaagaatggagtgcaattgtgtgagcagaaaggggggcaggaatcccgggtgctccactgcttaaaccacaggacctggttaactcctcaccaagcttcccacgaccctggttgccaatgggcgcgggagacattgtatacacatcatgctatttaaaatacgttcaaactatagtgtaaatgctaattaaccatattggtatataaccggaattttatattaaaaggggcctcctttttaaatatatgccgtgtaaaaaatgtacttataggaacatctctttgaattgtatttcttgtatattacatacttagagagagactcttttagccaggcaaagtcttttttggctgtggctggaataaatcatttattacttgggagtcccattttggacactaataataaaatcatggcaatgca

SEQ ID NO: 282654 - DNA, 1061 bp, Homo sapiens
ttttaagaagtttaaaggagtttattcaaaagttgaacatttttaaaatttcacaaaactaaccagcaaagacagtaagccaatcctccatttaccccctttctgtcttggttaagggcagagacacatgtcagagggagactgcgtcccatgtagggagctaatgtgttcactagctattgcttctcgcagggtcgcagcatctacactcacttgcctcatccacactgtcacgttcaaagacaagaaataatcctgaaagtagatcccaaggccagaatgcaaaggaatagccagaagcccagaccagatcagtgggctaagggtttgtcaaaggcagaatctggtgacagctagggtgaggggggctttgtcattggaagcgaatccatcgcccatcttcgttgtcatcacggtttatgttttccttggcccttaggatccagaagttgccacggctgctagttgcgtcatccagtggacacctttatatgtacaatttggatcctcaggatggaggagagtgtgtcttaatcaaaacccacaggtgaagagactgcttttcaaaagacagcctttcgagagctggtcgtgtagagttgtcccttcgccaagaacgacaagcttcagtgcccttgcattgatttgttcttcactggcagtctcagtggcaaacctctagtgggcaagtgctctgcaccgggctctgtgtcaggtgccctcagcatgtggtaatcatctggaaaagtgccaggattaataacacacaagatggtctccccctcagcctatgctcctaacacagccctgagctcacagtgggtgttcaaaaatattccctgccaccaggtgtggcggctcacacctgtaatcccggcactttgggaggccgaagcgggtggatggcttgagtccaggtgttcaagaccagcctgggcaacatggtgaaaccccatctataccaaaaacaaatacaaaaattagccggttgtggtggcacacacctgtagtcccagctactcaggaggctgaggtgggagaatcacctgagcctggagagg

SEQ ID NO: 282655 - DNA, 592 bp, Homo sapiens
ctacttaaaaaatagaaaaattagctgggcatgttggcacacacctgcaatcccagccactccggaggctgagacaggagaattgcctgaaccagagaggcggagattgcagtgagctgagaccataccactgcactccagcctgggtgaaagagtgagactctgtttcaaaaaataaaaactaaactaaaatttccaaagagcctgtagtcctagccactcaggaagttaaattgaggcagaaggatcccttaggctcaggagttcgagaccagcctgggcaacatactgagaccctacctcaacaaagaaaaattcaaagaggtaggatgcctcaggcatctgaagtggaaaggcaggtcaggcttaaagatggcagatggtgaggattatgacttgtcctaggcacagtacctccagggggaagacagacagcccctttgcttcctttgccctttatttgagcccccgctccccacccgccaggtcatggcataaaagcagatccccagtgcttgtttcatgtctctttcttggtttccaggttattctgaggacggcggggctcaaaaaaagggcgccgctagccgaa

SEQ ID NO: 282656 - DNA, 747 bp, Homo sapiens
  misc_feature (708)..(708): n is a, c, g, or t
  misc_feature (710)..(711): n is a, c, g, or t
  misc_feature (716)..(716): n is a, c, g, or t
gctttcttcagtccgaggtcgcgccgcctctccttgctgcagacgtggagtcttccagtttcgccttggtgcctgtcttcgccccacctggagcatcctccagatgctctcgtgccaggctgcttggtgcgagactctcctgttgccactctacgtgcccacgcacctctggtgtctcacacgccactgtctagctcgcgtgggctgaccctggggctggagctggacagggcccgtgctttccagcttagtgggctggcgatggctcggtagactactgggtaaatctccgccccggtctccgtgcccctccgtggtgtccctgatgaggtcctgtgtgggtgatgccctggaaggagctgggctttcctagttggggggatagcccgcatgtcgaggtgatggcttcatctgtactggatgatctgtgcgagtccgattagatatatctcctccctctgtagaccattccaattcttacctggcctatcctggaagcctgacttcaggggagattgtgctttatgatggaaactccctgaaaacagtctgcactattgctgcccatgagggaacactagctgccatcaccttcaatgcctcaggctccaaactagcaagtgcgtctgaaaaaggcacagtcatccgggtgttctctgtccctgatgggcaaaagctctatgagttccggagagggatgaaaagacnanncagcnctctaactgctggcagatagggaatcacaat

SEQ ID NO: 282657 - DNA, 309 bp, Homo sapiens
cggacgcgtgggttaaaaggggcctcctttttaatataaaattccggttatataccaatatggttaattagcatttacatattggtatataaccggaattttatattaaaaggggcctcctttttaaatatatgccgtgtaaaaaatgtacttataggaacatctctttgaattgtatttcttgtatattacatacttagagagagactcttttagccaggcaaagtcttttttggctgtggctggaataaatcatttattacttgggagtcccattttggacactaataataaaatcatggcaatgca

SEQ ID NO: 282658 - DNA, 705 bp, Homo sapiens
tcagataagccttctttaataggggaaagcagtagcattgggaaccttttaacagctttacaatggctcttctgaagaacaaacaagcccttgatgctctttagttattgccagaataatacgtcctggattgttctcagtgggcagaacattatgctaaggcacagtctctccctgctgcggggagtgtggctaatgacgcttgggtgtggagattcctgggtgcgtgtggggcctgcagcccagtcccatcgtcaagaacgacaagcttcagtgcccttgcattgatttgttcttcactggcagtctcagtggcaaacctctagtgggcaagtgctctgcaccgggctctgtgtcaggtgccctcagcatgtggtaatcatctggaaaagtgccaggattaataacacacaagatggtctccccctcagcctatgctcctaacacagccctgagctcacagtgggtgttcaaaaatattccctgccaccaggtgtggcggctcacacctgtaatcccggcactttgggaggccgaagcgggtggatggcttgagtccaggtgttcaagaccagcctgggcaacatggtgaaaccccatctataccaaaaacaaatacaaaaattagccggttgtggtggcacacacctgtagtcccagctactcaggaggctgaggtgggagaatcacctgagcctggagagg

SEQ ID NO: 282659 - DNA, 1925 bp, Homo sapiens
gaccggcgacccggcccgtggagccggcgcgggcgggctgctgaggtggctgtcgccggctccgagctgcggcttcccgggccgagcccccgatggaggccgaggccgcggacgctcccccgggcggggttgagtcggcgctcagctgcttctctttcaaccaggactgcacatccctagcaattggaactaaagccgggtataagctgttttctctgagttctgtggagcagctggatcaagtccacggaagcaatgaaatcccggacgtctacatcgtggagcgcctcttctccagcagcctggtggtggtagtcagtcacacaaaaccacggcagatgaacgtgtatcacttcaagaaaggcacagagatctgtaattacagctactccagcaacatcttgtccataaggctgaaccggcaaaggctgctggtttgcctagaagagtccatttatattcacaacattaaagacatgaagctgttgaagaccctcctggatattcctgcaaacccaacaggtctatgtgctctctctatcaaccattccaattcttacctggcctatcctggaagcctgacttcaggggagattgtgctttatgatggaaactccctgaaaacagtctgcactattgctgcccatgagggaacactagctgccatcaccttcaatgcctcaggctccaaactagcaagtgcgtctgaaaaaggcacagtcatccgggtgttctctgtccctgatgggcaaaagctctatgagttccggagagggatgaaaaggtatgtgacaatcagctctctagtgttcagtatggattcacaattcctctgcgcctccagtaacaccgagacggtacacatcttcaagctggaacaggtcaccaacagtcgaccagaagagccttcgacctggagtggctacatgggaaagatgtttatggctgctaccaactacctccctacccaggtgtcagacatgatgcatcaggacagggcttttgccactgcacgcttgaacttctccggacagaggaacatctgtaccctctcaacgatccagaagttgccacggctgctagttgcgtcatccagtggacacctttatatgtacaatttggatcctcaggatggaggagagtgtgtcttaatcaaaacccacagcttgcttggctcaggaacaacagaagagaataaagaaaatgacctcagaccttccttacctcagtcttatgcagcgaccgtagccagaccaagtgcatcttcagcctccacggtgccaggttattctgaggacggcggggcgctgcgaggagaagttattcctgaacatgagtttgcgacgggaccagtgtgtcttgatgatgagaatgagtttcctcctataatcttgtgccgtggaaatcagaagggcaaaacgaagcagtcatgatgagaagcacacctcagaaatcaggacatcccccctatcaggtggttttggagaaaacaaggaaggcggaagaatggagtgcaattgtgtgagcagaaaggggggcaggaatcccgggtgctccactgcttaaaccacaggacctggttaactcctcaccaagcttcccacgaccctggttgccaatgggcgcgggagacattgtatacacatcatgctatttaaaatacgttcaaactatagtgtaaatgctaattaaccatattggtatataaccggaattttatattaaaaggggcctcctttttaaatatatgccgtgtaaaaaatgtacttataggaacatctctttgaattgtatttcttgtatattacatacttagagagagactcttttagccaggcaaagtcttttttggctgtggctggaataaatcatttattacttgggagtcccattttggacactaataataaaatcatggcaatgca

SEQ ID NO: 282660 - DNA, 1854 bp, Homo sapiens
gaccggcgacccggcccgtggagccggcgcgggcgggctgctgaggtggctgtcgccggctccgagctgcggcttcccgggccgagcccccgatggaggccgaggccgcggacgctcccccgggcggggttgagtcggcgctcagctgcttctctttcaaccaggactgcacatccctagcaattggaactaaagccgggtataagctgttttctctgagttctgtggagcagctggatcaagtccacggaagcaatgaaatcccggacgtctacatcgtggagcgcctcttctccagcagcctggtggtggtagtcagtcacacaaaaccacggcagatgaacgtgtatcacttcaagaaaggcacagagatctgtaattacagctactccagcaacatcttgtccataaggctgaaccggcaaaggctgctggtttgcctagaagagtccatttatattcacaacattaaagacatgaagctgttgaagaccctcctggatattcctgcaaacccaacaggtctatgtgctctctctatcaaccattccaattcttacctggcctatcctggaagcctgacttcaggggagattgtgctttatgatggaaactccctgaaaacagtctgcactattgctgcccatgagggaacactagctgccatcaccttcaatgcctcaggctccaaactagcaagtgcgtctgaaaaagtatgtgacaatcagctctctagtgttcagtatggattcacaattcctctgcgcctccagtaacaccgagacggtacacatcttcaagctggaacaggtcaccaacagtcgaccagaagagccttcgacctggagtggctacatgggaaagatgtttatggctgctaccaactacctccctacccaggtgtcagacatgatgcatcaggacagggcttttgccactgcacgcttgaacttctccggacagaggaacatctgtaccctctcaacgatccagaagttgccacggctgctagttgcgtcatccagtggacacctttatatgtacaatttggatcctcaggatggaggagagtgtgtcttaatcaaaacccacagcttgcttggctcaggaacaacagaagagaataaagaaaatgacctcagaccttccttacctcagtcttatgcagcgaccgtagccagaccaagtgcatcttcagcctccacggtgccaggttattctgaggacggcggggcgctgcgaggagaagttattcctgaacatgagtttgcgacgggaccagtgtgtcttgatgatgagaatgagtttcctcctataatcttgtgccgtggaaatcagaagggcaaaacgaagcagtcatgatgagaagcacacctcagaaatcaggacatcccccctatcaggtggttttggagaaaacaaggaaggcggaagaatggagtgcaattgtgtgagcagaaaggggggcaggaatcccgggtgctccactgcttaaaccacaggacctggttaactcctcaccaagcttcccacgaccctggttgccaatgggcgcgggagacattgtatacacatcatgctatttaaaatacgttcaaactatagtgtaaatgctaattaaccatattggtatataaccggaattttatattaaaaggggcctcctttttaaatatatgccgtgtaaaaaatgtacttataggaacatctctttgaattgtatttcttgtatattacatacttagagagagactcttttagccaggcaaagtcttttttggctgtggctggaataaatcatttattacttgggagtcccattttggacactaataataaaatcatggcaatgca

SEQ ID NO: 282661 - DNA, 1636 bp, Homo sapiens
cacgaaccaagatctaacagttctcggaaccaagatctaacgtcggaaccaagatgagcatcggttcattggaaccaatatctaagagttctcccttcctttacatttcttctccgacaagaatgatttgaaacagaggctgctggtttgcctagaagagtccatttatattcacaacattaaagacatgaagctgttgaagaccctcctggatattcctgcaaacccaacaggtctatgtgctctctctatcaaccattccaattcttacctggcctatcctggaagcctgacttcaggggagattgtgctttatgatggaaactccctgaaaacagtctgcactattgctgcccatgagggaacactagctgccatcaccttcaatgcctcaggctccaaactagcaagtgcgtctgaaaaaggcacagtcatccgggtgttctctgtccctgatgggcaaaagctctatgagttccggagagggatgaaaaggtatgtgacaatcagctctctagtgttcagtatggattcacaattcctctgcgcctccagtaacaccgagacggtacacatcttcaagctggaacaggtcaccaacagtcgaccagaagagccttcgacctggagtggctacatgggaaagatgtttatggctgctaccaactacctccctacccaggtgtcagacatgatgcatcaggacagggcttttgccactgcacgcttgaacttctccggacagaggaacatctgtaccctctcaacgatccagaagttgccacggctgctagttgcgtcatccagtggacacctttatatgtacaatttggatcctcaggatggaggagagtgtgtcttaatcaaaacccacagcttgcttggctcaggaacaacagaagagaataaagaaaatgacctcagaccttccttacctcagtcttatgcagcgaccgtagccagaccaagtgcatcttcagcctccacggtgccaggttattctgaggacggcggggcgctgcgaggagaagttattcctgaacatgagtttgcgacgggaccagtgtgtcttgatgatgagaatgagtttcctcctataatcttgtgccgtggaaatcagaagggcaaaacgaagcagtcatgatgagaagcacacctcagaaatcaggacatcccccctatcaggtggttttggagaaaacaaggaaggcggaagaatggagtgcaattgtgtgagcagaaaggggggcaggaatcccgggtgctccactgcttaaaccacaggacctggttaactcctcaccaagcttcccacgaccctggttgccaatgggcgcgggagacattgtatacacatcatgctatttaaaatacgttcaaactatagtgtaaatgctaattaaccatattggtatataaccggaattttatattaaaaggggcctcctttttaaatatatgccgtgtaaaaaatgtacttataggaacatctctttgaattgtatttcttgtatattacatacttagagagagactcttttagccaggcaaagtcttttttggctgtggctggaataaatcatttattacttgggagtcccattttggacactaataataaaatcatggcaatgca

SEQ ID NO: 282662 - DNA, 1554 bp, Homo sapiens
aaggcgagctcagggaggacaggtaagaatggaatggttgatagagagagcaataggctgctggtttgcctagaagagtccatttatattcacaacattaaagacatgaagctgttgaagaccctcctggatattcctgcaaacccaacaggtctatgtgctctctctatcaaccattccaattcttacctggcctatcctggaagcctgacttcaggggagattgtgctttatgatggaaactccctgaaaacagtctgcactattgctgcccatgagggaacactagctgccatcaccttcaatgcctcaggctccaaactagcaagtgcgtctgaaaaaggcacagtcatccgggtgttctctgtccctgatgggcaaaagctctatgagttccggagagggatgaaaaggtatgtgacaatcagctctctagtgttcagtatggattcacaattcctctgcgcctccagtaacaccgagacggtacacatcttcaagctggaacaggtcaccaacagtcgaccagaagagccttcgacctggagtggctacatgggaaagatgtttatggctgctaccaactacctccctacccaggtgtcagacatgatgcatcaggacagggcttttgccactgcacgcttgaacttctccggacagaggaacatctgtaccctctcaacgatccagaagttgccacggctgctagttgcgtcatccagtggacacctttatatgtacaatttggatcctcaggatggaggagagtgtgtcttaatcaaaacccacagcttgcttggctcaggaacaacagaagagaataaagaaaatgacctcagaccttccttacctcagtcttatgcagcgaccgtagccagaccaagtgcatcttcagcctccacggtgccaggttattctgaggacggcggggcgctgcgaggagaagttattcctgaacatgagtttgcgacgggaccagtgtgtcttgatgatgagaatgagtttcctcctataatcttgtgccgtggaaatcagaagggcaaaacgaagcagtcatgatgagaagcacacctcagaaatcaggacatcccccctatcaggtggttttggagaaaacaaggaaggcggaagaatggagtgcaattgtgtgagcagaaaggggggcaggaatcccgggtgctccactgcttaaaccacaggacctggttaactcctcaccaagcttcccacgaccctggttgccaatgggcgcgggagacattgtatacacatcatgctatttaaaatacgttcaaactatagtgtaaatgctaattaaccatattggtatataaccggaattttatattaaaaggggcctcctttttaaatatatgccgtgtaaaaaatgtacttataggaacatctctttgaattgtatttcttgtatattacatacttagagagagactcttttagccaggcaaagtcttttttggctgtggctggaataaatcatttattacttgggagtcccattttggacactaataataaaatcatggcaatgca

SEQ ID NO: 282663 - DNA, 932 bp, Homo sapiens
gagattgcgccactgcactccagcctgggcaatagagcaagaccctgcctcaaaaataaataaataacccacagagctgagcacaggcttcttcatgcttttcctttggaaggtgtcctagatatatgatgatttcttttttctttcacctcctcttgattgtcacaagtagcttgcttggctcaggaacaacagaagagaataaagaaaatgacctcagaccttccttacctcagtcttatgcagcgaccgtagccagaccaagtgcatcttcagcctccacggtgccaggttattctgaggacggcggggcgctgcgaggagaagttattcctgaacatgagtttgcgacgggaccagtgtgtcttgatgatgagaatgagtttcctcctataatcttgtgccgtggaaatcagaagggcaaaacgaagcagtcatgatgagaagcacacctcagaaatcaggacatcccccctatcaggtggttttggagaaaacaaggaaggcggaagaatggagtgcaattgtgtgagcagaaaggggggcaggaatcccgggtgctccactgcttaaaccacaggacctggttaactcctcaccaagcttcccacgaccctggttgccaatgggcgcgggagacattgtatacacatcatgctatttaaaatacgttcaaactatagtgtaaatgctaattaaccatattggtatataaccggaattttatattaaaaggggcctcctttttaaatatatgccgtgtaaaaaatgtacttataggaacatctctttgaattgtatttcttgtatattacatacttagagagagactcttttagccaggcaaagtcttttttggctgtggctggaataaatcatttattacttgggagtcccattttggacactaataataaaatcatggcaatgca

SEQ ID NO: 282664 - DNA, 1052 bp, Homo sapiens
ttatggagtcttgctccatcacccaggctctgtttcaaaaaataaaaactaaactaaaatttccaaagagcctgtagtcctagccactcaggaagttaaattgaggcagaaggatcccttaggctcaggagttcgagaccagcctgggcaacatactgagaccctacctcaacaaagaaaaattcaaagaggtaggatgcctcaggcatctgaagtggaaaggcaggtcaggcttaaagatggcagatggtgaggattatgacttgtcctaggcacagtacctccagggggaagacagacagcccctttgcttcctttgccctttatttgagcccccgctccccacccgccaggtcatggcataaaagcagatccccagtgcttgtttcatgtctctttcttggtttccaggttattctgaggacggcggggcgctgcgaggagaagttattcctgaacatgagtttgcgacgggaccagtgtgtcttgatgatgagaatgagtttcctcctataatcttgtgccgtggaaatcagaagggcaaaacgaagcagtcatgatgagaagcacacctcagaaatcaggacatcccccctatcaggtggttttggagaaaacaaggaaggcggaagaatggagtgcaattgtgtgagcagaaaggggggcaggaatcccgggtgctccactgcttaaaccacaggacctggttaactcctcaccaagcttcccacgaccctggttgccaatgggcgcgggagacattgtatacacatcatgctatttaaaatacgttcaaactatagtgtaaatgctaattaaccatattggtatataaccggaattttatattaaaaggggcctcctttttaaatatatgccgtgtaaaaaatgtacttataggaacatctctttgaattgtatttcttgtatattacatacttagagagagactcttttagccaggcaaagtcttttttggctgtggctggaataaatcatttattacttgggagtcccattttggacactaataataaaatcatggcaatgca

SEQ ID NO: 282665 - DNA, 606 bp, Homo sapiens
acataaacacaggatcctgacatccactagccgagagactttcaggggatgactcgcccctggaccccagctagtcagacatgatcctccagatggacagacaagtcccccaaatgagaagcacacctcagaaatcaggacatcccccctatcaggtggttttggagaaaacaaggaaggcggaagaatggagtgcaattgtgtgagcagaaaggggggcaggaatcccgggtgctccactgcttaaaccacaggacctggttaactcctcaccaagcttcccacgaccctggttgccaatgggcgcgggagacattgtatacacatcatgctatttaaaatacgttcaaactatagtgtaaatgctaattaaccatattggtatataaccggaattttatattaaaaggggcctcctttttaaatatatgccgtgtaaaaaatgtacttataggaacatctctttgaattgtatttcttgtatattacatacttagagagagactcttttagccaggcaaagtcttttttggctgtggctggaataaatcatttattacttgggagtcccattttggacactaataataaaatcatggcaatgca

SEQ ID NO: 282666 - DNA, 2670 bp, Homo sapiens
gaccggcgacccggcccgtggagccggcgcgggcgggctgctgaggtggctgtcgccggctccgagctgcggcttcccgggccgagcccccgatggaggccgaggccgcggacgctcccccgggcggggttgagtcggcgctcagctgcttctctttcaaccaggactgcacatccctagcaattggaactaaagccgggtataagctgttttctctgagttctgtggagcagctggatcaagtccacggaagcaatgaaatcccggacgtctacatcgtggagcgcctcttctccagcagcctggtggtggtagtcagtcacacaaaaccacggcagatgaacgtgtatcacttcaagaaaggcacagagatctgtaattacagctactccagcaacatcttgtccataaggctgaaccggcaaaggctgctggtttgcctagaagagtccatttatattcacaacattaaagacatgaagctgttgaagaccctcctggatattcctgcaaacccaacaggtctatgtgctctctctatcaaccattccaattcttacctggcctatcctggaagcctgacttcaggggagattgtgctttatgatggaaactccctgaaaacagtctgcactattgctgcccatgagggaacactagctgccatcaccttcaatgcctcaggctccaaactagcaagtgcgtctgaaaaaggcacagtcatccgggtgttctctgtccctgatgggcaaaagctctatgagttccggagagggatgaaaaggtatgtgacaatcagctctctagtgttcagtatggattcacaattcctctgcgcctccagtaacaccgagacggtacacatcttcaagctggaacaggtcaccaacagtcgaccagaagagccttcgacctggagtggctacatgggaaagatgtttatggctgctaccaactacctccctacccaggtgtcagacatgatgcatcaggacagggcttttgccactgcacgcttgaacttctccggacagaggaacatctgtaccctctcaacgatccagaagttgccacggctgctagttgcgtcatccagtggacacctttatatgtacaatttggatcctcaggatggaggagagtgtgtcttaatcaaaacccacagcttgcttggctcaggaacaacagaagagaataaagaaaatgacctcagaccttccttacctcagtcttatgcagcgaccgtagccagaccaagtgcatcttcagcctccacggtgccaggttattctgaggacggcggggcgctgcgaggagaagttattcctgaacatgagtttgcgacgggaccagtgtgtcttgatgatgagaatgagtttcctcctgtgagcattaggaacccgtaactgggcggctcagtctgtgtgcttagaaggaaaccttcgcctcatacgagaggcagagtccctttccctgttttctaatctataacaactaattctctgctctagtatttggaaagccataggatatttgttgtactgtgtgcttcgaatcctacagagtaggctttaggtgtcgagctaaaccctgatggcattagagtcaccgaatactaatccagggagtcttggtggcctccctccagccagaggcctgcgatcccttactttgcttctgtagcactgactttgctgcctggaaggtaggaacacgtgacttgtctaaaacttattttcctgaggctcccatggatgcgtttgcagaatgctgccttccttgtgctggaggggatggtttcagagggctgggctgtgtgttcaggactctgagctgagttgctgcactctgtgaaccagcttgaccctcacttacctgcagctctggccggcagacccgcacctccccagcagttgcagacaccggccggaagtagtgtttgggccaagacttggagcatcagctcctagagccagagaggagctgccacttgggcactgaaacaatgtccattaggctttgttatggaaacttctcctgatcattgttttgtgtccattgagcttccaattgtaaaaggatggagtgcaggtctggcttctttctcccgcagatccgtggaaccctctagtgagcacatttggcttagaaaacaaagctgcggtggggccctgcatgcagggctggggctgttgttttgtgatttcccacatcggctctgcgggtcggtcgcagcgtgagcttttacatttctggctttcaataggcaggttgtcagagacgtggctggcaagtgaagtttatatctcagtggcggagagcagttgttcttaaaaatactaattataaacttcaaaacctctgttggcatgctgcctaactataaaccagttgttttacctttgggttctcatggccccaactggccttaaagggcgttcttctgcaccctcaagaggcggtggttatttacctgaagtcgaggcttccaggatccagagcactctaggtcagacaccgtggggacaaatgtgaccattctactctgtcagggtttaccacatccagacactcactaggttccgtttcactaattttggtaaaagtctgtaactactataaaatattattagattcttaattgtaatcgcagtaagccttgcaacctct

SEQ ID NO: 282667 - DNA, 1810 bp, Homo sapiens
gaccggcgacccggcccgtggagccggcgcgggcgggctgctgaggtggctgtcgccggctccgagctgcggcttcccgggccgagcccccgatggaggccgaggccgcggacgctcccccgggcggggttgagtcggcgctcagctgcttctctttcaaccaggactgcacatccctagcaattggaactaaagccgggtataagctgttttctctgagttctgtggagcagctggatcaagtccacggaagcaatgaaatcccggacgtctacatcgtggagcgcctcttctccagcagcctggtggtggtagtcagtcacacaaaaccacggcagatgaacgtgtatcacttcaagaaaggcacagagatctgtaattacagctactccagcaacatcttgtccataaggctgaaccggcaaaggctgctggtttgcctagaagagtccatttatattcacaacattaaagacatgaagctgttgaagaccctcctggatattcctgcaaacccaacaggtctatgtgctctctctatcaaccattccaattcttacctggcctatcctggaagcctgacttcaggggagattgtgctttatgatggaaactccctgaaaacagtctgcactattgctgcccatgagggaacactagctgccatcaccttcaatgcctcaggctccaaactagcaagtgcgtctgaaaaaggcacagtcatccgggtgttctctgtccctgatgggcaaaagctctatgagttccggagagggatgaaaaggtatgtgacaatcagctctctagtgttcagtatggattcacaattcctctgcgcctccagtaacaccgagacggtacacatcttcaagctggaacaggtcaccaacagtcgaccagaagagccttcgacctggagtggctacatgggaaagatgtttatggctgctaccaactacctccctacccaggtgtcagacatgatgcatcaggacagggcttttgccactgcacgcttgaacttctccggacagaggaacatctgtaccctctcaacgatccagaagttgccacggctgctagttgcgtcatccagtggacacctttatatgtacaatttggatcctcaggatggaggagagtgtgtcttaatcaaaacccacagcttgcttggctcaggaacaacagaagagaataaagaaaatgacctcagaccttccttacctcagtcttatgcagcgaccgtagccagaccaagtgcatcttcagcctccacggtgccaggttattctgaggacggcggggcgctgcgaggagaagttattcctgaacatgagtttgcgacgggaccagtgtgtcttgatgatgagaatgagtttcctcctataatcttgtgccgtggaaatcagaagggcaaaacgaagcagtcatgatgagaagcacacctcagaaatcaggacatcccccctatcaggtggttttggagaaaacaaggaaggcggaagaatggagtgcaattgtgggacaggaggaactctttaacttcttttaaatgcagtcatttcacccttaaaaggagaggaaggggattgggccacagacttatccatggactcgtctgctctgagatctggaaaacgacctaactttggtctaaatctgtgctcctcaaggcattgtttgatagaaatgtaggatttcaggatctactcgagccctactgagacggaatccggattctcacaagatcccaggtgatttgtttgcatattaaagatggagaccagtgagtacactggtttgtggaagg

SEQ ID NO: 282668 - DNA, 1679 bp, Homo sapiens
gaccggcgacccggcccgtggagccggcgcgggcgggctgctgaggtggctgtcgccggctccgagctgcggcttcccgggccgagcccccgatggaggccgaggccgcggacgctcccccgggcggggttgagtcggcgctcagctgcttctctttcaaccaggactgcacatccctagcaattggaactaaagccgggtataagctgttttctctgagttctgtggagcagctggatcaagtccacggaagcaatgaaatcccggacgtctacatcgtggagcgcctcttctccagcagcctggtggtggtagtcagtcacacaaaaccacggcagatgaacgtgtatcacttcaagaaaggcacagagatctgtaattacagctactccagcaacatcttgtccataaggctgaaccggcaaaggctgctggtttgcctagaagagtccatttatattcacaacattaaagacatgaagctgttgaagaccctcctggatattcctgcaaacccaacaggtctatgtgctctctctatcaaccattccaattcttacctggcctatcctggaagcctgacttcaggggagattgtgctttatgatggaaactccctgaaaacagtctgcactattgctgcccatgagggaacactagctgccatcaccttcaatgcctcaggctccaaactagcaagtgcgtctgaaaaaggcacagtcatccgggtgttctctgtccctgatgggcaaaagctctatgagttccggagagggatgaaaaggtatgtgacaatcagctctctagtgttcagtatggattcacaattcctctgcgcctccagtaacaccgagacggtacacatcttcaagctggaacaggtcaccaacagtcgaccagaagagccttcgacctggagtggctacatgggaaagatgtttatggctgctaccaactacctccctacccaggtgtcagacatgatgcatcaggacagggcttttgccactgcacgcttgaacttctccggacagaggaacatctgtaccctctcaacgatccagaagttgccacggctgctagttgcgtcatccagtggacacctttatatgtacaatttggatcctcaggatggaggagagtgtgtcttaatcaaaacccacaggtgaagagactgcttttcaaaagacagcctttcgagagctggtcgtgtagagttgtcccttcgccaagaacgacaagcttcagtgcccttgcattgatttgttcttcactggcagtctcagtggcaaacctctagtgggcaagtgctctgcaccgggctctgtgtcaggtgccctcagcatgtggtaatcatctggaaaagtgccaggattaataacacacaagatggtctccccctcagcctatgctcctaacacagccctgagctcacagtgggtgttcaaaaatattccctgccaccaggtgtggcggctcacacctgtaatcccggcactttgggaggccgaagcgggtggatggcttgagtccaggtgttcaagaccagcctgggcaacatggtgaaaccccatctataccaaaaacaaatacaaaaattagccggttgtggtggcacacacctgtagtcccagctactcaggaggctgaggtgggagaatcacctgagcctggagagg

SEQ ID NO: 282669 - DNA, 1390 bp, Homo sapiens
gaccggcgacccggcccgtggagccggcgcgggcgggctgctgaggtggctgtcgccggctccgagctgcggcttcccgggccgagcccccgatggaggccgaggccgcggacgctcccccgggcggggttgagtcggcgctcagctgcttctctttcaaccaggactgcacatccctagcaattggaactaaagccgggtataagctgttttctctgagttctgtggagcagctggatcaagtccacggaagcaatgaaatcccggacgtctacatcgtggagcgcctcttctccagcagcctggtggtggtagtcagtcacacaaaaccacggcagatgaacgtgtatcacttcaagaaaggcacagagatctgtaattacagctactccagcaacatcttgtccataaggctgaaccggcaaaggctgctggtttgcctagaagagtccatttatattcacaacattaaagacatgaagctgttgaagaccctcctggatattcctgcaaacccaacaggtctatgtgctctctctatcaaccattccaattcttacctggcctatcctggaagcctgacttcaggggagattgtgctttatgatggaaactccctgaaaacagtctgcactattgctgcccatgagggaacactagctgccatcaccttcaatgcctcaggctccaaactagcaagtgcgtctgaaaaaggcacagtcatccgggtgttctctgtccctgatgggcaaaagctctatgagttccggagagggatgaaaaggtatgtgacaatcagctctctagtgttcagtatggattcacaattcctctgcgcctccagtaacaccgagacggtacacatcttcaagctggaacaggtcaccaacagtcgaccagaagagccttcgacctggagtggctacatgggaaagatgtttatggctgctaccaactacctccctacccaggtgtcagacatgatgcatcaggacagggcttttgccactgcacgcttgaacttctccggacagaggaacatctgtaccctctcaacgtacgtacaatgacacccactctgaacaagaccacactttcgtcaatgtatttttccaaagcacaaaaatccccaaacctgaaaagaaaaaaagaaaacttgccccaggctgggcacggtggcttacatctgtaatcccggaaccttgggaggccaaggcaggcagatcatctgaggtcaggagtttgagaccagcctggccaacgtggtgaaatcccgtctctactaaaaatacaaaaattagccgggtatggtggtgcgtgcctgtagtcccagctacttgggaggttggggcaggagaatcgcttgaacccaggaggcggaggttgcagt

SEQ ID NO: 282670 - DNA, 263 bp, Homo sapiens
tgcctgtgcattactccctagtcgaccagaagagccttcgacctggagtggctacatgggaaagatgtttatggctgctaccaactacctccctacccaggtgtcagacatgatgcatcaggacagggcttttgccactgcacgcttgaacttctccggacagaggaacatctgtaccctctcaacgtacgtacaatgacacccactctgaacaagaccacactttcgtcaatgtatttttccaaagcacaaaaatccccaaa

SEQ ID NO: 282671 - DNA, 1842 bp, Homo sapiens
gaccggcgacccggcccgtggagccggcgcgggcgggctgctgaggtggctgtcgccggctccgagctgcggcttcccgggccgagcccccgatggaggccgaggccgcggacgctcccccgggcggggttgagtcggcgctcagctgcttctctttcaaccaggactgcacatgaaatcccggacgtctacatcgtggagcgcctcttctccagcagcctggtggtggtagtcagtcacacaaaaccacggcagatgaacgtgtatcacttcaagaaaggcacagagatctgtaattacagctactccagcaacatcttgtccataaggctgaaccggcaaaggctgctggtttgcctagaagagtccatttatattcacaacattaaagacatgaagctgttgaagaccctcctggatattcctgcaaacccaacaggtctatgtgctctctctatcaaccattccaattcttacctggcctatcctggaagcctgacttcaggggagattgtgctttatgatggaaactccctgaaaacagtctgcactattgctgcccatgagggaacactagctgccatcaccttcaatgcctcaggctccaaactagcaagtgcgtctgaaaaaggcacagtcatccgggtgttctctgtccctgatgggcaaaagctctatgagttccggagagggatgaaaaggtatgtgacaatcagctctctagtgttcagtatggattcacaattcctctgcgcctccagtaacaccgagacggtacacatcttcaagctggaacaggtcaccaacagtcgaccagaagagccttcgacctggagtggctacatgggaaagatgtttatggctgctaccaactacctccctacccaggtgtcagacatgatgcatcaggacagggcttttgccactgcacgcttgaacttctccggacagaggaacatctgtaccctctcaacgatccagaagttgccacggctgctagttgcgtcatccagtggacacctttatatgtacaatttggatcctcaggatggaggagagtgtgtcttaatcaaaacccacagcttgcttggctcaggaacaacagaagagaataaagaaaatgacctcagaccttccttacctcagtcttatgcagcgaccgtagccagaccaagtgcatcttcagcctccacggtgccaggttattctgaggacggcggggcgctgcgaggagaagttattcctgaacatgagtttgcgacgggaccagtgtgtcttgatgatgagaatgagtttcctcctataatcttgtgccgtggaaatcagaagggcaaaacgaagcagtcatgatgagaagcacacctcagaaatcaggacatcccccctatcaggtggttttggagaaaacaaggaaggcggaagaatggagtgcaattgtgtgagcagaaaggggggcaggaatcccgggtgctccactgcttaaaccacaggacctggttaactcctcaccaagcttcccacgaccctggttgccaatgggcgcgggagacattgtatacacatcatgctatttaaaatacgttcaaactatagtgtaaatgctaattaaccatattggtatataaccggaattttatattaaaaggggcctcctttttaaatatatgccgtgtaaaaaatgtacttataggaacatctctttgaattgtatttcttgtatattacatacttagagagagactcttttagccaggcaaagtcttttttggctgtggctggaataaatcatttattacttgggagtcccattttggacactaataataaaatcatggcaatgca

SEQ ID NO: 282672 - DNA, 1307 bp, Homo sapiens
ttttaagaagtttaaaggagtttattcaaaagttgaacatttttaaaatttcacaaaactaaccagcaaagacagtaagccaatcctccatttaccccctttctgtcttggttaagggcagagacacatgtcagagggagactgcgtcccatgtagggagctaatgtgttcactagctattgcttctcgcagggtcgcagcatctacactcacttgcctcatccacactgtcacgttcaaagacaagaaataatcctgaaagtagatcccaaggccagaatgcaaaggaatagccagaagcccagaccagatcagtgggctaagggtttgtcaaaggcagaatctggtgacagctagggtgaggggggctttgtcattggaagcgaatccatcgcccatcttcgttgtcatcacggtttatgttttccttggcccttaggatccagaagttgccacggctgctagttgcgtcatccagtggacacctttatatgtacaatttggatcctcaggatggaggagagtgtgtcttaatcaaaacccacagcttgcttggctcaggaacaacagaagagaataaagaaaatgacctcagaccttccttacctcagtcttatgcagcgaccgtagccagaccaagtgcatcttcagcctccacggtgccaggttattctgaggacggcggggcgctgcgaggagaagttattcctgaacatgagtttgcgacgggaccagtgtgtcttgatgatgagaatgagtttcctcctataatcttgtgccgtggaaatcagaagggcaaaacgaagcagtcatgatgagaagcacacctcagaaatcaggacatcccccctatcaggtggttttggagaaaacaaggaaggcggaagaatggagtgcaattgtgtgagcagaaaggggggcaggaatcccgggtgctccactgcttaaaccacaggacctggttaactcctcaccaagcttcccacgaccctggttgccaatgggcgcgggagacattgtatacacatcatgctatttaaaatacgttcaaactatagtgtaaatgctaattaaccatattggtatataaccggaattttatattaaaaggggcctcctttttaaatatatgccgtgtaaaaaatgtacttataggaacatctctttgaattgtatttcttgtatattacatacttagagagagactcttttagccaggcaaagtcttttttggctgtggctggaataaatcatttattacttgggagtcccattttggacactaataataaaatcatggcaatgca

SEQ ID NO: 282673 - DNA, 2062 bp, Homo sapiens
gaccggcgacccggcccgtggagccggcgcgggcgggctgctgaggtggctgtcgccggctccgagctgcggcttcccgggccgagcccccgatggaggccgaggccgcggacgctcccccgggcggggttgagtcggcgctcagctgcttctctttcaaccaggactgcacatccctagcaattggaactaaagccgggtataagctgttttctctgagttctgtggagcagctggatcaagtccacggaagcaatgaaatcccggacgtctacatcgtggagcgcctcttctccagcagcctggtggtggtagtcagtcacacaaaaccacggcagatgaacgtgtatcacttcaagaaaggcacagagatctgtaattacagctactccagcaacatcttgtccataaggctgaaccggcaaaggctgctggtttgcctagaagagtccatttatattcacaacattaaagacatgaagctgttgaagaccctcctggatattcctgcaaacccaacaggtctatgtgctctctctatcaaccattccaattcttacctggcctatcctggaagcctgacttcaggggagattgtgctttatgatggaaactccctgaaaacagtctgcactattgctgcccatgagggaacactagctgccatcaccttcaatgcctcaggctccaaactagcaagtgcgtctgaaaaaggcacagtcatccgggtgttctctgtccctgatgggcaaaagctctatgagttccggagagggatgaaaaggtatgtgacaatcagctctctagtgttcagtatggattcacaattcctctgcgcctccagtaacaccgagacggtacacatcttcaagctggaacaggtcaccaacagtcgaccagaagagccttcgacctggagtggctacatgggaaagatgtttatggctgctaccaactacctccctacccaggtgtcagacatgatgcatcaggacagggcttttgccactgcacgcttgaacttctccggacagaggaacatctgtaccctctcaacgatccagaagttgccacggctgctagttgcgtcatccagtggacacctttatatgtacaatttggatcctcaggatggaggagagtgtgtcttaatcaaaacccacagcttgcttggctcaggaacaacagaagagaataaagaaaatgacctcagaccttccttacctcagtcttatgcagcgaccgtagccagaccaagtgcatcttcagcctccacggtgccaggttattctgaggacggcggggcgctgcgaggagaagttattcctgaacatgagtttgcgacgggaccagtgtgtcttgatgatgagaatgagtttcctcctgtgagcattaggaacccgtaactgggcggctcagtctgtgtgcttagaaggaaaccttcgcctcatacgagaggcagagtccctttccctgttttctaatctataacaactaattctctgctctagtatttggaaagccataggatatttgttgtactgtgtgcttcgaatcctacagagtaggctttaggtgtcgagctaaaccctgatggcattagagtcaccgaatactaatccagggagtcttggtggcctccctccagccagaggcctgcgatcccttactttgcttctgtagcactgactttgctgcctggaaggtaggaacacgtgacttgtctaaaacttattttcctgaggctcccatggatgcgtttgcagaatgctgccttccttgtgctggaggggatggtttcagagggctgggctgtgtgttcaggactctgagctgagttgctgcactctgtgaaccagcttgaccctcacttacctgcagctctggccggcagacccgcacctccccagcagttgcagacactcattaagaaacaagtggccgggtgcggtggctcacacctgtaatcccagcactttgggaggccgaggctggaggattgcttgagcccaggagttagagaccagcctgggcaacacagcaaaaccccatctccaccaaa

SEQ ID NO: 282674 - DNA, 1858 bp, Homo sapiens
gaccggcgacccggcccgtggagccggcgcgggcgggctgctgaggtggctgtcgccggctccgagctgcggcttcccgggccgagcccccgatggaggccgaggccgcggacgctcccccgggcggggttgagtcggcgctcagctgcttctctttcaaccaggactgcacatccctagcaattggaactaaagccgggtataagctgttttctctgagttctgtggagcagctggatcaagtccacggaagcaatgaaatcccggacgtctacatcgtggagcgcctcttctccagcagcctggtggtggtagtcagtcacacaaaaccacggcagatgaacgtgtatcacttcaagaaaggcacagagatctgtaattacagctactccagcaacatcttgtccataaggctgaaccggcaaaggctgctggtttgcctagaagagtccatttatattcacaacattaaagacatgaagctgttgaagaccctcctggatattcctgcaaacccaacaggtctatgtgctctctctatcaaccattccaattcttacctggcctatcctggaagcctgacttcaggggagattgtgctttatgatggaaactccctgaaaacagtctgcactattgctgcccatgagggaacactagctgccatcaccttcaatgcctcaggctccaaactagcaagtgcgtctgaaaaaggcacagtcatccgggtgttctctgtccctgatgggcaaaagctctatgagttccggagagggatgaaaaggtatgtgacaatcagctctctagtgttcagtatggattcacaattcctctgcgcctccagtaacaccgagacggtacacatcttcaagctggaacaggtcaccaacagtcgaccagaagagccttcgacctggagtggctacatgggaaagatgtttatggctgctaccaactacctccctacccaggtgtcagacatgatgcatcaggacagggcttttgccactgcacgcttgaacttctccggacagaggaacatctgtaccctctcaacgatccagaagttgccacggctgctagttgcgtcatccagtggacacctttatatgtacaatttggatcctcaggatggaggagagtgtgtcttaatcaaaacccacagcttgcttggctcaggaacaacagaagagaataaagaaaatgacctcagaccttccttacctcagtcttatgcagcgaccgtagccagaccaagtgcatcttcagcctccacggtgccaggttattctgaggacggcggggcgctgcgaggagaagttattcctgaacatgagtttgcgacgggaccagtgtgtcttgatgatgagaatgagtttcctcctgtgagcattaggaacccgtaactgggcggctcagtctgtgtgcttagaaggaaaccttcgcctcatacgagaggcagagtccctttccctgttttctaatctataacaactaattctctgctctagtatttggaaagccataggatatttgttgtactgtgtgcttcgaatcctacagagtaggctttaggtgtcgagctaaaccctgatggcattagagtcaccgaatactaatccagggagtcttggtggcctccctccagccagaggcctgcgatcccttactttgcttctgtagcactgactttgctgcctggaaggtaggaacacgtgacttgtctaaaacttattttcctgaggcaggagaattgcttgaacctgggaggcagaggttgcggtgagccgagatcgcgccattgcactccagcctgggcaacgagagcaaaactccatctcaaaaaagaaagaagaaa

SEQ ID NO: 282675 - DNA, 826 bp, Homo sapiens
  misc_feature (787)..(787): n is a, c, g, or t
  misc_feature (789)..(790): n is a, c, g, or t
  misc_feature (795)..(795): n is a, c, g, or t
gaccggcgacccggcccgtggagccggcgcgggcgggctgctgaggtggctgtcgccggctccgagctgcggcttcccgggccgagcccccgatggaggccgaggccgcggacgctcccccgggcggggttgagtcggcgctcagctgcttctctttcaaccaggactgcacatccctagcaattggaactaaagccgggtataagctgttttctctgagttctgtggagcagctggatcaagtccacggaagcaatgaaatcccggacgtctacatcgtggagcgcctcttctccagcagcctggtggtggtagtcagtcacacaaaaccacggcagatgaacgtgtatcacttcaagaaaggcacagagatctgtaattacagctactccagcaacatcttgtccataaggctgaaccggcaaaggctgctggtttgcctagaagagtccatttatattcacaacattaaagacatgaagctgttgaagaccctcctggatattcctgcaaacccaacaggtctatgtgctctctctatcaaccattccaattcttacctggcctatcctggaagcctgacttcaggggagattgtgctttatgatggaaactccctgaaaacagtctgcactattgctgcccatgagggaacactagctgccatcaccttcaatgcctcaggctccaaactagcaagtgcgtctgaaaaaggcacagtcatccgggtgttctctgtccctgatgggcaaaagctctatgagttccggagagggatgaaaagacnanncagcnctctaactgctggcagatagggaatcacaat

SEQ ID NO: 282676 - DNA, 341 bp, Homo sapiens
aggccccagaaagctgccttctaccatgtgaggacacatctatgagccaggaaatgggctctcaccagacagtgaatccgccagcaccttgatcttggacttcccagccaaaagaatgatctttcagattctttcaagactcaagcctaggttattacctgcacttaaaaccagctgacagagacaaagatgaaggaaaaacaaatcactccttgggaattacatacctgatctctctgatttccaaatttcccaaagctacacacacgagattatacacatcaggcactggaactatctgtaatactggaacctaaataaaacaaagctgacggccgaaa

SEQ ID NO: 282677 - DNA, 644 bp, Homo sapiens
aggccccagaaagctgccttctaccatgtgaggacacatctatgagccaggaaatgggctctcaccagacagtgaatccgccagcaccttgatcttggacttcccagccaaaagaatgggtcttgctctgttgccaggcttgagtgaagtggtatgatttcagctcactgcagcctccacctcccagtcaaggctggtggcatgcatctgtggtcctgctactcgggaggctgaggtgggaggactgcttgagcctgagaggttgagacttcagtgagccatagtcatgccactgtactccagcatgggcaacagactgagaccctctctcaaaaaagcaaaaacaaaaaaacaaccaaggcagtatgaattcggagaaggaaacatcaatgaaggctggaatagtacaacagaactcaagatctttcagattctttcaagactcaagcctaggttattacctgcacttaaaaccagctgacagagacaaagatgaaggaaaaacaaatcactccttgggaattacatacctgatctctctgatttccaaatttcccaaagctacacacacgagattatacacatcaggcactggaactatctgtaatactggaacctaaataaaacaaagctgacggccgaaa

SEQ ID NO: 282678 - DNA, 451 bp, Homo sapiens
tattaggaggtggggcttttgagaagtgattggtggttttgtaaaacaggccccagaaagctgccttctaccatgtgaggacacatctatgagccaggaaatgggctctcaccagacagtgaatccgccagcaccttgatcttggacttcccagccaaaagaatggtaagaaatacactttgttgtttaaaggctacccagtctgtggtattttgttgtagcagcctaatagaactaagatatgcttcctacaggattggtaccaaacaggctttcaaggattcctgaacagatgagtttgaaaagtgacaaaggaaatgcttgaccaagcagttatctttatctttaatctctagggccaacgactatcgttctctcttcaaatccaaggaagcaagttttatatgaaagcacatactgcagatgatagttctgaggttcttaggttctt

SEQ ID NO: 282679 - DNA, 911 bp, Homo sapiens
cgcggcgcctggcgggagggccgcagggagtgcgcatgcggccgagtgcgggactggggctcctggctgtgggtgtggtaccgaggcttcagcgggtgccgcccgcctagagggagtggagcggtgagcacgtcaggggtggggggcgcaggtcaagctttcaccagtttttaattctttgatggggtaaatttgagcaattttctcgacttgtcgacattcgttattaactgagcaggaatcaggagaggaacccggtcctctccacacagcccagcagagagcctacgactagatttgcatctttacgtcctgcgcggaggctgctacacacatgcagaagtcatgctggtggcctggacagtgaagggagagaagtggatttgggagacatttaggaggaacagtaagaggaccttgtgcatgaataatttgtttccacactacagaagaagaatcccagacttcttagagaacccagtgactttttgcaccttaaatctgtgaaatcctcatgttttcttctgccgtatccatagttcaaacaaagatgaggcaaagctagatgcattcctgaaggaacccaagaaattcctctctttatttctctggaatgaaatgaattctctagaccaccagttctaaccttcaaaaaccaaacctgtttgtgagatctccttcaaatactactgtagaccccagtgtttattcattaaatttttaaaatatttgttttatttggaatccatgtatttgtaattttagtgtttgtattaatataagggagaaatgtttaaatctgtctatgccatatgtgcctctggcttattgcccaattaattgtagactcaggctaaactttggtttctgtctttaatttttgtcagaagaaatataactgatctcaaaac

SEQ ID NO: 282680 - DNA, 1029 bp, Homo sapiens
cgcggcgcctggcgggagggccgcagggagtgcgcatgcggccgagtgcgggactggggctcctggctgtgggtgtggtaccgaggcttcagcgggtgccgcccgcctagagggagtggagcggtgagagagcctacgactagatttgcatctttacgtcctgcgcggaggctgctacacacatgcagaagtcatgctggtggcctggacagtgaagggagagaagtggatttgggagacatttaggagatggcaccaaaagcgaaggaagctcctgctcatcctaaagccgaagccaaagcgaaggctttaaaggccaagaaggcagtgttgaaaggtgtccgcagccacacgcaaaaaagaagatccgcatgtcactcaccttcaggcggcccaagacactgcgactccggaggcagcccagatatcctcggaagagcacccccaggagaaacaagcttggccactatgctatcatcaagtttccgctggccactgagtcggccgtgaagaagatagaagaaaacaacacgcttgtgttcactgtggatgttaaagccaacaagcaccagatcagacaggctgtgaagaagctctatgacagtgatgtggccaaggtcaccaccctgatttgtcctgataaggagaacaaggcatatgttcgacttgctcctgattatgatgctttcgatgttgtaacaaaattgggatcacctaaactgagtccagctggctaactctaaatatatgtgtatcttttcagcataaaaaaataatgtttttcataagaatgacaacttaattagaatcaaatctataagctttaagattttacgtttctagtaagtataatattagcttatttgactagaactcaagcagaataggaatttatgcttgttttatattcaataatgataattttgaagatatagttgttttattacaccaaaaatactatattaatcttatttaactaagttttatccaaatcatgttaacttaagaaacatttgatcagttcctata

SEQ ID NO: 282681 - DNA, 1042 bp, Homo sapiens
gcaataaaaaacagcggcggcgggaaccgagcgtgctgaacgaaatgccaggatggagtgctgcaggtctagttgacgtggtagtctatcgaacgaggagtccgaagcgagctcgatcatcaagagttacggccccgcctgagagcctacgactagatttgcatctttacgtcctgcgcggaggctgctacacacatgcagaagtcatgctggtggcctggacagtgaagggagagaagtggatttgggagacatttaggagatggcaccaaaagcgaaggaagctcctgctcatcctaaagccgaagccaaagcgaaggctttaaaggccaagaaggcagtgttgaaaggtgtccgcagccacacgcaaaaaagaagatccgcatgtcactcaccttcaggcggcccaagacactgcgactccggaggcagcccagatatcctcggaagagcacccccaggagaaacaagcttggccactatgctatcatcaagtttccgctggccactgagtcggccgtgaagaagatagaagaaaacaacacgcttgtgttcactgtggatgttaaagccaacaagcaccagatcagacaggctgtgaagaagctctatgacagtgatgtggccaaggtcaccaccctgatttgtcctgataaggagaacaaggcatatgttcgacttgctcctgattatgatgctttcgatgttgtaacaaaattgggatcacctaaactgagtccagctggctaactctaaatatatgtgtatcttttcagcataaaaaaataatgtttttcataagaatgacaacttaattagaatcaaatctataagctttaagattttacgtttctagtaagtataatattagcttatttgactagaactcaagcagaataggaatttatgcttgttttatattcaataatgataattttgaagatatagttgttttattacaccaaaaatactatattaatcttatttaactaagttttatccaaatcatgttaacttaagaaacatttgatcagttcctata

SEQ ID NO: 282682 - DNA, 863 bp, Homo sapiens
cgcggcgcctggcgggagggccgcagggagtgcgcatgcggccgagtgcgggactggggctcctggctgtgggtgtggtaccgaggcttcagcgggtgccgcccgcctagagggagtggagcggtgagcacgtcaggggtggggggcgcaggtcaagctttcaccagtttttaattctttgatggggtaaatttgagcaattttctcgacttgtcgacattcgttattaactgagcaggaatcaggagaggaacccggtcctctccacacagcccagcaggtacgccgcccatgtgcctgtggagaagagaggttcctgtggggcagacaggtgtggaccaagtagctgcgaaatttcttctgaagaaaacacacaagggggaagcgagtgagctcagtggaggaggggcgctaccccaggggacgtccccatgcatgggcttgtgaacctcgaatatgtgagacggtctcagtcaatttagaaagtttattttgccaaggttgaggacgcacgcccgtgacacagcctcaggaggtcttgacatgtgccaaaggtggccgggacacagcttgcttttatacatgttagggagacaggagacatcaatatatgtaagatgaacgttggttccctcgggaaaggcgggacaactcgaagcagggagggggcttccaggtcacaggtaggtgagagacaaactgttgtattctttcgggtttctgaatagcctccgcaaaggaggctatcacatattaacctatctcagtgagcagaggggtgactttgaatagatggggaggcaggtttgccctaagcagttcccagcttttttccctttagcttagtgattttggggccccca

SEQ ID NO: 282683 - DNA, 820 bp, Homo sapiens
cgcggcgcctggcgggagggccgcagggagtgcgcatgcggccgagtgcgggactggggctcctggctgtgggtgtggtaccgaggcttcagcgggtgccgcccgcctagagggagtggagcggtgagcacgtcaggggtggggggcgcaggtcaagctttcaccagtttttaattctttgatggggtaaatttgagcaattttctcgacttgtcgacattcgttattaactgagcaggaatcaggagaggaacccggtcctctccacacagcccagcagagagcctacgactagatttgcatctttacgtcctgcgcggaggctgctacacacatgcagaagtcatgctggtggcctggacagtgaagggagagaagtggatttgggagacatttaggaggaacagtaagaggaccttgtgcatgaataatttgtttccacactacagagtgggtaataagcagattagtaaaaacaattctgcttcacttcaataacagcctcctccaactcattttttctcaacaaacttatttttccagcagaagaatcccagacttcttagagaacccagtgactttttgcaccttaaatctgtgaaatcctcatgttttcttctgccgtatccatagttcaaacaaagatgaggcaaagctagatgcattcctgaaggaacccaagaaattcctctctttatttctctggaatgaaatgaattctctagaccaccagttctaaccttcaaaaaccaaacctgtttgtgagatctccttcaaatactactgtagaccccagtgtttattcattaaatttttaaaa

SEQ ID NO: 282684 - DNA, 759 bp, Homo sapiens
cgcggcgcctggcgggagggccgcagggagtgcgcatgcggccgagtgcgggactggggctcctggctgtgggtgtggtaccgaggcttcagcgggtgccgcccgcctagagggagtggagcggtgagagagcctacgactagatttgcatctttacgtcctgcgcggaggctgctacacacatgcagaagtcatgctggtggcctggacagtgaagggagagaagtggatttgggagacatttaggaggaacagtaagaggaccttgtgcatgaataatttgtttccacactacagagtgggtaataagcagattagtaaaaacaattctgcttcacttcaataacagcctcctccaactcattttttctcaacaaacttatttttccagcagaagaatcccagacttcttagagaacccagtgactttttgcaccttaaatctgtgaaatcctcatgttttcttctgccgtatccatagttcaaacaaagatgaggcaaagctagatgcattcctgaaggaacccaagaaattcctctctttatttctctggaatgaaatgaattctctagaccaccagttctaaccttcaaaaaccaaacctgtttgtgagatctccttcaaatactactgtagaccccagtgtttattcattaaatttttaaaaaaaaaacaatatcctttctccaccaccaatccctcctccctattctctccactcctctatattggcgggcttaaaccgcgaagggaaaccc

SEQ ID NO: 282685 - DNA, 442 bp, Homo sapiens
actgaaaggttcacgaggctgtaacgaagagtcgagttgctccagagagcctacgactagatttgcatctttacgtcctgcgcggaggctgctacacacatgcagaagtcatgctggtggcctggacagtgaagggagagaagtggatttgggagacatttaggagagaagaatcccagacttcttagagaacccagtgactttttgcaccttaaatctgtgaaatcctcatgttttcttctgccgtatccatagttcaaacaaagatgaggcaaagctagatgcattcctgaaggaacccaagaaattcctctctttatttctctggaatgaaatgaattctctagaccaccagttctaaccttcaaaaaccaaacctgtttgtgagatctccttcaaatactactgtagaccccagtgtttattcattaaatttttaaaa

SEQ ID NO: 282686 - DNA, 668 bp, Homo sapiens
cgcggcgcctggcgggagggccgcagggagtgcgcatgcggccgagtgcgggactggggctcctggctgtgggtgtggtaccgaggcttcagcgggtgccgcccgcctagagggagtggagcggtgagagagcctacgactagatttgcatctttacgtcctgcgcggaggctgctacacacatgcagaagtcatgctggtggcctggacagtgaagggagagaagtggatttgggagacatttaggaggaacagtaagaggaccttgtgcatgaataatttgtttccacactacagagtgggtaataagcagattagtaaaaacaattctgcttcacttcaataacagcctcctccaactcattttttctcaacaaacttatttttccagcagaagaatcccagacttcttagagaacccagtgactttttgcaccttaaatctgtgaaatcctcatgttttcttctgccgtatccatagttcaaacaaagatgaggcaaagctagatgcattcctgaaggaacccaagaaattcctctctttatttctctggaatgaaatgaattctctagaccaccagttctaaccttcaaaaaccaaacctgtttgtgagatctccttcaaatactactgtagaccccagtgtttattcattaaatttttaaaa

SEQ ID NO: 282687 - DNA, 777 bp, Homo sapiens
cgcggcgcctggcgggagggccgcagggagtgcgcatgcggccgagtgcgggactggggctcctggctgtgggtgtggtaccgaggcttcagcgggtgccgcccgcctagagggagtggagcggtgagcacgtcaggggtggggggcgcaggtcaagctttcaccagtttttaattctttgatggggtaaatttgagcaattttctcgacttgtcgacattcgttattaactgagcaggaatcaggagaggaacccggtcctctccacacagcccagcaggtacgccgcccatgtgcctgtggagaagagaggttcctgtggggcagacagagagcctacgactagatttgcatctttacgtcctgcgcggaggctgctacacacatgcagaagtcatgctggtggcctggacagtgaagggagagaagtggatttgggagacatttaggaggaacagtaagaggaccttgtgcatgaataatttgtttccacactacagaagaagaatcccagacttcttagagaacccagtgactttttgcaccttaaatctgtgaaatcctcatgttttcttctgccgtatccatagttcaaacaaagatgaggcaaagctagatgcattcctgaaggaacccaagaaattcctctctttatttctctggaatgaaatgaattctctagaccaccagttctaaccttcaaaaaccaaacctgtttgtgagatctccttcaaatactactgtagaccccagtgtttattcattaaatttttaaaa

SEQ ID NO: 282688 - DNA, 862 bp, Homo sapiens
cgcggcgcctggcgggagggccgcagggagtgcgcatgcggccgagtgcgggactggggctcctggctgtgggtgtggtaccgaggcttcagcgggtgccgcccgcctagagggagtggagcggtgagcacgtcaggggtggggggcgcaggtcaagctttcaccagtttttaattctttgatggggtaaatttgagcaattttctcgacttgtcgacattcgttattaactgagcaggaatcaggagaggaacccggtcctctccacacagcccagcagagagcctacgactagatttgcatctttacgtcctgcgcggaggctgctacacacatgcagaagtcatgctggtggcctggacagtgaagggagagaagtggatttgggagacatttaggagagaagaatcccagacttcttagagaacccagtgactttttgcaccttaaatctgtgaaatcctcatgttttcttctgccgtatccatagttcaaacaaagatgaggcaaagctagatgcattcctgaaggaacccaagaaattcctctctttatttctctggaatgaaatgaattctctagaccaccagttctaaccttcaaaaaccaaacctgtttgtgagatctccttcaaatactactgtagaccccagtgtttattcattaaatttttaaaatatttgttttatttggaatccatgtatttgtaattttagtgtttgtattaatataagggagaaatgtttaaatctgtctatgccatatgtgcctctggcttattgcccaattaattgtagactcaggctaaactttggtttctgtctttaatttttgtcagaagaaatataactgatctcaaaac

SEQ ID NO: 282689 - DNA, 635 bp, Homo sapiens
ctaggctagagtgcagtggcgcaatcatagctcaccacagcctggatgtgttaacctcttaatgggtgttttagcccaactgagtttagattcataggttagagacactgaaaattggcagtaattcttgagtccagtcaaaactgaaccacagtgttctcatgcactcaccttccctcagatgcactgtttccaccatggtctttgtatctgggacaaccttttgcctgagatactgctagtggatgaagactgccttgttttctaattgttgtgtctgtggaggccaatgttatggtaatctttgacgtcaagttaactacttggattcttattttttgttactgtttgaaatgaggcatataaagagactagcattgaacttgggagctgggtataccaagatacattctccgaaagttctgtttgttattaaagtggcaatttgctttacacctgcctgccatttctattctttgttgtttttaaacttgagtggggataaagggggtgttatttattgggtaaccttcccaaactacaacacctaccctcacttttactgtacaggcgtgctgttgaggatggtcaaagtaactataaaatactaaaccagaggccgggcgcggtggctc

SEQ ID NO: 282690 - DNA, 1102 bp, Homo sapiens
  misc_feature (1)..(1): n is a, c, g, or t
  misc_feature (5)..(8): n is a, c, g, or t
ngcannnngcgagactccgtgggcgtaggaccctccgagccacatgcaggatataatctcccggtgtgccgttttttaagcccgttggaaaagcgcagtattagggtgggagtgacccgattttccaggtgccgtctgtcgcccctttctttgactcggaaagggaactccctgaccccttgcgcttcccgagtgaggcaatgcctcgccctgcttcagctcgtgcacggtgcgctgcacccactgtcctgcgccccctgtctggcactccctagtgagatgaaccctcagatggaaatgcagaaatcacccgtcttctgcgtcgctcacgctgggagctgtagaccggagctgttcctattgggccatcttggctccaccaccctgagatagggtctcactctgtcgcccaggctggagtgcggtggcgcgatcacggctcactgcagcctccaactcctggactcaagcgatcctccctcctcggcatccctggactataggcgtgagccaccgcttacgggcgaagacttgcttgtccgtgtccttgccatctaagtggagagcctacgactagatttgcatctttacgtcctgcgcggaggctgctacacacatgcagaagtcatgctggtggcctggacagtgaagggagagaagtggatttgggagacatttaggaggaacagtaagaggaccttgtgcatgaataatttgtttccacactacagagtgggtaataagcagattagtaaaaacaattctgcttcacttcaataacagcctcctccaactcattttttctcaacaaacttatttttccagcagaagaatcccagacttcttagagaacccagtgactttttgcaccttaaatctgtgaaatcctcatgttttcttctgccgtatccatagttcaaacaaagatgaggcaaagctagatgcattcctgaaggaacccaagaaattcctctctttatttctctggaatgaaatgaattctctagaccaccagttctaaccttcaaaaaccaaacctgtttgtgagatctccttcaaatactactgtagaccccagtgtttattcattaaatttttaaaa

SEQ ID NO: 282691 - DNA, 1181 bp, Homo sapiens
cgcggcgcctggcgggagggccgcagggagtgcgcatgcggccgagtgcgggactggggctcctggctgtgggtgtggtaccgaggcttcagcgggtgccgcccgcctagagggagtggagcggtgagcacgtcaggggtggggggcgcaggtcaagctttcaccagtttttaattctttgatggggtaaatttgagcaattttctcgacttgtcgacattcgttattaactgagcaggaatcaggagaggaacccggtcctctccacacagcccagcagagagcctacgactagatttgcatctttacgtcctgcgcggaggctgctacacacatgcagaagtcatgctggtggcctggacagtgaagggagagaagtggatttgggagacatttaggagatggcaccaaaagcgaaggaagctcctgctcatcctaaagccgaagccaaagcgaaggctttaaaggccaagaaggcagtgttgaaaggtgtccgcagccacacgcaaaaaagaagatccgcatgtcactcaccttcaggcggcccaagacactgcgactccggaggcagcccagatatcctcggaagagcacccccaggagaaacaagcttggccactatgctatcatcaagtttccgctggccactgagtcggccgtgaagaagatagaagaaaacaacacgcttgtgttcactgtggatgttaaagccaacaagcaccagatcagacaggctgtgaagaagctctatgacagtgatgtggccaaggtcaccaccctgatttgtcctgataaggagaacaaggcatatgttcgacttgctcctgattatgatgctttcgatgttgtaacaaaattgggatcacctaaactgagtccagctggctaactctaaatatatgtgtatcttttcagcataaaaaaataatgtttttcataagaatgacaacttaattagaatcaaatctataagctttaagattttacgtttctagtaagtataatattagcttatttgactagaactcaagcagaataggaatttatgcttgttttatattcaataatgataattttgaagatatagttgttttattacaccaaaaatactatattaatcttatttaactaagttttatccaaatcatgttaacttaagaaacatttgatcagttcctata

SEQ ID NO: 282692 - DNA, 1609 bp, Homo sapiens
  misc_feature (1)..(1): n is a, c, g, or t
  misc_feature (5)..(8): n is a, c, g, or t
ngcannnngcgagactccgtgggcgtaggaccctccgagccacatgcaggatataatctcccggtgtgccgttttttaagcccgttggaaaagcgcagtattagggtgggagtgacccgattttccaggtgccgtctgtcgcccctttctttgactcggaaagggaactccctgaccccttgcgcttcccgagtgaggcaatgcctcgccctgcttcagctcgtgcacggtgcgctgcacccactgtcctgcgccccctgtctggcactccctagtgagatgaaccctcagatggaaatgcagaaatcacccgtcttctgcgtcgctcacgctgggagctgtagaccggagctgttcctattgggccatcttggctccaccaccctggcgtgctgttgaggatggtcaaagtaactataaaatactaaaccagaggccgggcgcggtggctcatgcctataatcccagcactttcggaggctgaggtgggcggatcacaaggtccggagatcaagaccatcctggctaataagagatagggtctcactctgtcgcccaggctggagtgcggtggcgcgatcacggctcactgcagcctccaactcctggactcaagcgatcctccctcctcggcatccctggactataggcgtgagccaccgcttacgggcgaagacttgcttgtccgtgtccttgccatctaagtggagagcctacgactagatttgcatctttacgtcctgcgcggaggctgctacacacatgcagaagtcatgctggtggcctggacagtgaagggagagaagtggatttgggagacatttaggagatggcaccaaaagcgaaggaagctcctgctcatcctaaagccgaagccaaagcgaaggctttaaaggccaagaaggcagtgttgaaaggtgtccgcagccacacgcaaaaaagaagatccgcatgtcactcaccttcaggcggcccaagacactgcgactccggaggcagcccagatatcctcggaagagcacccccaggagaaacaagcttggccactatgctatcatcaagtttccgctggccactgagtcggccgtgaagaagatagaagaaaacaacacgcttgtgttcactgtggatgttaaagccaacaagcaccagatcagacaggctgtgaagaagctctatgacagtgatgtggccaaggtcaccaccctgatttgtcctgataaggagaacaaggcatatgttcgacttgctcctgattatgatgctttcgatgttgtaacaaaattgggatcacctaaactgagtccagctggctaactctaaatatatgtgtatcttttcagcataaaaaaataatgtttttcataagaatgacaacttaattagaatcaaatctataagctttaagattttacgtttctagtaagtataatattagcttatttgactagaactcaagcagaataggaatttatgcttgttttatattcaataatgataattttgaagatatagttgttttattacaccaaaaatactatattaatcttatttaactaagttttatccaaatcatgttaacttaagaaacatttgatcagttcctata

SEQ ID NO: 282693 - DNA, 732 bp, Homo sapiens
cgcggcgcctggcgggagggccgcagggagtgcgcatgcggccgagtgcgggactggggctcctggctgtgggtgtggtaccgaggcttcagcgggtgccgcccgcctagagggagtggagcggtgaggaacagtaagaggaccttgtgcatgaataatttgtttccacactacagagtgggtaataagcagattagtaaaaacaattctgcttcacttcaataacagcctcctccaactcattttttctcaacaaacttatttttccagcagaagaatcccagacttcttagagaacccagtgactttttgcaccttaaatctgtgaaatcctcatgttttcttctgccgtatccatagttcaaacaaagatgaggcaaagctagatgcattcctgaaggaacccaagaaattcctctctttatttctctggaatgaaatgaattctctagaccaccagttctaaccttcaaaaaccaaacctgtttgtgagatctccttcaaatactactgtagaccccagtgtttattcattaaatttttaaaatatttgttttatttggaatccatgtatttgtaattttagtgtttgtattaatataagggagaaatgtttaaatctgtctatgccatatgtgcctctggcttattgcccaattaattgtagactcaggctaaactttggtttctgtctttaatttttgtcagaagaaatataactgatctcaaaac

SEQ ID NO: 282694 - DNA, 803 bp, Homo sapiens
tagctctgatgtcctgagtctataaatgactggccccttccttcaatcaagaaataacctcactacacccagctgtgggagagaataaaaatccaagacttcccaaaggctgagctgagagcaaagaggctgcttctctcgtggcccagcctcgctctctgcaggtcccccagctcacactgtacggcccacagacctccatctgcttgaccagcctgctgcggtcatctttgaggtgactcttggcttccagctcatactccaggtccttcagcgtctgctccagaagctgcctttttgtggcactcaactaacagctttgaagaaagcgcaacagacaaaacagcttgattcacaagggccagtcagtgtcttgaacttctctagaagctccctggggagaccagccagctcagggcacagtaggtcttccttaaacatctgtgtgggctgatctggtgaagccgcaggctgtctgctttgttctaagtgtcctaccctcttggagttggtactagtattgagtagagctagtctcatgaatagaataatacaccagggggtctgtttccttcagagtatatgaaagtgaatggccatctccgctacagaatgccacccttctgcagtgtctggcacagaagagttggaaagccccagtagttgaggacagctttggagaacccgtggaaaagcttgaggaaatgtgttcttctctgggaggctgacaggagcactgggcatttctaagagaacagcctagccttgaagatgacatctccagatgaagacccacatctggt

SEQ ID NO: 282695 - DNA, 805 bp, Homo sapiens
acccggaggtgggatgggaaaactttattaggtttggtttccagcttcggccacgcgggctccgcccgccccgagctcgggtcaccttcaggtagcgctccagcttcttgctgatgagcttgttgttgagaatactgcgggccaccatgagggaggacttcttggactgctccatcatgagctgcgggcagggcagaaggagctggagaggctgctctgagtgccctacaagttgctgccccgaccctgccagcttagagggaccccaccccgcccctgcacccacgcacttccagccccaccaacggagggccactccacaagcatggaaccacaacctatctgatctttgttcaaattccctctccttccacaccacacttactgtaggtaaataaaaatacagatctatatatctctaactttacggctgtattacagaaatctgatttgcttacaaaaaagctataagcagtgaacaattaagaaactaagagccaaaggtgggtgcaacctgtaacaaggtgccaactaggctaataggcaaggagcactttggggccaacggggaagatataaaaacaggaacagatatttaatgaaacgtcttttttaacccacagaattccaagaatgaagaattattcccagtcatgcaagggtgaagagagtcttctctgctggtgggaggatcaactgtttccgtattttttggaaagcagtttgacacaatgtatgaaaagtaaaaatctgtctcattaatcccttcccagaacgtatcctaaatttaagaactggaaacatg

SEQ ID NO: 282696 - DNA, 279 bp, Homo sapiens
ccgcccccctagcgccgccattttgtggcgtcttcggaagaggaagccgggagtgcaaaccccggggtcgctgggggccggaaggactccgccgaagaattccaagaatgaagaattattcccagtcatgcaagggtgaagagagtcttctctgctggtgggaggatcaactgtttccgtattttttggaaagcagtttgacacaatgtatgaaaagtaaaaatctgtctcattaatcccttcccagaacgtatcctaaatttaagaactggaaacatg

SEQ ID NO: 282697 - DNA, 2039 bp, Homo sapiens
  misc_feature (1453)..(1453): n is a, c, g, or t
gttttcttttcctttctttctctctctctcgcttctctcctctccttttctctctctttcgcaataaagacaggaaaaaggcggggggaaacatggagaaagcttcccacggataatcccatggagtctaaaagggacatgccgagggctggcagggctgggaggcctttgggaagctcagaggagccgcggggagccgggcgtacgagagcaggccgggactccgctgggcgaggccgagcagggacaccagctcctcacccagttgaaacttgcggtcactggagaggagcaacgcaggagctgatctggtttgaaaaagaggtcaaagcactttacagctcccatttcccagcgccgaggagtggtgagttttccgtgttccaagccccactgttctgcctccgggagagtttgcagctgctttcggggaaggtggctggctctgctcacctgctctgccctccctgacaagagcacctgctgtgtgcccacacttcggctcccgaggtctactttgctcctcctgacaccccaggaggctggcccctcctggctctggaggagacatgaggctcaggagagctgcatctgtgccagcgacagcaggtgcatcccacaccagggcaggggtctgcaccggcctcctgtctgtcttcttccttttggaaaacaatgggaagaaaacacatcctgccggtggctgtacctcaggaagccccacggcctgcactgttccctgcccatgccaacaggctaccctctctgcccgcgtccacgtggggagcttttccatcagcatctgcacacccagacgtgagggtgcagctctcatctgctgtgcctcagatctggatttaacacttgggaggggctgctgggctcaccccctcagctctgagtctgcacttagctttcatttgcaaatgataaattctgccttgcacaggcgtgctggctgcagggcagtgcaaattcaatccttttcaagtctggccaaaaacatgccccaaattaagagattgcagcctatttacaatacaaaataaaataactctaggagggcttggtggtggtatgaataaatgccgtttattctctttctgacgggataattttcaaagcagtgatttttataaaaactcaggaagaaaacaattttgtttcatttccataacagaatccagaccttgagcttcaccctgcgatcagtgattacacacacaccgcaccgtttcggctgcagcggctcctgctgtccaccggctcccgtcctccctgcctgtaaccgtctgtggtgattcgcggcactgcaggaccatgatggcccggatctgctcggacgctccgcctcagcttctcatggccgccctcgctattgccacccctgcccaggctgcatcaaggaggtcaggggccaggggagaactcttttgttattgagaagtttgantgcaagacctgacccttcctgtgtggacggatgggcagatgcccagactggaaagtccttgtgaacttatgcgcccaggccaggtccatatcatcagctcgtagaagccagcacagcccagtgattcatatgcccaggccaggtccatatcatcagttcgtagaagctagcacagaccagtgattcatatgcccaggccaggtccatatcatcagctcacagaagccagcacagcccagcgagtagccctacagactccacgtggcccatgagtatcacggtcactgcactgggagccccacctgtagcttcgggtggaaactaggtacagaatacagaagcacgcatcctacccgcaccatactcgtggcctgatgtgagcagattactgccgcagacttcgaaggggatgagatgctggctgcgtacaggatcctgtttcttaaagcgagagccactgcaccccagagccccagccgcctgcgccagacaaccttccccagagaaaggtgcccgagtcggcgatcaaaacgctctcggctcacacggcctttgaagccgcacatgggcagcccctgcgtatgga

SEQ ID NO: 282698 - DNA, 1980 bp, Homo sapiens
  misc_feature (1453)..(1453): n is a, c, g, or t
gttttcttttcctttctttctctctctctcgcttctctcctctccttttctctctctttcgcaataaagacaggaaaaaggcggggggaaacatggagaaagcttcccacggataatcccatggagtctaaaagggacatgccgagggctggcagggctgggaggcctttgggaagctcagaggagccgcggggagccgggcgtacgagagcaggccgggactccgctgggcgaggccgagcagggacaccagctcctcacccagttgaaacttgcggtcactggagaggagcaacgcaggagctgatctggtttgaaaaagaggtcaaagcactttacagctcccatttcccagcgccgaggagtggtgagttttccgtgttccaagccccactgttctgcctccgggagagtttgcagctgctttcggggaaggtggctggctctgctcacctgctctgccctccctgacaagagcacctgctgtgtgcccacacttcggctcccgaggtctactttgctcctcctgacaccccaggaggctggcccctcctggctctggaggagacatgaggctcaggagagctgcatctgtgccagcgacagcaggtgcatcccacaccagggcaggggtctgcaccggcctcctgtctgtcttcttccttttggaaaacaatgggaagaaaacacatcctgccggtggctgtacctcaggaagccccacggcctgcactgttccctgcccatgccaacaggctaccctctctgcccgcgtccacgtggggagcttttccatcagcatctgcacacccagacgtgagggtgcagctctcatctgctgtgcctcagatctggatttaacacttgggaggggctgctgggctcaccccctcagctctgagtctgcacttagctttcatttgcaaatgataaattctgccttgcacaggcgtgctggctgcagggcagtgcaaattcaatccttttcaagtctggccaaaaacatgccccaaattaagagattgcagcctatttacaatacaaaataaaataactctaggagggcttggtggtggtatgaataaatgccgtttattctctttctgacgggataattttcaaagcagtgatttttataaaaactcaggaagaaaacaattttgtttcatttccataacagaatccagaccttgagcttcaccctgcgatcagtgattacacacacaccgcaccgtttcggctgcagcggctcctgctgtccaccggctcccgtcctccctgcctgtaaccgtctgtggtgattcgcggcactgcaggaccatgatggcccggatctgctcggacgctccgcctcagcttctcatggccgccctcgctattgccacccctgcccaggctgcatcaaggaggtcaggggccaggggagaactcttttgttattgagaagtttgantgcaagacctgacccttcctgtgtggacggatgggcagatgcccagactggaaagtccttgtgaacttatgcgcccaggccaggtccatatcatcagctcgtagaagccagcacagcccagtgattcatatgcccaggccaggtccatatcatcagctcacagaagccagcacagcccagcgagtagccctacagactccacgtggcccatgagtatcacggtcactgcactgggagccccacctgtagcttcgggtggaaactaggtacagaatacagaagcacgcatcctacccgcaccatactcgtggcctgatgtgagcagattactgccgcagacttcgaaggggatgagatgctggctgcgtacaggatcctgtttcttaaagcgagagccactgcaccccagagccccagccgcctgcgccagacaaccttccccagagaaaggtgcccgagtcggcgatcaaaacgctctcggctcacacggcctttgaagccgcacatgggcagcccctgcgtatgga

SEQ ID NO: 282699 - DNA, 1464 bp, Homo sapiens
gagccgctgggcaacagcccaatgggcctggagagagctggcttcccaccgggcctgggatcggacctgcagggctgtgctgggcctgtggcgtcagtggctgctgcagtcacggctggtggagcggtgggcccaggagcggggctggcggctggcacgagatgccctatgccactggcactcctgttggcaggcagttcctgcatgaaaagtgccagacatgggtgcaggtccacctccagggcctgcagaaggtggtgttccggagctggcagcaggcagcagctcatcagagatgcacagtgacccggccagagcagctgctactgcagagctacttccaggcctggtgtgaggttgtaagagacacgggggtgctccgggcccagcatcaagcctttcaggatggcctgaggagaagagcactgggggccgtgtttgccacatggcgggaagcccaggaagtggcagccggggcacaggagcagcgtgtggcccaggcctcccttgcccgctggagaagctgcgggcagcaaggccaggaagatgggcagcagcagaaggcccgggccccacaggccttcccagcatggccagtggccccgggcatgcaccatgaggcccagcagcaggcaggagagagcgctggggcccaggcagcccagtgctggacttggtgctgggctctgtgggtgcatgagtcctgtcggggccaggtcagccgagcccatgcttcctggaagccgcgagcctgggtcctagaggcctcggtgcagtcggcggtgcgcggcggtgtccagcgagccatctcacccagctccggccggctgagctcaggcgcttcctgcggacagtgcagctcagggtgcggctgggactgccaggggccggcaagacccgcagctgctggacacaggccacagagctggtgcctcccgcgccatcactgcagtgcagcctgggtggacggaggaagccaaggggaacggcctgggctcagagtaaggagaccttgccccgggggacaaacggtgtctgaagtgcaggggtgaagcggtctccagtcctcaggggcctggaaatcagctccttgggacacggtcttatgtgtattgaccattctccccatccattccctcttcggaatgtttcagctgttctgagaaaacactttgcattcctgccccgcccctgtgatttctctttgggcggcaggcagccgggagaggctggaggcctggggagatgggggcagggcacaaggctaagctcagcaccttcctccaccctcctcactgtactcaactcctaggcgggcactaagagcagctgccttcctggacccaccttaacctcttgtgactcaactcccctttccagggtgcagggaacattccctctgccctgccttccagctctggccacagtggcctggacagagtagctgggtcccaggcctgcccc

SEQ ID NO: 282700 - DNA, 633 bp, Homo sapiens
cacaggccccacttccttctgaggagagctcccttctggccaggcctatttcaagtttgagggatgaagaatccacacaatggggctgacagtgaccaaactagaggagacatatatactccagcccaattctgcactgaaggacaaggactgctgcaaaagaaatgagtgagaccctcaaaataaatgaaaggcacacagctcagccactaaggagatggacaagccatgtcaacctctgatctgctactttttgcatctataaaatggtaacactgctacttatacctcaggatgttgtgaggattaaaaattgagtaagctaagtgcctggtgcagtcctggcacagtcactaagcatttactatccttatgcagtttctttttgtaatgctaactgccctccaaattcctccaaagtaaacacatggattagtaaatgagaaagaaacaatgcttaaaacaactatgggtaacatacctgtttcaagtcgcgtagaatactgatataagaaatataaattgaccaaataaagaaatccagttcctggacccacagggaaataaaaggtggcagtgattggcctccaaatctgtccagatcaaaataaacacagctgttagtttctgtaa

SEQ ID NO: 282701 - DNA, 1202 bp, Homo sapiens
agcagcacctttgagcgatggcggcgtctggggaaccccagaggcagtggcaagaggaggtggcggcggtggtagtggtgggctcctgcatgaccgacctggtcagtcttacttctcgtttgccaaaaactggagaaaccatccatggacataagttttttattggctttggagggaaaggtgccaaccagtgtgtccaagctgctcggcttggagcaatgacgtccatggtgtgtaaggttggcaaagattcttttggcaatgattatatagaaaacttaaaacagaatgatatttctacagaatttacatatcagactaaagatgctgctacaggaactgcttctataattgtcaataatgaaggccagaatatcattgtcatagtggctggagcaaatttacttttgaatacggaggatctgagggcagcagccaatgtcattagcagagccaaagtcatggtctgccagctcgaaataactccagcaacttctttggaagccctaacaatggcccgcaggagtggagtgaaaaccttgttcaatccagcccctgccattgctgacctggatccccagttctacaccctctcagatgtgttctgctgcaatgaaagtgaggctgagattttaactggcctcacggtgggcagcgctgcagatgctggggaggctgcattagtgctcttgaaaaggggctgccaggtggtaatcattaccttaggggctgaaggatgtgtggtgctgtcacagacagaacctgagccaaagcacattcccacagagaaagtcaaggctgtggataccacgggtgctggtgacagctttgtgggagctctggccttctacctggcttactatccaaatctgtccttggaagacatgctcaacagatccaatttcattgcagcagtcagtgtccaggctgcaggaacacagtcatcttacccttacaaaaaagaccttccgcttactctgttttgattgctattagtcccaaaataaatatacctgggaataaaatgtacttgggggtggctgctcctggctaatgcttattagaaaatgtcctcgtcccctttctttgcaaatattagttcttttacgaagtcatcctcaagcttcaatttatttataacgatgattcttttgctttccatgcatttgcacaaaacaaccagaattaaagattccacaacc

SEQ ID NO: 282702 - DNA, 1326 bp, Homo sapiens
aaaatgatgaaaaggaaaaaaaataacaatagtttaccagttttcatccaccagattagcaaacatttaaaaatatgataactctgaacgttagcaagaacatgaaaaagtgggaactcttaaacacaaattgtaggaacttaaattggtacagccaatttggaagaaactgtggcatcttctagaaaaatagtatgtatattctttttttttttttttttttgagatggagtctcgctctgtcacccaggctagagtgcagtggtgcgatatctcagctcactgcaacctctgcctcccaggctccaagcaattctcctgcctcagcctcccaagtagctgggattacaggcgtgcaccaccatgcctggctaatttttgtatttttatagagatggggtttcaccatgttggccaggatggtcttgatctcttgaccttgtattctgcccacctcagcctcccaaagtactaggattacaggcatgagccaccatgcctggccttttttttttgagacagagtctcgctcagttgcccaggctcgagtgcagtggcgtgatttcagctcactgcaatctccacctcccaggttcaagcaattctcctgcctcaacctcccgagtagttgagactacaggcccccgccaccacacccagctgattttttttgtttttttagtagagacagggtttcaccatattggccaggctagtcttgaactcctgacctcaggtgatccacctgcctcggcctcccaaagtgctgagattacaggtgtgagccatggcgcctggcaaaatagtttataatttaaaaaataaattttctctttctagaactagagatagaaaaaataataaaaatttttttcagcaaaagaggggtcatgatagggagaagtgagaggggggcacaaaagtacacattggaggaaataatgaaattcatttcagttcaacaacaaacttactgagaacagatgaatgaaaccttgcctgtcctataaggaatacagtcatctgccagaagaaaaatggtgattcttcccagtccaaaggtgaagatggtgactgtgaaagtatcagctttagccagaccactgatgaagctcccagatgtcacagcatccatgggcttgtgatctcaggtgaaggcgttgaaccctgagccctggattcccatctcttcacttgctccctccaccaccccacccccatattcagaatggcctctaggcttctaggtttgtgtctttaatggcacctaggcaataaataaaaaatacagtgcagtgctgactgcatcttccctacagctctttg

SEQ ID NO: 282703 - DNA, 681 bp, Homo sapiens
aagaaaacagatgtaggggaggacttcctgagtaaaacacaaaaagcacaaagtaaaaggtaaaatattatttcaggctgggcgtggtgcttcacgcctgtaatcccagcactttgggaggccgagattacaggtgtgagccatggcgcctggcaaaatagtttataatttaaaaaataaattttctctttctagaactagagatagaaaaaataataaaaatttttttcagcaaaagaggggtcatgatagggagaagtgagaggggggcacaaaagtacacattggaggaaataatgaaattcatttcagttcaacaacaaacttactgagaacagatgaatgaaaccttgcctgtcctataaggaatacagtcatctgccagaagaaaaatggtgattcttcccagtccaaaggtgaagatggtgactgtgaaagtatcagctttagccagaccactgatgaagctcccagatgtcacagcatccatgggcttgtgatctcaggtgaaggcgttgaaccctgagccctggattcccatctcttcacttgctccctccaccaccccacccccatattcagaatggcctctaggcttctaggtttgtgtctttaatggcacctaggcaataaataaaaaatacagtgcagtgctgactgcatcttccctacagctctttg

SEQ ID NO: 282704 - DNA, 464 bp, Homo sapiens
tttttttttacttaaactggtcttgtagtctttattgactgtttgtaccaaattgactccaggagaaatggaaaatctaattagatctataactcttcaagacattgaaattacagctttaaattttacaataaagaatattctggccaggcatggtggctcacgcgtgtaatcccactgcactccggcctgggcaatagggcaagactccgtctcaaaaaaaccagaatattctaggctcaaatggtattacagatgagtctaccaaacattcaaggagcaattaattccaatcttaaattcttcaaataataattaaaaaaaggctgggtgcagtggctcatgcctgtaattccagcactttgggagcccgaggtgggtggatcgtgaggtcaggagatcgagaccctcctggctaacacggtgaaaccctatcgctactaaaaatacaaaaaattatctgg

SEQ ID NO: 282705 - DNA, 1239 bp, Homo sapiens
aaaatgatgaaaaggaaaaaaaataacaatagtttaccagttttcatccaccagattagcaaacatttaaaaatatgataactctgaacgttagcaagaacatgaaaaagtgggaactcttaaacacaaattgtaggaacttaaattggtacagccaatttggaagaaactgtggcatcttctagaaaaatagtatgtatattctttttttttttttttttttgagatggagtctcgctctgtcacccaggctagagtgcagtggtgcgatatctcagctcactgcaacctctgcctcccaggctccaagcaattctcctgcctcagcctcccaagtagctgggattacaggcgtgcaccaccatgcctggctaatttttgtatttttagtaaagacagggtttcactatgttggccaggctggtctcaaactcctggcctcaagtgatgcgctcgcctcggcctcccaaagtgttaggattacaggcatgagccaccacacccagccccagcaggattttctaggctaaatcctagaaaatcttgcttgtgaaaatgtacaaaaaagttcagaggctcgttgtttttaatagcaaaaacctaggaacaccaaatacccatttggagaagaatgtgtaactaaatggtggcatatttacatcgtgggatgaaagtgtattattaataactggcatgtcatccatccgcatggataaatctcacatttggtgaacaaggaaaggaatctgcagaatacaaacgctgtaacgctgtttacataaaatataaaaccatgtaaaactacacagtatgctggtggaggtgcatacatatgtagtaaatgtatagagaaaagctaaaagcaagaagttcaaaattcaaaatgctggttatttctggtgggggaaggggagactgcaattcagggcacaaagggaccactataagggatgataaggttttgcttcttaaactgggtggtaggcacatgagtggacatattatttgttaatccttttgtgcataataaaataatttttttttcttttttttgagatggagtctcactctgtcacccaggctggagtgcggtggtgcaatatcggctcactgcaacttctgcctcccaggttcaagcaattctcctgcctcagcctcccgagtagctgggactacaggcccacgccaccacacccagctaaagcaggagaatcgcttgaacctgggagacggaggttg

SEQ ID NO: 282706 - DNA, 599 bp, Homo sapiens
tttttttttacttaaactggtcttgtagtctttattgactgtttgtaccaaattgactccaggagaaatggaaaatctaattagatctataactcttcaagacattgaaattacagctttaaattttacaataaagaatattctggccaggcatggtggctcacgcgtgtaatcccactgcactccggcctgggcaatagggcaagactccgtctcaaaaaaaccagaatattctaggctcaaatggtattacagatgagtctaccaaacattcaaggagcaattaattccaatcttaaattcttcaaataataattaaaaaaaggctggaaactgggtggtaggcacatgagtggacatattatttgttaatccttttgtgcataataaaataatttttttttcttttttttgagatggagtctcactctgtcacccaggctggagtgcggtggtgcaatatcggctcactgcaacttctgcctcccaggttcaagcaattctcctgcctcagcctcccgagtagctgggactacaggcccacgccaccacacccagctaaagcaggagaatcgcttgaacctgggagacggaggttg

SEQ ID NO: 282707 - DNA, 1178 bp, Homo sapiens
aaaatgatgaaaaggaaaaaaaataacaatagtttaccagttttcatccaccagattagcaaacatttaaaaatatgataactctgaacgttagcaagaacatgaaaaagtgggaactcttaaacacaaattgtaggaacttaaattggtacagccaatttggaagaaactgtggcatcttctagaaaaatagtatgtatattctttttttttttttttttttgagatggagtctcgctctgtcacccaggctagagtgcagtggtgcgatatctcagctcactgcaacctctgcctcccaggctccaagcaattctcctgcctcagcctcccaagtagctgggattacaggcgtgcaccaccatgcctggctaatttttgtatttttagtaaagacagggtttcactatgttggccaggctggtctcaaactcctggcctcaagtgatgcgctcgcctcggcctcccaaagtgttaggattacaggcatgagccaccacacccagccccagcaggattttctaggctaaatcctagaaaatcttgcttgtgaaaatgtacaaaaaagttcagaggctcgttgtttttaatagcaaaaacctaggaacaccaaatacccatttggagaagaatgtgtaactaaatggtggcatatttacatcgtgggatgaaagtgtattattaataactggcatgtcatccatccgcatggataaatctcacatttggtgaacaaggaaaggaatctgcagaatacaaacgctgtaacgctgtttacataaaatataaaaccatgtaaaactacacagtatgctggtggaggtgcatacatatgtagtaaatgtatagagaaaagctaaaagcaagaagttcaaaattcaaaatgctggttatttctggtgggggaagaaactgggtggtaggcacatgagtggacatattatttgttaatccttttgtgcataataaaataatttttttttcttttttttgagatggagtctcactctgtcacccaggctggagtgcggtggtgcaatatcggctcactgcaacttctgcctcccaggttcaagcaattctcctgcctcagcctcccgagtagctgggactacaggcccacgccaccacacccagctaaagcaggagaatcgcttgaacctgggagacggaggttg

SEQ ID NO: 282708 - DNA, 476 bp, Homo sapiens
acttgggcatgccagcatgctgggatctccgttgctgccagctaacgtggattttcttctcttaaggtgtggacaaatcctccaagatttaacttccaagaaaaccggcggcggagcgggtggaggaggcgaggatgtgtggccaatgcacgcggagtgcaaggccgcctagttgggagccgcaagagcctgcctggtgtggcaggcacacggaacccaatccctgtctgtccgctgcggcctgggaggggagcgccggcctcaccagaggaaggagcacgaggggaggagttccgagaggaaataattagtgaaatatttgcagaagatgctgggatgtggatttaattccggatggacagtggtgcttctgattccctcagtctgtttccccacccacgatctcctctttccttggcctagacacaccaaaaataattcaataaaataaaaataaaaatttaaaaatcaaaaaa

SEQ ID NO: 282709 - DNA, 503 bp, Homo sapiens
gaagcggttgctgatgaactcgcagatgccgctcagggtcagcttcttctgcgggctctgcaggatggccatggtgatgagcgcgatgtacgagtgtggacaaatcctccaagatttaacttccaagaaaaccggcggcggagcgggtggaggaggcgaggatgtgtggccaatgcacgcggagtgcaaggccgcctagttgggagccgcaagagcctgcctggtgtggcaggcacacggaacccaatccctgtctgtccgctgcggcctgggaggggagcgccggcctcaccagaggaaggagcacgaggggaggagttccgagaggaaataattagtgaaatatttgcagaagatgctgggatgtggatttaattccggatggacagtggtgcttctgattccctcagtctgtttccccacccacgatctcctctttccttggcctagacacaccaaaaataattcaataaaataaaaataaaaatttaaaaatcaaaaaa

SEQ ID NO: 282710 - DNA, 507 bp, Homo sapiens
agcggggaagtctatccgggctttcgcgtcaccaccctgcccacctgggtggcgcgtggcttacgcaacggtcactgggctcctgggccgctcccgggccagcgagggctgcgaaagaagttgtaggtacggcccatttttcttaacgccgcccttccaagccctttggcgctagtcccgggtctgccgcgatcgtttccttgcggtaggccgcaggagggcctttcctccccctcagttcaatgggattcttgggctcttctcccagacgctgagggaacagccacagacattgtctctcctctccgtgactcctttccttactccgtcatcccacatctctcttgtttgttctcttttcctcctgtttttcttattttacaaatactcgccagtaagaaagaagagatctgtcagttaagattgacctcaaaattaattttattaagcgtgtactattttacaaacggtggatccctgcaaataaaccttcacatacatgatcct

SEQ ID NO: 282711 - DNA, 1581 bp, Homo sapiens
agcggggaagtctatccgggctttcgcgtcaccaccctgcccacctgggtggcgcgtggcttacgcaacggtcactgggctcctgggccgctcccgggccagcgagggctgcgaaagaagttgtagcatgcataccacagaatcaaaaaatgaacatttggaggatgaaaacttccaaacatctacaactcctcagagtctcattgatcctaataatactgcacatgaagaaactaaaactgtcttatcagatacagaagaaataaaaccacagacaaaaaaggagacatacatttcttgtcctctaagaggagtattgaatgtaattattacaaatggagttatactgtttgtgatatggtgtatgacctggtcaatcttaggctctgaagctctccctggtggaaatttatttgggttgttcattattttttatagtgccattattgggggaaaaattttacaactcattagaatacctttagtgcctccacttccacctcttcttgggatgttactggctggttttacgattaggaatgttccattcatcaatgaacatgtccatgttcctaacacatggtcttcaattttaagaagcattgcccttaccattattctaataagagctgggcttggactcgatccacaggctttgaggcatttgaaggtcgtttgtttcagattggctgtaggtccatgccttatggaggcaagtgcagctgctgttttttcacacttcattatgaaatttccctggcaatgggcatttctattaggttttgttctaggtgctgtctctcctgctgttgttgtcccttacatgatggtgctgcaagaaaatggatatggtgttgaggaaggcattccaaccttattaatggctgctagcagtatggatgacattctggctatcactggattcaatacatgcttgagcatagtcttttcctcaggtggtatacttaataacgccatagcctctataaggaacgtatgtattagtctgctggcaggaattgttttgggattttttgttcgatattttccaagtgaagaccagaaaaaacttacattgaagagaggattccttgttttgactatgtgtgtttctgccgtcttaggcagccaacgtattggtttacatggatctggaggattatgcacactagtgttgagtttcattgcagggacaaaatggtcccaagaaaagatgaaagtccaaaagattattacgactgtatgggatatttttcaaccacttctttttggtttagttggagcagaagtatctgtttcatcgcttgaatcaaatattgttggtaagaataattagagcacaaaaaatatgaaattcaaaaatatttaagaaaattataaatacatttatttttatttacaatatatctttggctacaacgaccttcttcagaaacacatgttgatacagtgtcatattttcatattgctcttcctttacactgggtgctcttttttttttataaaccaaggacagccctgaatatcttccctgagttatctgaagaaataaatataagatttctttcctgagggaacata

SEQ ID NO: 282712 - DNA, 1728 bp, Homo sapiens
agcggggaagtctatccgggctttcgcgtcaccaccctgcccacctgggtggcgcgtggcttacgcaacggtcactgggctcctgggccgctcccgggccagcgagggctgcgaaagaagttgtagcatgcataccacagaatcaaaaaatgaacatttggaggatgaaaacttccaaacatctacaactcctcagagtctcattgatcctaataatactgcacatgaagaaactaaaactgtcttatcagatacagaagaaataaaaccacagacaaaaaaggagacatacatttcttgtcctctaagaggagtattgaatgtaattattacaaatggagttatactgtttgtgatatggtgtatgacctggtcaatcttaggctctgaagctctccctggtggaaatttatttgggttgttcattattttttatagtgccattattgggggaaaaattttacaactcattagaatacctttagtgcctccacttccacctcttcttgggatgttactggctggttttacgattaggaatgttccattcatcaatgaacatgtccatgttcctaacacatggtcttcaattttaagaagcattgcccttaccattattctaataagagctgggcttggactcgatccacaggctttgaggcatttgaaggtcgtttgtttcagattggctgtaggtccatgccttatggaggcaagtgcagctgctgttttttcacacttcattatgaaatttccctggcaatgggcatttctattaggttttgttctaggtgctgtctctcctgctgttgttgtcccttacatgatggtgctgcaagaaaatggatatggtgttgaggaaggcattccaaccttattaatggctgctagcagtatggatgacattctggctatcactggattcaatacatgcttgagcatagtcttttcctcaggtggtatacttaataacgccatagcctctataaggaacgtatgtattagtctgctggcaggaattgttttgggattttttgttcgatattttccaagtgaagaccagaaaaaacttacattgaagagaggattccttgttttgactatgtgtgtttctgccgtcttaggcagccaacgtattggtttacatggatctggaggattatgcacactagtgttgagtttcattgcagggacaaaatggtcccaagaaaagatgaaagtccaaaagattattacgactgtatgggatatttttcaaccacttctttttggtttagttggagcagaagtatctgtttcatcgcttgaatcaaatattgttggctgtgttaggtcctctggctctagaaacagcaagagtctccgcaccccacttggaaccatatgcgaaggatgtgatgacagtagcatttttagccatcttgatcacagctccaaatggagctctacttatgggcattctggggcctaaaatgcttacacgccattatgatccaagcaaaataaaactgcagttgtcaacattagaacatcattaaaaagtttacctgtcatcatctgcctgcttcttttaatgaattatttcacatgacagaagaattttaaagtagaaatatgtggggactgtacagagaatccaggatttagtaaacatgtgatttcagtacagggcttttcttggactttttactccaaagttaatttaataaaaataatattaaatggaat

SEQ ID NO: 282713 - DNA, 1694 bp, Homo sapiens
agcggggaagtctatccgggctttcgcgtcaccaccctgcccacctgggtggcgcgtggcttacgcaacggtcactgggctcctgggccgctcccgggccagcgagggctgcgaaagaagttgtagcatgcataccacagaatcaaaaaatgaacatttggaggatgaaaacttccaaacatctacaactcctcagagtctcattgatcctaataatactgcacatgaagaaactaaaactgtcttatcagatacagaagaaataaaaccacagacaaaaaaggagacatacatttcttgtcctctaagaggagtattgaatgtaattattacaaatgggatgttactggctggttttacgattaggaatgttccattcatcaatgaacatgtccatgttcctaacacatggtcttcaattttaagaagcattgcccttaccattattctaataagagctgggcttggactcgatccacaggctttgaggcatttgaaggtcgtttgtttcagattggctgtaggtccatgccttatggaggcaagtgcagctgctgttttttcacacttcattatgaaatttccctggcaatgggcatttctattaggttttgttctaggtgctgtctctcctgctgttgttgtcccttacatgatggtgctgcaagaaaatggatatggtgttgaggaaggcattccaaccttattaatggctgctagcagtatggatgacattctggctatcactggattcaatacatgcttgagcatagtcttttcctcaggtggtatacttaataacgccatagcctctataaggaacgtatgtattagtctgctggcaggaattgttttgggattttttgttcgatattttccaagtgaagaccagaaaaaacttacattgaagagaggattccttgttttgactatgtgtgtttctgccgtcttaggcagccaacgtattggtttacatggatctggaggattatgcacactagtgttgagtttcattgcagggacaaaatggtcccaagaaaagatgaaagtccaaaagattattacgactgtatgggatatttttcaaccacttctttttggtttagttggagcagaagtatctgtttcatcgcttgaatcaaatattgttggcatatctgttgccactctaagtttggcattatgtgttcgaattttaaccacatatctattgatgtgctttgctggttttagttttaaggagaaaatatttattgctttagcatggatgcccaaagctacagtacaggctgtgttaggtcctctggctctagaaacagcaagagtctccgcaccccacttggaaccatatgcgaaggatgtgatgacagtagcatttttagccatcttgatcacagctccaaatggagctctacttatgggcattctggggcctaaaatgcttacacgccattatgatccaagcaaaataaaactgcagttgtcaacattagaacatcattaaaaagtttacctgtcatcatctgcctgcttcttttaatgaattatttcacatgacagaagaattttaaagtagaaatatgtggggactgtacagagaatccaggatttagtaaacatgtgatttcagtacagggcttttcttggactttttactccaaagttaatttaataaaaataatattaaatggaat

SEQ ID NO: 282714 - DNA, 1805 bp, Homo sapiens
aagtgctggtacgccccgggattacgggatctcccgggccagcgagggctgcgaaagaagttgtagcatgcataccacagaatcaaaaaatgaacatttggaggatgaaaacttccaaacatctacaactcctcagagtctcattgatcctaataatactgcacatgaagaaactaaaactgtcttatcagatacagaagaaataaaaccacagacaaaaaaggagacatacatttcttgtcctctaagaggagtattgaatgtaattattacaaatggagttatactgtttgtgatatggtgtatgacctggtcaatcttaggctctgaagctctccctggtggaaatttatttgggttgttcattattttttatagtgccattattgggggaaaaattttacaactcattagaatacctttagtgcctccacttccacctcttcttgggatgttactggctggttttacgattaggaatgttccattcatcaatgaacatgtccatgttcctaacacatggtcttcaattttaagaagcattgcccttaccattattctaataagagctgggcttggactcgatccacaggctttgaggcatttgaaggtcgtttgtttcagattggctgtaggtccatgccttatggaggcaagtgcagctgctgttttttcacacttcattatgaaatttccctggcaatgggcatttctattaggttttgttctaggtgctgtctctcctgctgttgttgtcccttacatgatggtgctgcaagaaaatggatatggtgttgaggaaggcattccaaccttattaatggctgctagcagtatggatgacattctggctatcactggattcaatacatgcttgagcatagtcttttcctcaggtggtatacttaataacgccatagcctctataaggaacgtatgtattagtctgctggcaggaattgttttgggattttttgttcgatattttccaagtgaagaccagaaaaaacttacattgaagagaggattccttgttttgactatgtgtgtttctgccgtcttaggcagccaacgtattggtttacatggatctggaggattatgcacactagtgttgagtttcattgcagggacaaaatggtcccaagaaaagatgaaagtccaaaagattattacgactgtatgggatatttttcaaccacttctttttggtttagttggagcagaagtatctgtttcatcgcttgaatcaaatattgttggcatatctgttgccactctaagtttggcattatgtgttcgaattttaaccacatatctattgatgtgctttgctggttttagttttaaggagaaaatatttattgctttagcatggatgcccaaagctacagtacaggctgtgttaggtcctctggctctagaaacagcaagagtctccgcaccccacttggaaccatatgcgaaggatgtgatgacagtagcatttttagccatcttgatcacagctccaaatggagctctacttatgggcattctggggcctaaaatgcttacacgccattatgatccaagcaaaataaaactgcagttgtcaacattagaacatcattaaaaagtttacctgtcatcatctgcctgcttcttttaatgaattatttcacatgacagaagaattttaaagtagaaatatgtggggactgtacagagaatccaggatttagtaaacatgtgatttcagtacagggcttttcttggactttttactccaaagttaatttaataaaaataatattaaatggaat

SEQ ID NO: 282715 - DNA, 1737 bp, Homo sapiens
agcggggaagtctatccgggctttcgcgtcaccaccctgcccacctgggtggcgcgtggcttacgcaacggtcactgggctcctgggccgctcccgggccagcgagggctgcgaaagaagttgtagcatgcataccacagaatcaaaaaatgaacatttggaggatgaaaacttccaaacatctacaactcctcagagtctcattgatcctaataatactgcacatgaagaaactaaaactgtcttatcagatacagaagaaataaaaccacagacaaaaaaggagacatacatttcttgtcctctaagaggagtattgaatgtaattattacaaatggagttatactgtttgtgatatggtgtatgacctggtcaatcttaggctctgaagctctccctggtggaaatttatttgggttgttcattattttttatagtgccattattgggggaaaaattttacaactcattagaatacctttagtgcctccacttccacctcttcttgggatgttactggctggttttacgattaggaatgttccattcatcaatgaacatgtccatgttcctaacacatggtcttcaattttaagaagcattgcccttaccattattctaataagagctgggcttggactcgatccacagttttgttctaggtgctgtctctcctgctgttgttgtcccttacatgatggtgctgcaagaaaatggatatggtgttgaggaaggcattccaaccttattaatggctgctagcagtatggatgacattctggctatcactggattcaatacatgcttgagcatagtcttttcctcaggtggtatacttaataacgccatagcctctataaggaacgtatgtattagtctgctggcaggaattgttttgggattttttgttcgatattttccaagtgaagaccagaaaaaacttacattgaagagaggattccttgttttgactatgtgtgtttctgccgtcttaggcagccaacgtattggtttacatggatctggaggattatgcacactagtgttgagtttcattgcagggacaaaatggtcccaagaaaagatgaaagtccaaaagattattacgactgtatgggatatttttcaaccacttctttttggtttagttggagcagaagtatctgtttcatcgcttgaatcaaatattgttggcatatctgttgccactctaagtttggcattatgtgttcgaattttaaccacatatctattgatgtgctttgctggttttagttttaaggagaaaatatttattgctttagcatggatgcccaaagctacagtacaggctgtgttaggtcctctggctctagaaacagcaagagtctccgcaccccacttggaaccatatgcgaaggatgtgatgacagtagcatttttagccatcttgatcacagctccaaatggagctctacttatgggcattctggggcctaaaatgcttacacgccattatgatccaagcaaaataaaactgcagttgtcaacattagaacatcattaaaaagtttacctgtcatcatctgcctgcttcttttaatgaattatttcacatgacagaagaattttaaagtagaaatatgtggggactgtacagagaatccaggatttagtaaacatgtgatttcagtacagggcttttcttggactttttactccaaagttaatttaataaaaataatattaaatggaat

SEQ ID NO: 282716 - DNA, 1865 bp, Homo sapiens
agcggggaagtctatccgggctttcgcgtcaccaccctgcccacctgggtggcgcgtggcttacgcaacggtcactgggctcctgggccgctcccgggccagcgagggctgcgaaagaagttgtagcatgcataccacagaatcaaaaaatgaacatttggaggatgaaaacttccaaacatctacaactcctcagagtctcattgatcctaataatactgcacatgaagaaactaaaactgtcttatcagatacagaagaaataaaaccacagacaaaaaaggagacatacatttcttgtcctctaagaggagtattgaatgtaattattacaaatggagttatactgtttgtgatatggtgtatgacctggtcaatcttaggctctgaagctctccctggtggaaatttatttgggttgttcattattttttatagtgccattattgggggaaaaattttacaactcattagaatacctttagtgcctccacttccacctcttcttgggatgttactggctggttttacgattaggaatgttccattcatcaatgaacatgtccatgttcctaacacatggtcttcaattttaagaagcattgcccttaccattattctaataagagctgggcttggactcgatccacaggctttgaggcatttgaaggtcgtttgtttcagattggctgtaggtccatgccttatggaggcaagtgcagctgctgttttttcacacttcattatgaaatttccctggcaatgggcatttctattaggttttgttctaggtgctgtctctcctgctgttgttgtcccttacatgatggtgctgcaagaaaatggatatggtgttgaggaaggcattccaaccttattaatggctgctagcagtatggatgacattctggctatcactggattcaatacatgcttgagcatagtcttttcctcaggtggtatacttaataacgccatagcctctataaggaacgtatgtattagtctgctggcaggaattgttttgggattttttgttcgatattttccaagtgaagaccagaaaaaacttacattgaagagaggattccttgttttgactatgtgtgtttctgccgtcttaggcagccaacgtattggtttacatggatctggaggattatgcacactagtgttgagtttcattgcagggacaaaatggtcccaagaaaagatgaaagtccaaaagattattacgactgtatgggatatttttcaaccacttctttttggtttagttggagcagaagtatctgtttcatcgcttgaatcaaatattgttggcatatctgttgccactctaagtttggcattatgtgttcgaattttaaccacatatctattgatgtgctttgctggttttagttttaaggagaaaatatttattgctttagcatggatgcccaaagctacagtacaggctgtgttaggtcctctggctctagaaacagcaagagtctccgcaccccacttggaaccatatgcgaaggatgtgatgacagtagcatttttagccatcttgatcacagctccaaatggagctctacttatgggcattctggggcctaaaatgcttacacgccattatgatccaagcaaaataaaactgcagttgtcaacattagaacatcattaaaaagtttacctgtcatcatctgcctgcttcttttaatgaattatttcacatgacagaagaattttaaagtagaaatatgtggggactgtacagagaatccaggatttagtaaacatgtgatttcagtacagggcttttcttggactttttactccaaagttaatttaataaaaataatattaaatggaat

SEQ ID NO: 282717 - DNA, 1545 bp, Homo sapiens
agcggggaagtctatccgggctttcgcgtcaccaccctgcccacctgggtggcgcgtggcttacgcaacggtcactgggctcctgggccgctcccgggccagcgagggctgcgaaagaagttgtagcatgcataccacagaatcaaaaaatgaacatttggaggatgaaaacttccaaacatctacaactcctcagagtctcattgatcctaataatactgcacatgaagaaactaaaactgtcttatcagatacagaagaaataaaaccacagacaaaaaaggagacatacatttcttgtcctctaagaggagtattgaatgtaattattacaaatgttttgttctaggtgctgtctctcctgctgttgttgtcccttacatgatggtgctgcaagaaaatggatatggtgttgaggaaggcattccaaccttattaatggctgctagcagtatggatgacattctggctatcactggattcaatacatgcttgagcatagtcttttcctcaggtgtggcctccgtctttcacccaggctggagtgtggtgtcacgatctcagctcactgcaaactctgcctcccgggttcaagtgattctcctccctcagcctcccgagtacctgggaccacaggtggtatacttaataacgccatagcctctataaggaacgtatgtattagtctgctggcaggaattgttttgggattttttgttcgatattttccaagtgaagaccagaaaaaacttacattgaagagaggattccttgttttgactatgtgtgtttctgccgtcttaggcagccaacgtattggtttacatggatctggaggattatgcacactagtgttgagtttcattgcagggacaaaatggtcccaagaaaagatgaaagtccaaaagattattacgactgtatgggatatttttcaaccacttctttttggtttagttggagcagaagtatctgtttcatcgcttgaatcaaatattgttggcatatctgttgccactctaagtttggcattatgtgttcgaattttaaccacatatctattgatgtgctttgctggttttagttttaaggagaaaatatttattgctttagcatggatgcccaaagctacagtacaggctgtgttaggtcctctggctctagaaacagcaagagtctccgcaccccacttggaaccatatgcgaaggatgtgatgacagtagcatttttagccatcttgatcacagctccaaatggagctctacttatgggcattctggggcctaaaatgcttacacgccattatgatccaagcaaaataaaactgcagttgtcaacattagaacatcattaaaaagtttacctgtcatcatctgcctgcttcttttaatgaattatttcacatgacagaagaattttaaagtagaaatatgtggggactgtacagagaatccaggatttagtaaacatgtgatttcagtacagggcttttcttggactttttactccaaagttaatttaataaaaataatattaaatggaat

SEQ ID NO: 282718 - DNA, 2162 bp, Homo sapiens
  misc_feature (37)..(37): n is a, c, g, or t
gcgcgcggtagcgcgggcccctcagtgcacaatggcnagagcaggcggcggagccccagccccacccagtgcggagcgcgccgcgagccccgccgcaagctgagcgcctccgcccgccaggcgcgccggcgccgggccatgtactcggggaaccgcagcggcggccacggctactgggacggcggcggggccgcgggcgctgaggggccggcgccggcggggacactgagccccgcgcccctcttcagccccggcacctacgagcgcctggcgctgctgctgggctccattgggctgctgggcgtcggcaacaacctgctggtgctcgtcctctactacaagttccagcggctccgcactcccactcacctcctcctggtcaacatcagcctcagcgacctgctggtgtccctcttcggggtcacctttaccttcgtgtcctgcctgaggaacggctgggtgtgggacaccgtgggctgcgtgtgggacgggtttagcggcagcctcttcgggattgtttccattgccaccctaaccgtgctggcctatgaacgttacattcgcgtggtccatgccagagtgatcaatttttcctgggcctggagggccattacctacatctggctctactcactggcgtgggcaggagcacctctcctgggatggaacaggtacatcctggacgtacacggactaggctgcactgtggactggaaatccaaggatgccaacgattcctcctttgtgcttttcttatttcttggctgcctggtggtgcccctgggtgtcatagcccattgctatggccatattctatattccattcgaatgcttcgttgtgtggaagatcttcagacaattcaagtgatcaagattttaaaatatgaaaagaaactggccaaaatgtgctttttaatgatattcaccttcctggtctgttggatgccttatatcgtgatctgcttcttggtggttaatggtcatggtcacctggtcactccaacaatatctattgtttcgtacctctttgctaaatcgaacactgtatacaatccagtgatttatgtcttcatgatcagaaagtttcgaagatcccttttgcagcttctgtgcctccgactgctgaggtgccagaggcctgctaaagacctaccagcagctggaagtgaaatgcagatcagacccattgtgatgtcacagaaagatggggacaggccaaagaaaaaagtgactttcaactcttcttccatcatttttatcatcaccagtgatgaatcactgtcagttgacgacagcgacaaaaccaatgggtccaaagttgatgtaatccaagttcgtcctttgtaggaatgaagaatggcaacgaaagatggggccttaaattggatgccacttttggactttcatcataagaagtgtctggaatacccgttctatgtaatatcaacagaaccttgtggtccagcaggaaatccgaattgcccatatgctcttgggcctcaggaagaggttgaacaaaaacaaattcttttaattcaacgggtgctttacataatgaaaaaaccacttgtggcacacgatgggcatctaacatcatcatcttctaatgtgttggagattttcatttcaaatatattttttaaattactctattttccaaaacacgtaatgcatttttctcgaaaataccttactgtaaaaataactgtcgcgtacacatgtgtgaagtagctagaacatactgaattttttttgtactgttggactctattcagtgtcatgtcctatatctgatcaagttatcaaggagataattctagaatgaaaaagaaaatcctcttgttggaaacaaaagacgttttatatgtgcagtatgacaaagaggagtttcagagacaactttgaatccttgtcagcctggagaccagcaccagaggaatctacaaggcaaactcccatatatttgcttcccccaaattgctgcccctacagactcaaagctctttttctttgttttgttgtttctctaaaaatttactgttctttgtcgatgctatataagccagggagttctaagacgccagctctttgagatttgctcattcccctgtatttcccacatatatattacatatacccgctaataaatttatgtttgtttt

SEQ ID NO: 282719 - DNA, 2409 bp, Homo sapiens
  misc_feature (37)..(37): n is a, c, g, or t
gcgcgcggtagcgcgggcccctcagtgcacaatggcnagagcaggcggcggagccccagccccacccagtgcggagcgcgccgcgagccccgccgcaagctgagcgcctccgcccgccaggcgcgccggcgccgggccatgtactcggggaaccgcagcggcggccacggctactgggacggcggcggggccgcgggcgctgaggggccggcgccggcggggacactgagccccgcgcccctcttcagccccggcacctacgagcgcctggcgctgctgctgggctccattgggctgctgggcgtcggcaacaacctgctggtgctcgtcctctactacaagttccagcggctccgcactcccactcacctcctcctggtcaacatcagcctcagcgacctgctggtgtccctcttcggggtcacctttaccttcgtgtcctgcctgaggaacggctgggtgtgggacaccgtgggctgcgtgtgggacgggtttagcggcagcctcttcgggattgtttccattgccaccctaaccgtgctggcctatgaacgttacattcgcgtggtccatgccagagtgatcaatttttcctgggcctggagggccattacctacatctggctctactcactggcgtgggcaggagcacctctcctgggatggaacagcttcgttgtgtggaagatcttcagacaattcaagtgatcaagattttaaaatatgaaaagaaactggccaaaatgtgctttttaatgatattcaccttcctggtctgttggatgccttatatcgtgatctgcttcttggtggttaatggtcatggtcacctggtcactccaacaatatctattgtttcgtacctctttgctaaatcgaacactgtatacaatccagtgatttatgtcttcatgatcagaaagtttcgaagatcccttttgcagcttctgtgcctccgactgctgaggtgccagaggcctgctaaagacctaccagcagctggaagtgaaatgcagatcagacccattgtgatgtcacagaaagatggggacaggccaaagaaaaaagtgactttcaactcttcttccatcatttttatcatcaccagtgatgaatcactgtcagttgacgacagcgacaaaaccaatgggtccaaagttgatgtaatccaagttcgtcctttgtaggaatgaagaatggcaacgaaagatggggccttaaattggatgccacttttggactttcatcataagaagtgtctggaatacccgttctatgtaatatcaacagaaccttgtggtccagcaggaaatccgaattgcccatatgctcttgggcctcaggaagaggttgaacaaaaacaaattcttttaattcaacgggtgctttacataatgaaaaaaccacttgtggcacacgatgggcatctaacatcatcatcttctaatgtgttggagattttcatttcaaatatattttttaaattactctattttccaaaacacgtaatgcatttttctcgaaaataccttactgtaaaaataactgtcgcgtacacatgtgtgaagtagctagaacatactgaattttttttgtactgttggactctattcagtgtcatgtcctatatctgatcaagttatcaaggagataattctagaatgaaaaagaaaatcctcttgttggaaacaaaagacgttttatatgtgcagtatgacaaagaggagtttcagagacaactttgaatccttgtcagcctggagaccagcaccagaggaatctacaaggcaaactcccatatatttgcttcccccaaattgctgcccctacagactcaaagctctttttctttgttttgttgtttctctaaaaatttactgttctttgtcgatgctatataagccagggagttctaagacgccagctctttgagatttgctcattcccctgtatttcccacatatatattacatatacccgctaataaatttatgtttgtttttctcttgtcaatctgtcttttgttataggggccccagccaaggaacctaaagtgggtagaaggaaaaattattttttctttccctacaaactgaacatggattattagaactcaaggttttcattgacaatatagaaaagaaacactgaatcattttattttattgcccaatttttatttcttatatgactctagtgtttcatcttcataattaatcatgtttgaaggatttctgagtgactcagcagcctgttaaagaaggatgaaccaaagaaaacatttcactaaatgtgcttttaaaaatcaagtgtattgctggttctgctgcagtatgtagtcgaagaataaattagtaaattgcttctgagggtctgaaattgaataaagtaatggctttgtatttctat

SEQ ID NO: 282720 - DNA, 2127 bp, Homo sapiens
  misc_feature (283)..(283): n is a, c, g, or t
  misc_feature (361)..(361): n is a, c, g, or t
gtagtacccatctctcgtggggtcagcgtgttagccctatcgtatggttcatggtcatagcaatggagatcgagtatgcgtggttgttgccgtacgacaggatgtccgtgtggtcgatggtagcgtaagctggcgtttgtgaattgcgtccagcccatctatacagaaagcgacctcgtgcagcgtcatagttggagcgattgcttgaaacgatgactactcaggactagtggaagtctcctggagcgtggtacacttgaccatgcgatctcataccttacantaggagattgctcacagacgactgacgtctctggctattcaagacttacccgacacgtaggcttgggagaccttacangcctttccgtttagtagtcgagaacgactccttcaggaccaaattcaaagttgactcaacgaattttttaaaacactacttgaaaatgaaactggccaaaatgtgctttttaatgatattcaccttcctggtctgttggatgccttatatcgtgatctgcttcttggtggttaatggtcatggtcacctggtcactccaacaatatctattgtttcgtacctctttgctaaatcgaacactgtatacaatccagtgatttatgtcttcatgatcagaaagtttcgaagatcccttttgcagcttctgtgcctccgactgctgaggtgccagaggcctgctaaagacctaccagcagctggaagtgaaatgcagatcagacccattgtgatgtcacagaaagatggggacaggccaaagaaaaaagtgactttcaactcttcttccatcatttttatcatcaccagtgatgaatcactgtcagttgacgacagcgacaaaaccaatgggtccaaagttgatgtaatccaagttcgtcctttgtaggaatgaagaatggcaacgaaagatggggccttaaattggatgccacttttggactttcatcataagaagtgtctggaatacccgttctatgtaatatcaacagaaccttgtggtccagcaggaaatccgaattgcccatatgctcttgggcctcaggaagaggttgaacaaaaacaaattcttttaattcaacgggtgctttacataatgaaaaaaccacttgtggcacacgatgggcatctaacatcatcatcttctaatgtgttggagattttcatttcaaatatattttttaaattactctattttccaaaacacgtaatgcatttttctcgaaaataccttactgtaaaaataactgtcgcgtacacatgtgtgaagtagctagaacatactgaattttttttgtactgttggactctattcagtgtcatgtcctatatctgatcaagttatcaaggagataattctagaatgaaaaagaaaatcctcttgttggaaacaaaagacgttttatatgtgcagtatgacaaagaggagtttcagagacaactttgaatccttgtcagcctggagaccagcaccagaggaatctacaaggcaaactcccatatatttgcttcccccaaattgctgcccctacagactcaaagctctttttctttgttttgttgtttctctaaaaatttactgttctttgtcgatgctatataagccagggagttctaagacgccagctctttgagatttgctcattcccctgtatttcccacatatatattacatatacccgctaataaatttatgtttgtttttctcttgtcaatctgtcttttgttataggggccccagccaaggaacctaaagtgggtagaaggaaaaattattttttctttccctacaaactgaacatggattattagaactcaaggttttcattgacaatatagaaaagaaacactgaatcattttattttattgcccaatttttatttcttatatgactctagtgtttcatcttcataattaatcatgtttgaaggatttctgagtgactcagcagcctgttaaagaaggatgaaccaaagaaaacatttcactaaatgtgcttttaaaaatcaagtgtattgctggttctgctgcagtatgtagtcgaagaataaattagtaaattgcttctgagggtctgaaattgaataaagtaatggctttgtatttctat

SEQ ID NO: 282721 - DNA, 2569 bp, Homo sapiens
  misc_feature (37)..(37): n is a, c, g, or t
gcgcgcggtagcgcgggcccctcagtgcacaatggcnagagcaggcggcggagccccagccccacccagtgcggagcgcgccgcgagccccgccgcaagctgagcgcctccgcccgccaggcgcgccggcgccgggccatgtactcggggaaccgcagcggcggccacggctactgggacggcggcggggccgcgggcgctgaggggccggcgccggcggggacactgagccccgcgcccctcttcagccccggcacctacgagcgcctggcgctgctgctgggctccattgggctgctgggcgtcggcaacaacctgctggtgctcgtcctctactacaagttccagcggctccgcactcccactcacctcctcctggtcaacatcagcctcagcgacctgctggtgtccctcttcggggtcacctttaccttcgtgtcctgcctgaggaacggctgggtgtgggacaccgtgggctgcgtgtgggacgggtttagcggcagcctcttcgggattgtttccattgccaccctaaccgtgctggcctatgaacgttacattcgcgtggtccatgccagagtgatcaatttttcctgggcctggagggccattacctacatctggctctactcactggcgtgggcaggagcacctctcctgggatggaacaggtacatcctggacgtacacggactaggctgcactgtggactggaaatccaaggatgccaacgattcctcctttgtgcttttcttatttcttggctgcctggtggtgcccctgggtgtcatagcccattgctatggccatattctatattccattcgaatgcttcgttgtgtggaagatcttcagacaattcaagtgatcaagattttaaaatatgaaaagaaactggccaaaatgtgctttttaatgatattcaccttcctggtctgttggatgccttatatcgtgatctgcttcttggtggttaatggtcatggtcacctggtcactccaacaatatctattgtttcgtacctctttgctaaatcgaacactgtatacaatccagtgatttatgtcttcatgatcagaaagtttcgaagatcccttttgcagcttctgtgcctccgactgctgaggtgccagaggcctgctaaagacctaccagcagctggaagtgaaatgcagatcagacccattgtgatgtcacagaaagatggggacaggccaaagaaaaaagtgactttcaactcttcttccatcatttttatcatcaccagtgatgaatcactgtcagttgacgacagcgacaaaaccaatgggtccaaagttgatgtaatccaagttcgtcctttgtaggaatgaagaatggcaacgaaagatggggccttaaattggatgccacttttggactttcatcataagaagtgtctggaatacccgttctatgtaatatcaacagaaccttgtggtccagcaggaaatccgaattgcccatatgctcttgggcctcaggaagaggttgaacaaaaacaaattcttttaattcaacgggtgctttacataatgaaaaaaccacttgtggcacacgatgggcatctaacatcatcatcttctaatgtgttggagattttcatttcaaatatattttttaaattactctattttccaaaacacgtaatgcatttttctcgaaaataccttactgtaaaaataactgtcgcgtacacatgtgtgaagtagctagaacatactgaattttttttgtactgttggactctattcagtgtcatgtcctatatctgatcaagttatcaaggagataattctagaatgaaaaagaaaatcctcttgttggaaacaaaagacgttttatatgtgcagtatgacaaagaggagtttcagagacaactttgaatccttgtcagcctggagaccagcaccagaggaatctacaaggcaaactcccatatatttgcttcccccaaattgctgcccctacagactcaaagctctttttctttgttttgttgtttctctaaaaatttactgttctttgtcgatgctatataagccagggagttctaagacgccagctctttgagatttgctcattcccctgtatttcccacatatatattacatatacccgctaataaatttatgtttgtttttctcttgtcaatctgtcttttgttataggggccccagccaaggaacctaaagtgggtagaaggaaaaattattttttctttccctacaaactgaacatggattattagaactcaaggttttcattgacaatatagaaaagaaacactgaatcattttattttattgcccaatttttatttcttatatgactctagtgtttcatcttcataattaatcatgtttgaaggatttctgagtgactcagcagcctgttaaagaaggatgaaccaaagaaaacatttcactaaatgtgcttttaaaaatcaagtgtattgctggttctgctgcagtatgtagtcgaagaataaattagtaaattgcttctgagggtctgaaattgaataaagtaatggctttgtatttctat

SEQ ID NO: 282722 - DNA, 655 bp, Homo sapiens
  misc_feature (37)..(37): n is a, c, g, or t
gcgcgcggtagcgcgggcccctcagtgcacaatggcnagagcaggcggcggagccccagccccacccagtgcggagcgcgccgcgagccccgccgcaagctgagcgcctccgcccgccaggcgcgccggcgccgggccatgtactcggggaaccgcagcggcggccacggctactgggacggcggcggggccgcgggcgctgaggggccggcgccggcggggacactgagccccgcgcccctcttcagccccggcacctacgagcgcctggcgctgctgctgggctccattgggctgctgggcgtcggcaacaacctgctggtgctcgtcctctactacaagttccagcggctccgcactcccactcacctcctcctggtcaacatcagcctcagcgacctgctggtgtccctcttcggggtcacctttaccttcgtgtcctgcctgaggaacggctgggtgtgggacaccgtgggctgcgtgtgggacgggtttagcggcagcctcttcgagaagagttccagtcacaaatgcatatatgatgcattttgacatttactgctaagatgaaatgcagaaatgaaaccacacatccattttagtattctcagatgtgattagatgtacttgctcatgtttttatgctactgactta

SEQ ID NO: 282723 - DNA, 2249 bp, Homo sapiens
  misc_feature (37)..(37): n is a, c, g, or t
gcgcgcggtagcgcgggcccctcagtgcacaatggcnagagcaggcggcggagccccagccccacccagtgcggagcgcgccgcgagccccgccgcaagctgagcgcctccgcccgccaggcgcgccggcgccgggccatgtactcggggaaccgcagcggcggccacggctactgggacggcggcggggccgcgggcgctgaggggccggcgccggcggggacactgagccccgcgcccctcttcagccccggcacctacgagcgcctggcgctgctgctgggctccattgggctgctgggcgtcggcaacaacctgctggtgctcgtcctctactacaagttccagcggctccgcactcccactcacctcctcctggtcaacatcagcctcagcgacctgctggtgtccctcttcggggtcacctttaccttcgtgtcctgcctgaggaacggctgggtgtgggacaccgtgggctgcgtgtgggacgggtttagcggcagcctcttcgcttcgttgtgtggaagatcttcagacaattcaagtgatcaagattttaaaatatgaaaagaaactggccaaaatgtgctttttaatgatattcaccttcctggtctgttggatgccttatatcgtgatctgcttcttggtggttaatggtcatggtcacctggtcactccaacaatatctattgtttcgtacctctttgctaaatcgaacactgtatacaatccagtgatttatgtcttcatgatcagaaagtttcgaagatcccttttgcagcttctgtgcctccgactgctgaggtgccagaggcctgctaaagacctaccagcagctggaagtgaaatgcagatcagacccattgtgatgtcacagaaagatggggacaggccaaagaaaaaagtgactttcaactcttcttccatcatttttatcatcaccagtgatgaatcactgtcagttgacgacagcgacaaaaccaatgggtccaaagttgatgtaatccaagttcgtcctttgtaggaatgaagaatggcaacgaaagatggggccttaaattggatgccacttttggactttcatcataagaagtgtctggaatacccgttctatgtaatatcaacagaaccttgtggtccagcaggaaatccgaattgcccatatgctcttgggcctcaggaagaggttgaacaaaaacaaattcttttaattcaacgggtgctttacataatgaaaaaaccacttgtggcacacgatgggcatctaacatcatcatcttctaatgtgttggagattttcatttcaaatatattttttaaattactctattttccaaaacacgtaatgcatttttctcgaaaataccttactgtaaaaataactgtcgcgtacacatgtgtgaagtagctagaacatactgaattttttttgtactgttggactctattcagtgtcatgtcctatatctgatcaagttatcaaggagataattctagaatgaaaaagaaaatcctcttgttggaaacaaaagacgttttatatgtgcagtatgacaaagaggagtttcagagacaactttgaatccttgtcagcctggagaccagcaccagaggaatctacaaggcaaactcccatatatttgcttcccccaaattgctgcccctacagactcaaagctctttttctttgttttgttgtttctctaaaaatttactgttctttgtcgatgctatataagccagggagttctaagacgccagctctttgagatttgctcattcccctgtatttcccacatatatattacatatacccgctaataaatttatgtttgtttttctcttgtcaatctgtcttttgttataggggccccagccaaggaacctaaagtgggtagaaggaaaaattattttttctttccctacaaactgaacatggattattagaactcaaggttttcattgacaatatagaaaagaaacactgaatcattttattttattgcccaatttttatttcttatatgactctagtgtttcatcttcataattaatcatgtttgaaggatttctgagtgactcagcagcctgttaaagaaggatgaaccaaagaaaacatttcactaaatgtgcttttaaaaatcaagtgtattgctggttctgctgcagtatgtagtcgaagaataaattagtaaattgcttctgagggtctgaaattgaataaagtaatggctttgtatttctat

SEQ ID NO: 282724 - DNA, 1839 bp, Homo sapiens
cggacgcgtggtcgacccacgcgtccggaagagttcaaaaaggcttttctaacccgggactgacttctaggtggaaaaaatacatcgctgtaagaaaaccgcttcgttgtgtggaagatcttcagacaattcaagtgatcaagattttaaaatatgaaaagaaactggccaaaatgtgctttttaatgatattcaccttcctggtctgttggatgccttatatcgtgatctgcttcttggtggttaatggtcatggtcacctggtcactccaacaatatctattgtttcgtacctctttgctaaatcgaacactgtatacaatccagtgatttatgtcttcatgatcagaaagtttcgaagatcccttttgcagcttctgtgcctccgactgctgaggtgccagaggcctgctaaagacctaccagcagctggaagtgaaatgcagatcagacccattgtgatgtcacagaaagatggggacaggccaaagaaaaaagtgactttcaactcttcttccatcatttttatcatcaccagtgatgaatcactgtcagttgacgacagcgacaaaaccaatgggtccaaagttgatgtaatccaagttcgtcctttgtaggaatgaagaatggcaacgaaagatggggccttaaattggatgccacttttggactttcatcataagaagtgtctggaatacccgttctatgtaatatcaacagaaccttgtggtccagcaggaaatccgaattgcccatatgctcttgggcctcaggaagaggttgaacaaaaacaaattcttttaattcaacgggtgctttacataatgaaaaaaccacttgtggcacacgatgggcatctaacatcatcatcttctaatgtgttggagattttcatttcaaatatattttttaaattactctattttccaaaacacgtaatgcatttttctcgaaaataccttactgtaaaaataactgtcgcgtacacatgtgtgaagtagctagaacatactgaattttttttgtactgttggactctattcagtgtcatgtcctatatctgatcaagttatcaaggagataattctagaatgaaaaagaaaatcctcttgttggaaacaaaagacgttttatatgtgcagtatgacaaagaggagtttcagagacaactttgaatccttgtcagcctggagaccagcaccagaggaatctacaaggcaaactcccatatatttgcttcccccaaattgctgcccctacagactcaaagctctttttctttgttttgttgtttctctaaaaatttactgttctttgtcgatgctatataagccagggagttctaagacgccagctctttgagatttgctcattcccctgtatttcccacatatatattacatatacccgctaataaatttatgtttgtttttctcttgtcaatctgtcttttgttataggggccccagccaaggaacctaaagtgggtagaaggaaaaattattttttctttccctacaaactgaacatggattattagaactcaaggttttcattgacaatatagaaaagaaacactgaatcattttattttattgcccaatttttatttcttatatgactctagtgtttcatcttcataattaatcatgtttgaaggatttctgagtgactcagcagcctgttaaagaaggatgaaccaaagaaaacatttcactaaatgtgcttttaaaaatcaagtgtattgctggttctgctgcagtatgtagtcgaagaataaattagtaaattgcttctgagggtctgaaattgaataaagtaatggctttgtatttctat

SEQ ID NO: 282725 - DNA, 349 bp, Homo sapiens
ctgttcggtgccaagtagaataatttccaccactttccctgttcttcagtactactgcatagccaagctggtttattgttgcatataaagtctgggctgtcttccgaagtgctctgtttcatcaacagccgaggagaggagggagtgctaggtggaccagatgactgcaaagcgtgaggacctcgcttctcatgctgcttagaaagcacataggggtccttggagaaggactcccctgacgcgcctttcttctcctcaaagccctccattggcaggggcaatgtgggtgaaggatgtaaactggaaagggctggcggcatggagtgaaccatctggatcccaccaacgg

SEQ ID NO: 282726 - DNA, 2495 bp, Homo sapiens
gagcgacgcccacggcctgtctcggccaccagcgtgttccagcgagcgcccagccacctcgctcgcagcctccccagcgcagcagcccggctgtgggcctgcggcagccgggtcttcctggtccccacctcctggggccgacgggcggcaggaaggggctcggcgggacgcgccgtcagggacctgaggaggaacaacggaacgcgttcggaacggcctggactcccgagactcacccgactcgtggccacaccgggagaactgaagcggcagtagccggcggagacgcccgacccgaaggccggctgctagggagcagacagctgaaccgcttgccagacgccgaaacccagtgacgccctccaccgctccaccgtgctcccggctccccgcccccgccgcccgcgggccccaaggcgcatgcgccgcctgtcctggaggggcccatttccgtccgtcgtggggggaggcacagtgagtccactggggcacggcagcgtctaagccacaagccgagcacataagccaggtcctaacggagcctatgtgtaagtccactactggtgcaaggttgcacacttctaagaagagcggcgtggggggctcggcgaccttcgcttcagtcgctcccccgtgcagtcccctgtgcccaagacacagcctgatgcttgtgctccggtgggcggagcttggaggcggcgggaactgcaattggtggctttgaaggcgcggcgagcgggaacagctcttgaggagtgagactgcaggagatgtgggccgtgccaaagagatggatgagactgttgctgagttcatcaagaggaccatcttgaaaatccccatgaatgaactgacaacaatcctgaaggcctgggattttttgtctgaaaatcaactgcagactgtaaatttccgacagagaaaggaatctgtagttcagcacttgatccatctgtgtgaggaaaagcgtgcaagtatcagtgatgctgccctgttagacatcatttatatgcaatttcatcagcaccagaaagtttgggatgtttttcagatgagtaaaggaccaggtgaagatgttgacctttttgatatgaaacaatttaaaaattcgttcaagaaaattcttcagagagcattaaaaaatgtgacagtcagcttcagagaaactgaggagaatgcagtctggattcgaattgcctggggaacacagtacacaaagccaaaccagtacaaacctacctacgtggtgtactactcccagactccgtacgccttcacgtcctcctccatgctgaggcgcaatacaccgcttctgggtcaggcgctgacaattgctagcaaacaccatcagattgtgaaaatggacctgagaagtcggtatctggactctcttaaggctattgtttttaaacagtataatcagacctttgaaactcacaactctacgacacctctacaggaaagaagccttggactagatataaatatggattcaaggatcattcatgaaaacatagtagaaaaagagagagtccaacgaataactcaagaaacatttggagattatcctcaaccacaactagaatttgcacaatataagcttgaaacgaaattcaaaagtggtttaaatgggagcatcttggctgagaggaaagaacccctccgatgcctaataaagttctctagcccacatcttctggaagcattgaaatccttagcaccagcgggtattgcagatgctccactttctccactgctcacttgcatacccaacaagagaatgaattattttaaaattagagataaataagacgtgcgtggtttcttaagcacagctcctccttcttgatattgcacatgcacttcagttcatggctagctgtatagcttccgtctgtaaacttgtattttcaagaatccttggtattgaatttttagaaatgctcacataattgttgggactgattcattcctccacgatatgcctcctctctctgatatcctgctaactgtagccgttgtggcatttgagatgacaggacatatatatatatggccccacacttgaccttgagtgcctgaatgctctgaaatcaagcatatggcacagcgctcaagacttttgggtttgtgtccttttttctatggctgtctcttctcaattctggagaggtctggttccagtggctggtttccagggattgattcttaagctctggatcacagagagaagcaacaaggaactatactcaactcaaaactttttaggagaatcatgaaattggtctattcaaaggatggagttgagtccattctgttattgttgcaagaggttgcatatttggtgagtcagttatataaaatagtgttcttattgtaaatatgatacttctcataatctattttatcatgtgtataacattcaaactgacaaatatattgacttatgaataaaggtgtcaaaaaactggcacatcagttaattttgatcaaag

SEQ ID NO: 282727 - DNA, 2260 bp, Homo sapiens
gagcgacgcccacggcctgtctcggccaccagcgtgttccagcgagcgcccagccacctcgctcgcagcctccccagcgcagcagcccggctgtgggcctgcggcagccgggtcttcctggtccccacctcctggggccgacgggcggcaggaaggggctcggcgggacgcgccgtcagggacctgaggaggaacaacggaacgcgttcggaacggcctggactcccgagactcacccgactcgtggccacaccgggagaactgaagcggcagtagccggcggagacgcccgacccgaaggccggctgctagggagcagacagctgaaccgcttgccagacgccgaaacccagtgacgccctccaccgctccaccgtgctcccggctccccgcccccgccgcccgcgggccccaaggcgcatgcgccgcctgtcctggaggggcccatttccgtccgtcgtggggggaggcacagtgagtccactggggcacggcagcgtctaagccacaagccgagcacataagccaggtcctaacggagcctatgtgtaagtccactactggtgcaaggttgcacacttctaagaagagcggcgtggggggctcggcgaccttcgcttcagtcgctcccccgtgcagtcccctgtgcccaagacacagcctgatgcttgtgctccggtgggcggagcttggaggcggcgggaactgcaattggtggctttgaaggcgcggcgagcgggaacagctcttgaggagtgagactgcaggagatgtgggccgtgccaaagagatggatgagactgttgctgagttcatcaagaggaccatcttgaaaatccccatgaatgaactgacaacaatcctgaaggcctgggattttttgtctgaaaatcaactgcagactgtaaatttccgacagagaaaggaatctgtagttcagcacttgatccatctgtgtgaggaaaagcgtgcaagtatcagtgatgctgccctgttagacatcatttatatgcaatttcatcagcaccagaaagtttgggatgtttttcagatgagtaaaggaccaggtgaagatgttgacctttttgatatgaaacaatttaaaaattcgttcaagaaaattcttcagagagcattaaaaaatgtgacagtcagcttcagagaaactgaggagaatgcagtctggattcgaattgcctggggaacacagtacacaaagccaaaccagtacaaacctacctacgtggtgtactactcccagactccgtacgccttcacgtcctcctccatgctgaggcgcaatacaccgcttctgggtcaggcgctgacaattgctagcaaacaccatcagattgtgaaaatggacctgagaagtcggtatctggactctcttaaggctattgtttttaaacagtataatcagacctttgaaactcacaactctacgacacctctacaggaaagaagccttggactagatataaatatggattcaaggatcattcatgaaaacatagtagaaaaagagagagtccaacgaataactcaagaaacatttggagattatcctcaaccacaactagaatttgcacaatataagcttgaaacgaaattcaaaagtggtttaaatgggagcatcttggctgagaggaaagaacccctccgatgcctaataaagttctctagcccacatcttctggaagcattgaaatccttagcaccagcggcacttgtttgcaggatccaaaagctgctctgctattctggaagccacagtcaagggacccaggacccgagcagctggcagaaggacttgtaccttctgtttgtcccattgtatccaagatgttaaaatcatgatgtcacaacatttagacatttaaatggttaatcaaatgtatgtctctcctgatatacagctaactgctatagactaatgcaggcctccttgttaaaatggaccctttgttactcaaatttgaccaatcttggaagcttggatgtgcactgacttgacaaccactttttgtgggacataacactctagacacaggtgcttctagctctaaggggaacagataactaatctgtggccaaccaaccaatgattaatcagctatgctgcctcggatcttgatcaaaaaaggaaaatgtgaaaagtgatacacaaaatggcatcactttggttcagagctctaaaatggagttgggaagccattctaagaaggactgcctgcacaatctgcaacttgcaaaacac

SEQ ID NO: 282728 - DNA, 1554 bp, Homo sapiens
gagcgacgcccacggcctgtctcggccaccagcgtgttccagcgagcgcccagccacctcgctcgcagcctccccagcgcagcagcccggctgtgggcctgcggcagccgggtcttcctggtccccacctcctggggccgacgggcggcaggaaggggctcggcgggacgcgccgtcagggacctgaggaggaacaacggaacgcgttcggaacggcctggactcccgagactcacccgactcgtggccacaccgggagaactgaagcggcagtagccggcggagacgcccgacccgaaggccggctgctagggagcagacagctgaaccgcttgccagacgccgaaacccagtgacgccctccaccgctccaccgtgctcccggctccccgcccccgccgcccgcgggccccaaggcgcatgcgccgcctgtcctggaggggcccatttccgtccgtcgtggggggaggcacagtgagtccactggggcacggcagcgtctaagccacaagccgagcacataagccaggtcctaacggagcctatgtgtaagtccactactggtgcaaggttgcacacttctaagaagagcggcgtggggggctcggcgaccttcgcttcagtcgctcccccgtgcagtcccctgtgcccaagacacagcctgatgcttgtgctccggtgggcggagcttggaggcggcgggaactgcaattggtggctttgaaggcgcggcgagcgggaacagctcttgaggagtgagactgcaggagatgtgggccggtaagagagccccgggcggcactggatcgggccccggagggtgtggggccttgaggaagccagatcccaggcctcgggggtggctttttcgcaattgtcgcacgttgtgaggcgcaggattggcgctgggtctcgggctcggggcgaggaactacggttcgggccgagtgccaaagagatggatgagactgttgctgagttcatcaagaggaccatcttgaaaatccccatgaatgaactgacaacaatcctgaaggcctgggattttttgtctgaaaatcaactgcagactgtaaatttccgacagagaaaggaatctgtagttcagcacttgatccatctgtgtgaggaaaagcgtgcaagtatcagtgatgctgccctgttagacatcatttatatgcaatttcatcagcaccagaaagtttgggatgtttttcagatgagtaaaggaccaggtgaagatgttgacctttttgatatgaaacaatttaaaaattcgttcaagaaaattcttcagagagcattaaaaaatgtgacagtcagcttcagagaaactgaggagaatgcagtctggattcgaattgcctggggaacacagtacacaaagccaaaccagtacaaacctacctacgtggtgtactactcccagactccgtacgccttcacgtcctcctccatgctgaggcgcaatacaccgcttctgggtcagcggctgacaattggtttagaaaacaccatccgattggtaaatgggcctgagaagctgggtttcgg

SEQ ID NO: 282729 - DNA, 527 bp, Homo sapiens
tatatggaatttttctccaggcaccaaaaaagtttggggatgttttttcaaattgagtaaagggcccagggtgaagatgttgacctttttgatatgaaacaatttaaaaattcgttcaagaaaattcttcagagagcattaaaaaatgtgacagtcagcttcagagaaactgaggagaatgcagtctggattcgaattgcctggggaacacagtacacaaagccaaaccagtacaaacctacctacgtggtgtactactcccagactccgtacgccttcacgtcctcctccatgctgaggcgcaatacaccgcttctgggtcaggcgctgacaattgctagcaaacaccatcagattgtgaaaatggacctgagaagtcggtaaatctttattttctctttgacacaggagttagaagctactgggaaaatctacctccgacaagaggagatcattttagatattaccgaaatgaagaaagcttgcaattagtgaacatgaaaggaaaataaaaattcctcacagtc

SEQ ID NO: 282730 - DNA, 709 bp, Homo sapiens
tgtattggtggtgcttgcggaggagtgagactgcaggagatgtgggccgtgccaaagagatggatgagactgttgctgagttcatcaagaggaccatcttgaaaatccccatgaatgaactgacaacaatcctgaaggcctgggattttttgtctgaaaatcaactgcagactgtaaatttccgacagagaaaggaatctgtagttcagcacttgatccatctgtgtgaggaaaagcgtgcaagtatcagtgatgctgccctgttagacatcatttatatgcaatttcatcagcaccagaaagtttgggatgtttttcagatgagtaaaggaccaggtgaagatgttgacctttttgatatgaaacaatttaaaaattcgttcaagaaaattcttcagagagcattaaaaaatgtgacagtcagcttcagagaaactgaggagaatgcagtctggattcgaattgcctggggaacacagtacacaaagccaaaccagtacaaacctacctacgtggtgtactactcccagactccgtacgccttcacgtcctcctccatgctgaggcgcaatacaccgcttctgggtcaggagttagaagctactgggaaaatctacctccgacaagaggagatcattttagatattaccgaaatgaagaaagcttgcaattagtgaacatgaaaggaaaataaaaattcctcacagtc

SEQ ID NO: 282731 - DNA, 1502 bp, Homo sapiens
tgctctgagtcatcccgttccattgcagcagcgctccaaagtttgggactttctccagatgagtaaaggaccaggtgaagatgttgacctttttgatatgaaacaatttaaaaattcgttcaagaaaattcttcagagagcattaaaaaatgtgacagtcagcttcagagaaactgaggagaatgcagtctggattcgaattgcctggggaacacagtacacaaagccaaaccagtacaaacctacctacgtggtgtactactcccagactccgtacgccttcacgtcctcctccatgctgaggcgcaatacaccgcttctgggtcaggcgctgacaattgctagcaaacaccatcagattgtgaaaatggacctgagaagtcggtatctggactctcttaaggctattgtttttaaacagtataatcagacctttgaaactcacaactctacgacacctctacaggaaagaagccttggactagatataaatatggattcaaggatcattcatgaaaacatagtagaaaaagagagagtccaacgaataactcaagaaacatttggagattatcctcaaccacaactagaatttgcacaatataagcttgaaacgaaattcaaaagtggtttaaatgggagcatcttggctgagaggaaagaacccctccgatgcctaataaagttctctagcccacatcttctggaagcattgaaatccttagcaccagcgggtattgcagatgctccactttctccactgctcacttgcatacccaacaagagaatgaattattttaaaattagagataaataagacgtgcgtggtttcttaagcacagctcctccttcttgatattgcacatgcacttcagttcatggctagctgtatagcttccgtctgtaaacttgtattttcaagaatccttggtattgaatttttagaaatgctcacataattgttgggactgattcattcctccacgatatgcctcctctctctgatatcctgctaactgtagccgttgtggcatttgagatgacaggacatatatatatatggccccacacttgaccttgagtgcctgaatgctctgaaatcaagcatatggcacagcgctcaagacttttgggtttgtgtccttttttctatggctgtctcttctcaattctggagaggtctggttccagtggctggtttccagggattgattcttaagctctggatcacagagagaagcaacaaggaactatactcaactcaaaactttttaggagaatcatgaaattggtctattcaaaggatggagttgagtccattctgttattgttgcaagaggttgcatatttggtgagtcagttatataaaatagtgttcttattgtaaatatgatacttctcataatctattttatcatgtgtataacattcaaactgacaaatatattgacttatgaataaaggtgtcaaaaaactggcacatcagttaattttgatcaaag

SEQ ID NO: 282732 - DNA, 1669 bp, Homo sapiens
gagcgacgcccacggcctgtctcggccaccagcgtgttccagcgagcgcccagccacctcgctcgcagcctccccagcgcagcagcccggctgtgggcctgcggcagccgggtcttcctggtccccacctcctggggccgacgggcggcaggaaggggctcggcgggacgcgccgtcagggacctgaggaggaacaacggaacgcgttcggaacggcctggactcccgagactcacccgactcgtggccacaccgggagaactgaagcggcagtagccggcggagacgcccgacccgaaggccggctgctagggagcagacagctgaaccgcttgccagacgccgaaacccagtgacgccctccaccgctccaccgtgctcccggctccccgcccccgccgcccgcgggccccaaggcgcatgcgccgcctgtcctggaggggcccatttccgtccgtcgtggggggaggcacagtgagtccactggggcacggcagcgtctaagccacaagccgagcacataagccaggtcctaacggagcctatgtgtaagtccactactggtgcaaggttgcacacttctaagaagagcggcgtggggggctcggcgaccttcgcttcagtcgctcccccgtgcagtcccctgtgcccaagacacagcctgatgcttgtgctccggtgggcggagcttggaggcggcgggaactgcaattggtggctttgaaggcgcggcgagcgggaacagctcttgaggagtgagactgcaggagatgtgggccgtgccaaagagatggatgagactgttgctgagttcatcaagaggaccatcttgaaaatccccatgaatgaactgacaacaatcctgaaggcctgggattttttgtctgaaaatcaactgcagactgtaaatttccgacagagaaaggaatctgtagttcagcacttgatccatctgtgtgaggaaaagcgtgcaagtatcagtgatgctgccctgttagacatcatttatatgcaatttcatcagcaccagaaagtttgggatgtttttcagatgagtaaaggaccaggtgaagatgttgacctttttgatatgaaacaatttaaaaattcgttcaagaaaattcttcagagagcattaaaaaatgtgacagtcagcttcagagaaactgaggagaatgcagtctggattcgaattgcctggggaacacagtacacaaagccaaaccagtacaaacctacctacgtggtgtactactcccagactccgtacgccttcacgtcctcctccatgctgaggcgcaatacaccgcttctgggtcagtggaggtggggtttcgccatgttgcccaggctggtctcaaactcccgacttcaagtgatcctcagcctcccaaagtgttgggacaggcatgagctaccgtgccccacctgggcttaacctactctaactcagaaatgattaccaaaagaaagaaccgattacctgctttaattttttttaaagttccaaatagaaaacaggaaccaacccatatccattaggatggctactgctgaaaaaaaacagaaaataacaaacgctaaagaggatatggagaaactgaaactcctgcgcactgtgggcgggcatgtaaactgggatagccactgtggaaaccggtatagcagt

SEQ ID NO: 282733 - DNA, 1440 bp, Homo sapiens
gagcgacgcccacggcctgtctcggccaccagcgtgttccagcgagcgcccagccacctcgctcgcagcctccccagcgcagcagcccggctgtgggcctgcggcagccgggtcttcctggtccccacctcctggggccgacgggcggcaggaaggggctcggcgggacgcgccgtcagggacctgaggaggaacaacggaacgcgttcggaacggcctggactcccgagactcacccgactcgtggccacaccgggagaactgaagcggcagtagccggcggagacgcccgacccgaaggccggctgctagggagcagacagctgaaccgcttgccagacgccgaaacccagtgacgccctccaccgctccaccgtgctcccggctccccgcccccgccgcccgcgggccccaaggcgcatgcgccgcctgtcctggaggggcccatttccgtccgtcgtggggggaggcacagtgagtccactggggcacggcagcgtctaagccacaagccgagcacataagccaggtcctaacggagcctatgtgtaagtccactactggtgcaaggttgcacacttctaagaagagcggcgtggggggctcggcgaccttcgcttcagtcgctcccccgtgcagtcccctgtgcccaagacacagcctgatgcttgtgctccggtgggcggagcttggaggcggcgggaactgcaattggtggctttgaaggcgcggcgagcgggaacagctcttgaggagtgagactgcaggagatgtgggccgtgccaaagagatggatgagactgttgctgagttcatcaagaggaccatcttgaaaatccccatgaatgaactgacaacaatcctgaaggcctgggattttttgtctgaaaatcaactgcagactgtaaatttccgacagagaaaggaatctgtagttcagcacttgatccatctgtgtgaggaaaagcgtgcaagtatcagtgatgctgccctgttagacatcatttatatgcaatttcatcagcaccagaaagtttgggatgtttttcagatgagtaaaggaccaggtgaagatgttgacctttttgatatgaaacaatttaaaaattcgttcaagaaaattcttcagagagcattaaaaaatgtgacagtcagcttcagagaaactgaggagaatgcagtctggattcgaattgcctggggaacacagtacacaaagccaaaccagtacaaacctacctacgtggtgtactactcccagactccgtacgccttcacgtcctcctccatgctgaggcgcaatacaccgcttctgggtcaggagttagaagctactgggaaaatctacctccgacaagaggagatcattttagatattaccgaaatgaagaaagcttgcaattagtgaacatgaaaggaaaataaaaattcctcacagtc

SEQ ID NO: 282734 - DNA, 1808 bp, Homo sapiens
gagcgacgcccacggcctgtctcggccaccagcgtgttccagcgagcgcccagccacctcgctcgcagcctccccagcgcagcagcccggctgtgggcctgcggcagccgggtcttcctggtccccacctcctggggccgacgggcggcaggaaggggctcggcgggacgcgccgtcagggacctgaggaggaacaacggaacgcgttcggaacggcctggactcccgagactcacccgactcgtggccacaccgggagaactgaagcggcagtagccggcggagacgcccgacccgaaggccggctgctagggagcagacagctgaaccgcttgccagacgccgaaacccagtgacgccctccaccgctccaccgtgctcccggctccccgcccccgccgcccgcgggccccaaggcgcatgcgccgcctgtcctggaggggcccatttccgtccgtcgtggggggaggcacagtgagtccactggggcacggcagcgtctaagccacaagccgagcacataagccaggtcctaacggagcctatgtgtaagtccactactggtgcaaggttgcacacttctaagaagagcggcgtggggggctcggcgaccttcgcttcagtcgctcccccgtgcagtcccctgtgcccaagacacagcctgatgcttgtgctccggtgggcggagcttggaggcggcgggaactgcaattggtggctttgaaggcgcggcgagcgggaacagctcttgaggagtgagactgcaggagatgtgggccgtgccaaagagatggatgagactgttgctgagttcatcaagaggaccatcttgaaaatccccatgaatgaactgacaacaatcctgaaggcctgggattttttgtctgaaaatcaactgcagactgtaaatttccgacagagaaaggaatctgtagttcagcacttgatccatctgtgtgaggaaaagcgtgcaagtatcagtgatgctgccctgttagacatcatttatatgcaatttcatcagcaccagaaagtttgggatgtttttcagatgagtaaaggaccaggtgaagatgttgacctttttgatatgaaacaatttaaaaattcgttcaagaaaattcttcagagagcattaaaaaatgtgacagtcagcttcagagaaactgaggagaatgcagtctggattcgaattgcctggggaacacagtacacaaagccaaaccagtacaaacctacctacgtggtgtactactcccagactccgtacgccttcacgtcctcctccatgctgaggcgcaatacaccgcttctgggtcaggcgctgacaattgctagcaaacaccatcagattgtgaaaatggacctgagaagtcggtatctggactctcttaaggctattgtttttaaacagtataatcagacctttgaaactcacaactctacgacacctctacaggaaagaagccttggactagatataaatatggattcaaggatcattcatgaaaacatagtagaaaaagagagagtccaacgaataactcaagaaacatttggagattatcctcaaccacaactagaatttgcacaatataagcttgaaacgaaattcaaaagtggtttaaatgggagcatcttggctgagaggaaagaacccctccgatgcctaataaagttctctagcccacatcttctggaagcattgaaatccttagcaccagcgggtattgcagatgctccactttctccactgctcacttgcatacccaacaagagaatgaattattttaaaattagagataaat

SEQ ID NO: 282735 - DNA, 732 bp, Homo sapiens
tgctctgagtcatcccgttccattgcagcagcgctccaaagtttgggactttctccagatgagtaaaggaccaggtgaagatgttgacctttttgatatgaaacaatttaaaaattcgttcaagaaaattcttcagagagcattaaaaaatgtgacagtcagcttcagagaaactgaggagaatgcagtctggattcgaattgcctggggaacacagtacacaaagccaaaccagtacaaacctacctacgtggtgtactactcccagactccgtacgccttcacgtcctcctccatgctgaggcgcaatacaccgcttctgggtcaggcgctgacaattgctagcaaacaccatcagattgtgaaaatggacctgagaagtcggtaaatctttattttctctttgacacaggagttagaagctactgggaaaatctacctccgacaagaggagatcattttagatattaccgaaatgaagaaagcttgcaattagtgaacatgaaaggaaaataaaaattcctcacagtcatctttttataattgtattgtgttttataccactcattagtcactggagtctgtgttgtagatctcagcttccaaatcacctgatcacactagaatttgttttctctttagagaaacttcacattatcttttgaagctaaatatattattctatgaaacaacagagaagtagaattaactttttgtcccatcactcaagca

SEQ ID NO: 282736 - DNA, 1641 bp, Homo sapiens
gagcgacgcccacggcctgtctcggccaccagcgtgttccagcgagcgcccagccacctcgctcgcagcctccccagcgcagcagcccggctgtgggcctgcggcagccgggtcttcctggtccccacctcctggggccgacgggcggcaggaaggggctcggcgggacgcgccgtcagggacctgaggaggaacaacggaacgcgttcggaacggcctggactcccgagactcacccgactcgtggccacaccgggagaactgaagcggcagtagccggcggagacgcccgacccgaaggccggctgctagggagcagacagctgaaccgcttgccagacgccgaaacccagtgacgccctccaccgctccaccgtgctcccggctccccgcccccgccgcccgcgggccccaaggcgcatgcgccgcctgtcctggaggggcccatttccgtccgtcgtggggggaggcacagtgagtccactggggcacggcagcgtctaagccacaagccgagcacataagccaggtcctaacggagcctatgtgtaagtccactactggtgcaaggttgcacacttctaagaagagcggcgtggggggctcggcgaccttcgcttcagtcgctcccccgtgcagtcccctgtgcccaagacacagcctgatgcttgtgctccggtgggcggagcttggaggcggcgggaactgcaattggtggctttgaaggcgcggcgagcgggaacagctcttgaggagtgagactgcaggagatgtgggccgtgccaaagagatggatgagactgttgctgagttcatcaagaggaccatcttgaaaatccccatgaatgaactgacaacaatcctgaaggcctgggattttttgtctgaaaatcaactgcagactgtaaatttccgacagagaaaggaatctgtagttcagcacttgatccatctgtgtgaggaaaagcgtgcaagtatcagtgatgctgccctgttagacatcatttatatgcaatttcatcagcaccagaaagtttgggatgtttttcagatgagtaaaggaccaggtgaagatgttgacctttttgatatgaaacaatttaaaaattcgttcaagaaaattcttcagagagcattaaaaaatgtgacagtcagcttcagagaaactgaggagaatgcagtctggattcgaattgcctggggaacacagtacacaaagccaaaccagtacaaacctacctacgtggtgtactactcccagactccgtacgccttcacgtcctcctccatgctgaggcgcaatacaccgcttctgggtcaggagttagaagctactgggaaaatctacctccgacaagaggagatcattttagatattaccgaaatgaagaaagcttgcaattagtgaacatgaaaggaaaataaaaattcctcacagtcatctttttataattgtattgtgttttataccactcattagtcactggagtctgtgttgtagatctcagcttccaaatcacctgatcacactagaatttgttttctctttagagaaacttcacattatcttttgaagctaaatatattattctatgaaacaacagagaagtagaattaactttttgtcccatcactcaagca

SEQ ID NO: 282737 - DNA, 1725 bp, Homo sapiens
gagcgacgcccacggcctgtctcggccaccagcgtgttccagcgagcgcccagccacctcgctcgcagcctccccagcgcagcagcccggctgtgggcctgcggcagccgggtcttcctggtccccacctcctggggccgacgggcggcaggaaggggctcggcgggacgcgccgtcagggacctgaggaggaacaacggaacgcgttcggaacggcctggactcccgagactcacccgactcgtggccacaccgggagaactgaagcggcagtagccggcggagacgcccgacccgaaggccggctgctagggagcagacagctgaaccgcttgccagacgccgaaacccagtgacgccctccaccgctccaccgtgctcccggctccccgcccccgccgcccgcgggccccaaggcgcatgcgccgcctgtcctggaggggcccatttccgtccgtcgtggggggaggcacagtgagtccactggggcacggcagcgtctaagccacaagccgagcacataagccaggtcctaacggagcctatgtgtaagtccactactggtgcaaggttgcacacttctaagaagagcggcgtggggggctcggcgaccttcgcttcagtcgctcccccgtgcagtcccctgtgcccaagacacagcctgatgcttgtgctccggtgggcggagcttggaggcggcgggaactgcaattggtggctttgaaggcgcggcgagcgggaacagctcttgaggagtgagactgcaggagatgtgggccgtgccaaagagatggatgagactgttgctgagttcatcaagaggaccatcttgaaaatccccatgaatgaactgacaacaatcctgaaggcctgggattttttgtctgaaaatcaactgcagactgtaaatttccgacagagaaaggaatctgtagttcagcacttgatccatctgtgtgaggaaaagcgtgcaagtatcagtgatgctgccctgttagacatcatttatatgcaatttcatcagcaccagaaagtttgggatgtttttcagatgagtaaaggaccaggtgaagatgttgacctttttgatatgaaacaatttaaaaattcgttcaagaaaattcttcagagagcattaaaaaatgtgacagtcagcttcagagaaactgaggagaatgcagtctggattcgaattgcctggggaacacagtacacaaagccaaaccagtacaaacctacctacgtggtgtactactcccagactccgtacgccttcacgtcctcctccatgctgaggcgcaatacaccgcttctgggtcaggcgctgacaattgctagcaaacaccatcagattgtgaaaatggacctgagaagtcggtaaatctttattttctctttgacacaggagttagaagctactgggaaaatctacctccgacaagaggagatcattttagatattaccgaaatgaagaaagcttgcaattagtgaacatgaaaggaaaataaaaattcctcacagtcatctttttataattgtattgtgttttataccactcattagtcactggagtctgtgttgtagatctcagcttccaaatcacctgatcacactagaatttgttttctctttagagaaacttcacattatcttttgaagctaaatatattattctatgaaacaacagagaagtagaattaactttttgtcccatcactcaagca

SEQ ID NO: 282738 - DNA, 938 bp, Homo sapiens
tgtattggtggtgcttgcggaggagtgagactgcaggagatgtgggccgtgccaaagagatggatgagactgttgctgagttcatcaagaggaccatcttgaaaatccccatgaatgaactgacaacaatcctgaaggcctgggattttttgtctgaaaatcaactgcagactgtaaatttccgacagagaaaggaatctgtagttcagcacttgatccatctgtgtgaggaaaagcgtgcaagtatcagtgatgctgccctgttagacatcatttatatgcaatttcatcagcaccagaaagtttgggatgtttttcagatgagtaaaggaccaggtgaagatgttgacctttttgatatgaaacaatttaaaaattcgttcaagaaaattcttcagagagcattaaaaaatgtgacagtcagcttcagagaaactgaggagaatgcagtctggattcgaattgcctggggaacacagtacacaaagccaaaccagtacaaacctacctacgtggtgtactactcccagactccgtacgccttcacgtcctcctccatgctgaggcgcaatacaccgcttctgggtcagtggaggtggggtttcgccatgttgcccaggctggtctcaaactcccgacttcaagtgatcctcagcctcccaaagtgttgggacaggcatgagctaccgtgccccacctgggcttaacctactctaactcagaaatgattaccaaaagaaagaaccgattacctgctttaattttttttaaagttccaaatagaaaacaggaaccaacccatatccattaggatggctactgctgaaaaaaaacagaaaataacaaacgctaaagaggatatggagaaactgaaactcctgcgcactgtgggcgggcatgtaaactgggatagccactgtggaaaccggtatagcagt

SEQ ID NO: 282739 - DNA, 875 bp, Homo sapiens
taagttctcccagggcgctgccagagccctgccggctaagggatggggaaacaaacaggtggggctgtaatctcgtaattcccagtcaaaagaggtaggaagggatgctgaggacccagggatactgatgattgggctgacccagaagtggccatctttgtggaaaccaggctggagtgcaatggtgtgatctcagctcactgcaacctccacctccagggttcaagcaattctactgcctcagcctcccgagtagctggcattacaggcgcatgcaaccacgcccagctaattttttgcatttttagtagagacggggtttcaccgtgttggctaggctggtctcaaactcctgatctcaggtcatctgcctgcctcagcctcccaaagtgctgcaatcacaggcatgagccacctggcctgttttttaaaaagcctaagcctgttgaccccaggctccacaatcttcaattttccgagtctcagtttttttttcatgagtaaaatagaggtaatacctacctcacagagattttgtgaagattaaatgaaacagtgtctggaccataagtgcccaatataaagtcatccagagtaaagtcatagggctcaaagtctttccggaagcggcgagccagggtctcctcgtcttccttgctgatctgacactgcctccagtcagacttatcaggaacattaaggatggcttcactggccaggacctccctgcagaaatagcacaaagaagtcaaaatggaaactatcagcctgagctctcctcaacatcacccaaaggaggggactcaggcccacgtaacagcagcacaagcccaatgtcaacaaaacaactatcttggctcttaggactaaagaat

SEQ ID NO: 282740 - DNA, 367 bp, Homo sapiens
aaagatcagagactggatcccatttccagctttgccacttgctatctatgatctagacagatgatttcatctctgagtcttgatttcctcacctatgaaatgcaaataagaacacccaccatacagggtttttgtgaggtacagagataacacagtcaaagtgccatattagctgtgattacaacctgccttaaactgtagttttgtcacctcaactagacatgagtttgcagagtcaggagcctagtcatacccactctgatttaaaattcctctgcctctccttctaggggactcaggcccacgtaacagcagcacaagcccaatgtcaacaaaacaactatcttggctcttaggactaaagaat

SEQ ID NO: 282741 - DNA, 358 bp, Homo sapiens
aattaaaaaaaaaaaaaagctttactacttcctgtggagttcataaaaagttcttccctttgttttagtcatccagagtaaagtcatagggctcaaagtctttccggaagcggcgagccagggtctcctcgtcttccttgctgatctgacactgcctccagtcagacttatcaggaacattaaggatggcttcactggccaggacctccctgcagaaatagcacaaagaagtcaaaatggaaactatcagcctgagctctcctcaacatcacccaaaggaggggactcaggcccacgtaacagcagcacaagcccaatgtcaacaaaacaactatcttggctcttaggactaaagaat

SEQ ID NO: 282742 - DNA, 328 bp, Homo sapiens
aggaagacgttgttggggtccgcagggatgcctccgtcacgcctctcaatgtaccgcgccacgtcctcccggatcagctggatgccggagctgacgctgtaggcccctggactcgggcaggacaggatgggaagtacagatgcctggagcaaaggggaagggaggaggctcatggaccctccctgctcagagttccccccgctctacgtccctctgtgttaaaggtaaaggccctacctgtgctcaggtaccctctcctcccaagccacctggcctcctcactctgcttccctccttagcagttctgccctcctcactgaccaagaca

SEQ ID NO: 282743 - DNA, 1062 bp, Homo sapiens
ctgctgccaccccaccctcaccaacagatgcaccgcgatgaagaggacagtgacgttgacgtgacgttccagccatggcacaaggagatgctgcagcaactgctggtcatgctcagctccactgtggccacgagacctcagaaggctgcgtgtccccaccaggagtcacagtcccatggcccacccaaggagagccggcccagcatccagctgcccaggactgggtctctgctgccgcagctctctgacatcaccccctaccagccgggggatctaggcctggtacctcgccaggtccacatcccacccaacccccaggacctcaggctgctgtcatctatcacccgtgtggggaccttccgggcacacagcagccctgagatgcgtgcccctggttctctaaaaaggcttgaaaagtttagtcttcctgaagttcccctacgtcccaagtaggacacagagagaagaacctactccagaaatggactggtccagtcacagtcacccccactttaatccgcaggcagcctggaacagtctagaggagatttgtataaaaagtagataccaagaaaacaatacaaatagaaaaagacgataaataaagaaagataaaggaactaacttaccaaagacacacagaggggggcccgagccgataagaccaccgcgagggggggacccgcaatcgaagaccccagtagaatgggttcaacaagggtgcgctcttccagcagtccagtaatgaaagctgagcgtggcggacgagtgacgtaaaaaacaagaggcgtagcgggacaagatgcggtcctaggtggcgcacatcaggagaagaagagggagccaaccctaaacgcgggggcgggaggtcgctcacatacaatcccgagcatacccatgttgccagccacccggggaagggaaataatacccccatggggggacaaacatcccacaggagtacagtagcgccaacaaggagcgactaaacaaccttcggaataaagtccgaatgccaaaggaaccatatcgccaaggtgagcatattcccggacggaagac

SEQ ID NO: 282744 - DNA, 991 bp, Homo sapiens
tgagacagagtctcactctgtcacccagactggagtgcagtgccacaatctcagctcacagcaacctccgcctcccaggttcaagtgattctcctgcctcagtctcccaagtagcagggattacaggcatgcaccaccatgcctggctactttttgtatttttagtagagacagggtttcaccatgttggccaggctggtctcgaactcctgacgtcaagcaatcccccagcctcggcctcccaaagtgctgggattataggtgtgagccactgcacccggcctccaagccagcatctttaatcttacagatgcgtgcccctggttctctaaaaaggcttgaaaagtttagtcttcctgaagttcccctacgtcccaagtaggacacagagagaagaacctactccagaaatggactggtccagtcacagtcacccccactttaatccgcaggcagcctggaacagtctagaggagatttgtataaaaagtagataccaagaaaacaatacaaatagaaaaagacgataaataaagaaagataaaggaactaacttaccaaagacacacagaggggggcccgagccgataagaccaccgcgagggggggacccgcaatcgaagaccccagtagaatgggttcaacaagggtgcgctcttccagcagtccagtaatgaaagctgagcgtggcggacgagtgacgtaaaaaacaagaggcgtagcgggacaagatgcggtcctaggtggcgcacatcaggagaagaagagggagccaaccctaaacgcgggggcgggaggtcgctcacatacaatcccgagcatacccatgttgccagccacccggggaagggaaataatacccccatggggggacaaacatcccacaggagtacagtagcgccaacaaggagcgactaaacaaccttcggaataaagtccgaatgccaaaggaaccatatcgccaaggtgagcatattcccggacggaagac

SEQ ID NO: 282745 - DNA, 875 bp, Homo sapiens
ctgctgccaccccaccctcaccaacagatgcaccgcgatgaagaggacagtgacgttgacgtgacgttccagccatggcacaaggagatgctgcagcaactgctggtcatgctcagctccactgtggccacgagacctcagaaggctgcgtgtccccaccaggagtcacagtcccatggcccacccaaggagagatgcgtgcccctggttctctaaaaaggcttgaaaagtttagtcttcctgaagttcccctacgtcccaagtaggacacagagagaagaacctactccagaaatggactggtccagtcacagtcacccccactttaatccgcaggcagcctggaacagtctagaggagatttgtataaaaagtagataccaagaaaacaatacaaatagaaaaagacgataaataaagaaagataaaggaactaacttaccaaagacacacagaggggggcccgagccgataagaccaccgcgagggggggacccgcaatcgaagaccccagtagaatgggttcaacaagggtgcgctcttccagcagtccagtaatgaaagctgagcgtggcggacgagtgacgtaaaaaacaagaggcgtagcgggacaagatgcggtcctaggtggcgcacatcaggagaagaagagggagccaaccctaaacgcgggggcgggaggtcgctcacatacaatcccgagcatacccatgttgccagccacccggggaagggaaataatacccccatggggggacaaacatcccacaggagtacagtagcgccaacaaggagcgactaaacaaccttcggaataaagtccgaatgccaaaggaaccatatcgccaaggtgagcatattcccggacggaagac

SEQ ID NO: 282746 - DNA, 465 bp, Homo sapiens
ctgctgccaccccaccctcaccaacagatgcaccgcgatgaagaggacagtgacgttgacgtgacgttccagccatggcacaaggagatgctgcagcaactgctggtcatgctcagctccactgtggccacgagacctcagaaggctgcgtgtccccaccaggagtcacagtcccatggcccacccaaggagagccggcccagcatccagctgcccaggactgggtctctgctgccgcagctctctgacatcaccccctaccagccgggggatctaggcctggtacctcgccaggtccacatcccacccaacccccaggacctcaggctgctgtcatctatcacccgtgtggggaccttccgggcacacagcagccctgagcgtcccgtgggccccaacgcagaggagcggaaacgcagagcaacgctgcagtggggaaggggcgcgaagaaggggcccagaaac

SEQ ID NO: 282747 - DNA, 477 bp, Homo sapiens
agtgacgttgacgtgacgttccagccatggcacaaggagatgctgcagcaactgctggtcatgctcagctccactgtggccacgagacctcagaaggctgcgtgtccccaccaggagtcacagtcccatggcccacccaaggagaggtaagcaagtggccctgtgtggcctcagaggcagccacagagagcagggcaaaggcattcagccatggggacagtgctcggctcaccctgggccagaaacctggctcgccgaaggctctgtgaccctcggccccctccccacagccggcccagcatccagctgcccaggactgggtctctgctgccgcagctctctgacatcaccccctaccagccgggggatctaggcctggtacctcgccaggtccacatcccacccaacccccaggacctcaggctgctgtcatctatcacccgtgtggggaccttccgggcacacagcagccctgag

SEQ ID NO: 282748 - DNA, 772 bp, Homo sapiens
gagctctgggatgactttggtcacagctttcgcagccccagtggaggctgggatgatgttctggtgggcaccccgcccatctcgccaggccttccttgatggcccgtccactgtcttctgggtggccgtgtaggaatggactgtggtcttggggaagagaaggaccaagatgaggccttcatgctcctaagctcccatgcctcttttttccaggactaagttggtggcctaggtgtggaggctggtggggccaccaccacagaccacaggaggggatgtgtgcaggccagggtccagccttgcctgagggttgcacagtgttttaagtgacttctgcactggtgggcctctcctcccgaaaccagtctctccctcttaactccatacagtaagcaaggcccgggaagaagttgggtttccctgccatccttcctgccccagcccctcatcctcaactcaccatcaacccttccacgatcccaaatcgctcgtggatgactttggcgaggggagccaaacagttggtggtgcaggacgcgttgctgaaacagccaaggtgtgcacggacactgtgaggtggtgacctccccaactcagccctcaacctcctcagaggcgccaatgctgactgctgtcagccagcccagaccctttctccatatgctgcccgggacgtggactctgtgactgtgaggcctgcccggctgctttctgcttcccagctctgacaacctcgccatgaaccctcctagaccctcagctcctgcaatag

SEQ ID NO: 282749 - DNA, 538 bp, Homo sapiens
agctgacggaaggtgggggaggagtgcgagggtctctgagacaggttgggagccagccccacctccatttccaaagcgggggtccaggcacaggaacagccaaacgcccgaaccagcggggttacctttgccacttcatccaatccgagcatcggctgacaagtttatttaatccctgaacctggatccaaggcatctccctgtagaaaacatcagaccggggcagagattgacaaagcaacccaaagcagcagctgccaacggccgctgtgcccacctcatcagcagctaaagagtataattttaaaaaaagtcacagaagaatgtggagacacttagcaaaacggactctcataaggttccctattttgtcagtaaggaagtaaacaaccgctaaaacaaccctctaacaacagaagaccctcatgagaacaccaggcagcagaagcttctttagcagtaaaagatatctggatattcatattttgttccatgatcttcaacattaaataaataaacttaatattcaagtctcatt

SEQ ID NO: 282750 - DNA, 441 bp, Homo sapiens
tcgcgtcctccccgcgcggcggacagcccgggcgcccttcctctctgcgggactgcagctgacaagtttatttaatccctgaacctggatccaaggcatctccctgtagaaaacatcagaccggggcagagattgacaaagcaacccaaagcagcagctgccaacggccgctgtgcccacctcatcagcagctaaagagtataattttaaaaaaagtcacagaagaatgtggagacacttagcaaaacggactctcataaggttccctattttgtcagtaaggaagtaaacaaccgctaaaacaaccctctaacaacagaagaccctcatgagaacaccaggcagcagaagcttctttagcagtaaaagatatctggatattcatattttgttccatgatcttcaacattaaataaataaacttaatattcaagtctcatt

SEQ ID NO: 282751 - DNA, 426 bp, Homo sapiens
ctatgcttatcagaaaaactttcatttggttcaaggatttttgctgacaagtttatttaatccctgaacctggatccaaggcatctccctgtagaaaacatcagaccggggcagagattgacaaagcaacccaaagcagcagctgccaacggccgctgtgcccacctcatcagcagctaaagagtataattttaaaaaaagtcacagaagaatgtggagacacttagcaaaacggactctcataaggttccctattttgtcagtaaggaagtaaacaaccgctaaaacaaccctctaacaacagaagaccctcatgagaacaccaggcagcagaagcttctttagcagtaaaagatatctggatattcatattttgttccatgatcttcaacattaaataaataaacttaatattcaagtctcatt

SEQ ID NO: 282752 - DNA, 442 bp, Homo sapiens
agctgacggaaggtgggggaggagtgcgagggtctctgagacaggttgggagccagccccacctccatttccaaagcgggggtccaggcacaggaacagccaaacgcccgaaccagcggggttacctttgccacttcatccaatccgagcatcggctgacaagtttatttaatccctgaacctggatccaaggcatctccctgtagaaaacatcagaccggggcagagattgacaaagcaacccaaagcagcagctgccaacggccgctgtgcccacctcatcagcagctaaagagtataattttaaaaaaagtcacagaagaatgtggagacacttagcaaaacggactctcataagatttgaggaaactcctaaggtccctccagtgtacaacaatttggtaaaatatactgtgaacagaattaaaatatttgccttttc

SEQ ID NO: 282753 - DNA, 722 bp, Homo sapiens
agctgacggaaggtgggggaggagtgcgagggtctctgagacaggttgggagccagccccacctccatttccaaagcgggggtccaggcacaggaacagccaaacgcccgaaccagcggggttacctttgccacttcatccaatccgagcatcggctgacaagtttatttaatccctgaacctggatccaaggcatctccctgtagaaaacatcagaccggggcagagattgacaaagcaacccaaagcagcagctgccaacggccgctgtgcccacctcatcagcagctaaagagtataattttaaaaaaagtcacagaagaatgtggagacacttagcaaaacggactctcataagatttgaggaaactcctaaggtccctccagtgtacaacaatttggaggctgatggactacatccatggggtactttgtcctctggcttccaattagattcagacaacaggaagcatcaacagctaatgggagacgaagaggaaaaattggggtacctattcccctagattactccctgctgattgctgcagaggggcttcatccttgccctggtttctggaaaacactctttcattgcccatgcaggcctaggagtgatgatgcctcactggatggcaaagtctcttattggtttccctaaatcttactcacaacttgtagatactccctctattaaatccttttcagttacccaaattgagtgt

SEQ ID NO: 282754 - DNA, 745 bp, Homo sapiens
agctgacggaaggtgggggaggagtgcgagggtctctgagacaggttgggagccagccccacctccatttccaaagcgggggtccaggcacaggaacagccaaacgcccgaaccagcggggttacctttgccacttcatccaatccgagcatcggctgacaagtttatttaatccctgaacctggatccaaggcatctccctgtagaaaacatcagaccggggcagagattgacaaagcaacccaaagcagcagctgccaacggccgctgtgcccacctcatcagcagctaaagagtataattttaaaaaaagtcacagaagaatgtggagacacttagcaaaacggactctcataagagtgttcgatggtgctgctactaatgaaagatttgaggaaactcctaaggtccctccagtgtacaacaatttggaacttccattttctcaacaactgctcttccaagatgctgcctcatttcagagccatgttttactcatgagctggtcctgtccagaaaacagccaatgctcattcccgacactttcttgtcactgctcttttctgttccctattttgtcagtaaggaagtaaacaaccgctaaaacaaccctctaacaacagaagaccctcatgagaacaccaggcagcagaagcttctttagcagtaaaagatatctggatattcatattttgttccatgatcttcaacattaaataaataaacttaatattcaagtctcatt

SEQ ID NO: 282755 - DNA, 1716 bp, Homo sapiens
ggcctcctgctgcggaggaagagggggaagaggccgcgcgggagggacttctgacacgcgccactgtttttgttttcaaacaggggtacttaaccgaaactagcaatcccaggcggtacaaggccctccatcgtaggcaaagcactacctgaatgtagatttgggccatacgttggaaaataagacatgagagtatgctccgatcaacttttactgttcactggacaactattttgggaatttgcagacctataaagcccatctataaatctcaagcatgtccactttcagagaagagaaatgctgacaaccatttagtctctgaggacaacacttttaaagagccagaaaggtacatttcctcttcatgtgttctcacttccatcctttacctcggtgaaaagacgttttccttccgtacactcatcagtccaagagggatgaagcttgtggaaattttgcagcagccttccctgaccatggtggcctgaagtgcaccttttatacaggactccatcataggactggagagagattggatgtcagagtgattgatgtgctcctactggaagaaggcaaacatccatatgtgaactgcctgtggggtttccaaggaaaggaacggcaggcagcctctatgagcttaaagaagataactgggactttagtcctataacctcaaggaacagtattctgtgaaccatctgagaagcttggaagaggaccccaaactccaaataagaagctcagtgtgtctgacaccttgactgcaggcttgggaggtcctgagcagaagatccagttcaacagtgcctggactcctgatccacaaaaactgataacaaatatttattgttttaagatgctaagtttgtagtcattttttatacagcaacagaaaactaaacacacacataaacagttataagtgctcactgtatatgaggcttttcattaataatctatattttataatagaattagaatatagatctgtgaagctgaagacactcaatccttgctagatttaaatcaggaaaatcagctgagaatcattccttgatagaacctggaaaacaagaccctatgagagaccctgggaattacattaaattcactgtggttcccagtgtcactgaagaggttttcctttcatagtcaggtagtcaccatactgttaagcatttgaacacatgggcaacttccagaatagttatgacattgatataccaatctccaaaattcctagaataccatgttttcatggttgaccttcaaatcagtcagttctttgtaacattgagccataaagatagggcaaatacttaatgttttacatatattcagagattgaccctcaaaatacagcccagagaaactcaaaagaattaactctatttcttcaaattgtgtgacgccaccaaggccagatgacttcagcattgggaaggcaatatccagctgtcatcttcttgatcctcatatgctactactagcatctagcatttactgagcagatagttttattgtccagtttttaaagataagaaaattgaggtattaggaaagttaagttggttgcctagggaaacacgaagatatagcccagattcactcccaggcaggcagatgccagtgtctgctctctttaccaccaaaatatcctgctacatgtacaatttcaataaatatctggacttactggaacaaaacaaa

SEQ ID NO: 282756 - DNA, 1761 bp, Homo sapiens
cgctcccgcgactccgctgcgggtctgcacacccgaggactcggtttgaaacgcccgcttatttattttcttgtcgcctcgctacaagattctatccttgtttgggcatgagtggggggcggcagtctcgtgggaccggcggcattcgtcgttcctccttacggggataattcgagaagtgcggtccgggggtacttaaccgaaactagcaatcccaggcggtacaaggccctccatcgtaggcaaagcactacctgaatgtagatttgggccatacgttggaaaataagacatgagagtatgctccgatcaacttttactgttcactggacaactattttgggaatttgcagacctataaagcccatctataaatctcaagcatgtccactttcagagaagagaaatgctgacaaccatttagtctctgaggacaacacttttaaagtgtaacaatgtggcatccagagcttatccagatgagcggagagcaaatgaatttccttctgctcccctgttgaagaggagagaaaaattcttcaagctttatacaggactccatcataggactggagagagattggatgtcagagtgattgatgtgctcctactggaagaaggcaaacatccatatgtgaactgcctgtggggtttccaaggaaaggaacggcaggcagcctctatgagcttaaagaagataactgggactttagtcctataacctcaaggaacagtattctgtgaaccatctgagaagcttggaagaggaccccaaactccaaataagaagctcagtgtgtctgacaccttgactgcaggcttgggaggtcctgagcagaagatccagttcaacagtgcctggactcctgatccacaaaaactgataacaaatatttattgttttaagatgctaagtttgtagtcattttttatacagcaacagaaaactaaacacacacataaacagttataagtgctcactgtatatgaggcttttcattaataatctatattttataatagaattagaatatagatctgtgaagctgaagacactcaatccttgctagatttaaatcaggaaaatcagctgagaatcattccttgatagaacctggaaaacaagaccctatgagagaccctgggaattacattaaattcactgtggttcccagtgtcactgaagaggttttcctttcatagtcaggtagtcaccatactgttaagcatttgaacacatgggcaacttccagaatagttatgacattgatataccaatctccaaaattcctagaataccatgttttcatggttgaccttcaaatcagtcagttctttgtaacattgagccataaagatagggcaaatacttaatgttttacatatattcagagattgaccctcaaaatacagcccagagaaactcaaaagaattaactctatttcttcaaattgtgtgacgccaccaaggccagatgacttcagcattgggaaggcaatatccagctgtcatcttcttgatcctcatatgctactactagcatctagcatttactgagcagatagttttattgtccagtttttaaagataagaaaattgaggtattaggaaagttaagttggttgcctagggaaacacgaagatatagcccagattcactcccaggcaggcagatgccagtgtctgctctctttaccaccaaaatatcctgctacatgtacaatttcaataaatatctggacttactggaacaaaacaaa

SEQ ID NO: 282757 - DNA, 1900 bp, Homo sapiens
ggtgggtggcgcggacctcgggtccccagccatcggcgctctcccggggccctctgacctcgctccttaaaggaggagggtccgtggcaacggtcctcctcggccaggcgctctcgggacgcgggggtgaggagtgagcgccgtggcccaccctactctccgagcggggacggagtgggcgacaccgcgcgcccggctgcacgcaggctctgcgcggctcgaggcggccctacagggggcgaggaggaaccccggagactcggcggagagagcagagacggagctcaccaaggggcttgccgccgcagagcgcgggagccggcactcggggtacttaaccgaaactagcaatcccaggcggtacaaggccctccatcgtaggcaaagcactacctgaatgtagatttgggccatacgttggaaaataagacatgagagtatgctccgatcaacttttactgttcactggacaactattttgggaatttgcagacctataaagcccatctataaatctcaagcatgtccactttcagagaagagaaatgctgacaaccatttagtctctgaggacaacacttttaaagtgtaacaatgtggcatccagagcttatccagatgagcggagagcaaatgaatttccttctgctcccctgttgaagaggagagaaaaattcttcaagctttatacaggactccatcataggactggagagagattggatgtcagagtgattgatgtgctcctactggaagaaggcaaacatccatatgtgaactgcctgtggggtttccaaggaaaggaacggcaggcagcctctatgagcttaaagaagataactgggactttagtcctataacctcaaggaacagtattctgtgaaccatctgagaagcttggaagaggaccccaaactccaaataagaagctcagtgtgtctgacaccttgactgcaggcttgggaggtcctgagcagaagatccagttcaacagtgcctggactcctgatccacaaaaactgataacaaatatttattgttttaagatgctaagtttgtagtcattttttatacagcaacagaaaactaaacacacacataaacagttataagtgctcactgtatatgaggcttttcattaataatctatattttataatagaattagaatatagatctgtgaagctgaagacactcaatccttgctagatttaaatcaggaaaatcagctgagaatcattccttgatagaacctggaaaacaagaccctatgagagaccctgggaattacattaaattcactgtggttcccagtgtcactgaagaggttttcctttcatagtcaggtagtcaccatactgttaagcatttgaacacatgggcaacttccagaatagttatgacattgatataccaatctccaaaattcctagaataccatgttttcatggttgaccttcaaatcagtcagttctttgtaacattgagccataaagatagggcaaatacttaatgttttacatatattcagagattgaccctcaaaatacagcccagagaaactcaaaagaattaactctatttcttcaaattgtgtgacgccaccaaggccagatgacttcagcattgggaaggcaatatccagctgtcatcttcttgatcctcatatgctactactagcatctagcatttactgagcagatagttttattgtccagtttttaaagataagaaaattgaggtattaggaaagttaagttggttgcctagggaaacacgaagatatagcccagattcactcccaggcaggcagatgccagtgtctgctctctttaccaccaaaatatcctgctacatgtacaatttcaataaatatctggacttactggaacaaaacaaa

SEQ ID NO: 282758 - DNA, 706 bp, Homo sapiens
ggtgggtggcgcggacctcgggtccccagccatcggcgctctcccggggccctctgacctcgctccttaaaggaggagggtccgtggcaacggtcctcctcggccaggcgctctcgggacgcgggggtgaggagtgagcgccgtggcccaccctactctccgagcggggacggagtgggcgacaccgcgcgcccggctgcacgcaggctctgcgcggctcgaggcggccctacagggggcgaggaggaaccccggagactcggcggagagagcagagacggagctcaccaaggggcttgccgccgcagagcgcgggagccggcactcggggtacttaaccgaaactagcaatcccaggcggtacaaggccctccatcgtaggcaaagcactacctgaatgtagatttgggccatacgttggaaaataagacatgagagtatgctccgatcaacttttactgttcactggacaactattttgggaatttgcagacctataaagcccatctataaatctcaagcatgtccactttcagagaagagaaatgctgacaaccatttagtctctgaggacaacacttttaaagtgtaacaatgtggcatccagagcttatccagatgagcggagagcaaatgaatttccttctgctcccctgttgaagaggagagaaaaattcttcaagctggagaactacttgatcttaaa

SEQ ID NO: 282759 - DNA, 418 bp, Homo sapiens
atcccgccccggcacccgcaggcccctcgggtcttcgcagcccgcttcttcctctcaggccatcgcaggcctccctgccgcccgtgtgcccgcctcggcggtctcacatcgcgctcaccgttcaccagcgccggggtcttctccacaaggttacggacaaattgggccatggttctggaatggagagtccgtcgccccgaaccgccggctgaatgtcacccgccggaaggacccgctgcaggaccccgtcccacttccaaggttcatttcctgttgagcagttagagcatgtgcattatttcctcacatgacatcaacagtgcagcatcagcctctggcatgtaaaggcacccagtagacttatgctctgtgcaatggctgcttagcaaccaccatcaaataaagtaatgaagctttt

SEQ ID NO: 282760 - DNA, 831 bp, Homo sapiens
tgcagctattttaggttctctaacttcatcgtagtttatagggtaagtaaagggaaggggaaagtgattggtgtggttgtctcccataagaactgatttttttctactgaagcatgtataaagtttatatatgactttttatatttgtttaataaaaattttacaggaactaaatttgattatcaatatgaagtttttctttaatttcagatttcaactattgcagaaagtgaagattcacaggagtcagtggatagtgtaactgattcccaaaagcgaagggaaattctttcaaggaggccttcctacaggtatggaatttaatagttagaatcaaagatgtggaggaagtcttaggtagttgcagataaagagatgtcagaagaccagttagttgttcacgtcagttccttatagattacttttcttcatcttgagttatttgtctcaaataaagtggaagcttatcctacagaataagaagagcacttgttactctcaccagtcctaattttttttttttctgtttctgtttctgtagactgtgctggctgtctttctgttaaaagtttggaatacagttgataaggttatagcattttttagttataagccaactctgaggctctgttatttatctacttagtaacacattgcaaaccattttttatgccatggtacttaacagatagctattaatttaataattgtctcagggagatgctttactaacatcccctaattttagcagtagcttactgtaatttttgtgttcagttatagatgttgcctagtccatgccttgcctccaaggtgaaccaaaaccatttt

SEQ ID NO: 282761 - DNA, 860 bp, Homo sapiens
agctgctggttatcccactctgccatgtgtgctgtttctctttgcttttgccactactccactctgtgcttgaaattctgtgactcttccctgtatctatgccagcagctcatgcaacatcatctgctcccaccgtaactctagtacagctgcccaatgggcagacagttcaagtccatggagtcattcaggcggcccagccatcagttattcagtctccacaagtccaaacagttcagatttcaactattgcagaaagtgaagattcacaggagtcagtggatagtgtaactgattcccaaaagcgaagggaaattctttcaaggaggccttcctacaggtatggaatttaatagttagaatcaaagatgtggaggaagtcttaggtagttgcagataaagagatgtcagaagaccagttagttgttcacgtcagttccttatagattacttttcttcatcttgagttatttgtctcaaataaagtggaagcttatcctacagaataagaagagcacttgttactctcaccagtcctaattttttttttttctgtttctgtttctgtagactgtgctggctgtctttctgttaaaagtttggaatacagttgataaggttatagcattttttagttataagccaactctgaggctctgttatttatctacttagtaacacattgcaaaccattttttatgccatggtacttaacagatagctattaatttaataattgtctcagggagatgctttactaacatcccctaattttagcagtagcttactgtaatttttgtgttcagttatagatgttgcctagtccatgccttgcctccaaggtgaaccaaaaccatttt

SEQ ID NO: 282762 - DNA, 556 bp, Homo sapiens
gcactgggcggcgctggctggctccctggctgcggctcctcagtcggcggcggctgctgctgcctgtggcccgggcggctgggagaagcggagtgttggtgagtgacgcggcggaggtgtagtttgacgcggtgtgttacgtgggggagagaataaaactccagcgagatccgggccgtgaacgaaagcagtgacggaggagcttgtaccaccggtaactaaatgaccatggaatctggagccgagaaccagcagagtggagatgcagctgtaacagaagctgaaaaccaacaaatgacagttcaagcccagccacagattgccacattagcccagttcaagaccagcctgggcaacatagcaagaccctgtctctacaaaaaaattaaaaattagctgggagtggtagtgcatgcctgcaatcccagctaactcaggaggttgagtctggaggatcccttgagcccatgagtttgaggctgcagtgggctgtgatcgcaccactgcactccagcctcggtgagtgagtgagatcctgtctcttaaaaaaaaaaaa

SEQ ID NO: 282763 - DNA, 2634 bp, Homo sapiens
gcactgggcggcgctggctggctccctggctgcggctcctcagtcggcggcggctgctgctgcctgtggcccgggcggctgggagaagcggagtgttggtgagtgacgcggcggaggtgtagtttgacgcggtgtgttacgtgggggagagaataaaactccagcgagatccgggccgtgaacgaaagcagtgacggaggagcttgtaccaccggtaactaaatgaccatggaatctggagccgagaaccagcagagtggagatgcagctgtaacagaagctgaaaaccaacaaatgacagttcaagcccagccacagattgccacattagcccaggtatctatgccagcagctcatgcaacatcatctgctcccaccgtaactctagtacagctgcccaatgggcagacagttcaagtccatggagtcattcaggcggcccagccatcagttattcagtctccacaagtccaaacagttcagatttcaactattgcagaaagtgaagattcacaggagtcagtggatagtgtaactgattcccaaaagcgaagggaaattctttcaaggaggccttcctacaggaaaattttgaatgacttatcttctgatgcaccaggagtgccaaggattgaagaagagaagtctgaagaggagacttcagcacctgccatcaccactgtaacggtgccaactccaatttaccaaactagcagtggacagtatattgccattacccagggaggagcaatacagctggctaacaatggtaccgatggggtacagggcctgcaaacattaaccatgaccaatgcagcagccactcagccgggtactaccattctacagtatgcacagaccactgatggacagcagatcttagtgcccagcaaccaagttgttgttcaagctgcctctggagacgtacaaacataccagattcgcacagcacccactagcactattgcccctggagttgttatggcatcctccccagcacttcctacacagcctgctgaagaagcagcacgaaagagagaggtccgtctaatgaagaacagggaagcagctcgagagtgtcgtagaaagaagaaagaatatgtgaaatgtttagaaaacagagtggcagtgcttgaaaatcaaaacaagacattgattgaggagctaaaagcacttaaggacctttactgccacaaatcagattaatttgggatttaaattttcacctgttaaggtggaaaatggactggcttggccacaacctgaaagacaaaataaacattttattttctaaacatttctttttttctatgcgcaaaactgcctgaaagcaactacagaatttcattcatttgtgcttttgcattaaactgtgaatgttccaacacctgcctccacttctcccctcaagaaattttcaacgccaggaatcatgaagagacttctgcttttcaacccccaccctcctcaagaagtaataatttgtttacttgtaaattgatgggagaaatgaggaaaagaaaatctttttaaaaatgatttcaaggtttgtgctgagctccttgattgccttagggacagaattaccccagcctcttgagctgaagtaatgtgtgggccgcatgcataaagtaagtaaggtgcaatgaagaagtgttgattgccaaattgacatgttgtcacattctcattgtgaattatgtaaagttgttaagagacataccctctaaaaaagaactttagcatggtattgaaggaattagaaatgaatttggagtgctttttatgtatgttgtcttcttcaatactgaaaatttgtccttggttcttaaaagcattctgtactaatacagctcttccatagggcagttgttgcttcttaattcagttctgtatgtgttcaacatttttgaatacattaaaagaagtaaccaactgaacgacaaagcatggtatttgaattttaaattaaagcaaagtaaataaaagtacaaagcatattttagttagtactaaattcttagtaaaatgctgatcagtaaaccaatcccttgagttatataacaagatttttaaataaatgttattgtcctcaccttcaaaaatatttatattgtcactcatttacgtaaaaagatatttctaatttactgttgcccattgcacttacataccaccaccaagaaagccttcaagatgtcaaataaagcaaagtgatatatatttgtttatgaaatgttacatgtagaaaaatactgattttaaatattttccatattaacaatttaacagagaatctctagtgaattttttaaatgaaagaagttgtaaggatataaaaagtacagtgttagatgtgcacaaggaaagttattttcagacatatttgaatgactgctgtactgcaatatttggattgtcattcttacaaaacatttttttgttctcttgtaaaaagagtagttattagttctgctttagctttccaatatgctgtatagcctttgtcattttataattttaattcctgattaaaacagtctgtatttgtgtatatcatacattgttttcaataccacttttaattgttactcattttattcactaagctcgataaatctaacagttactctt

SEQ ID NO: 282764 - DNA, 2101 bp, Homo sapiens
gcactgggcggcgctggctggctccctggctgcggctcctcagtcggcggcggctgctgctgcctgtggcccgggcggctgggagaagcggagtgttggtgagtgacgcggcggaggtgtagtttgacgcggtgtgttacgtgggggagagaataaaactccagcgagatccgggccgtgaacgaaagcagtgacggaggagcttgtaccaccggtaactaaatgaccatggaatctggagccgagaaccagcagagtggagatgcagctgtaacagaagctgaaaaccaacaaatgacagttcaagcccagccacagattgccacattagcccaggtatctatgccagcagctcatgcaacatcatctgctcccaccgtaactctagtacagctgcccaatgggcagacagttcaagtccatggagtcattcaggcggcccagccatcagttattcagtctccacaagtccaaacagttcagatttcaactattgcagaaagtgaagattcacaggagtcagtggatagtgtaactgattcccaaaagcgaagggaaattctttcaaggaggccttcctacaggaaaattttgaatgacttatcttctgatgcaccaggagtgccaaggattgaagaagagaagtctgaagaggagacttcagcacctgccatcaccactgtaacggtgccaactccaatttaccaaactagcagtggacagtatattgccattacccagggaggagcaatacagctggctaacaatggtaccgatggggtacagggcctgcaaacattaaccatgaccaatgcagcagccactcagccgggtactaccattctacagtatgcacagaccactgatggacagcagatcttagtgcccagcaaccaagttgttgttcaagctgcctctggagacgtacaaacataccagattcgcacagcacccactagcactattgcccctggagttgttatggcatcctccccagcacttcctacacagcctgctgaagaagcagcacgaaagagagaggtccgtctaatgaagaacagggaagcagctcgagagtgtcgtagaaagaagaaagaatatgtgaaatgtttagaaaacagagtggcagtgcttgaaaatcaaaacaagacattgattgaggagctaaaagcacttaaggacctttactgccacaaatcagattaatttgggatttaaattttcacctgttaaggtggaaaatggactggcttggccacaacctgaaagacaaaataaacattttattttctaaacatttctttttttctatgcgcaaaactgcctgaaagcaactacagaatttcattcatttgtgcttttgcattaaactgtgaatgttccaacacctgcctccacttctcccctcaagaaattttcaacgccaggaatcatgaagagacttctgcttttcaacccccaccctcctcaagaagtaataatttgtttacttgtaaattgatgggagaaatgaggaaaagaaaatctttttaaaaatgatttcaaggtttgtgctgagctccttgattgccttagggacagaattaccccagcctcttgagctgaagtaatgtgtgggccgcatgcataaagtaagtaaggtgcaatgaagaagtgttgattgccaaattgacatgttgtcacattctcattgtgaattatgtaaagttgttaagagacataccctctaaaaaagaactttagcatggtattgaaggaattagaaatgaatttggagtgctttttatgtatgttgtcttcttcaatactgaaaatttgtccttggttcttaaaagcattctgtactaatacagctcttccatagggcagttgttgcttcttaattcagttctgtatgtgttcaacatttttgaatacattaaaagaagtaaccaactgaacgacaaagcatggtatttgaattttaaattaaagcaaagtaaataaaagtacaaagcatattttagttagtactaaattcttagtaaaatgctgatcagtaaaccaatcccttgagttatataacaagatttttaaataaatgttattgtcctcaccttca

SEQ ID NO: 282765 - DNA, 2880 bp, Homo sapiens
gcactgggcggcgctggctggctccctggctgcggctcctcagtcggcggcggctgctgctgcctgtggcccgggcggctgggagaagcggagtgttggtaactaaatgaccatggaatctggagccgagaaccagcagagtggagatgcagctgtaacagaagctgaaaaccaacaaatgacagttcaagcccagccacagattgccacattagcccaggtatctatgccagcagctcatgcaacatcatctgctcccaccgtaactctagtacagctgcccaatgggcagacagttcaagtccatggagtcattcaggcggcccagccatcagttattcagtctccacaagtccaaacagttcagatttcaactattgcagaaagtgaagattcacaggagtcagtggatagtgtaactgattcccaaaagcgaagggaaattctttcaaggaggccttcctacaggaaaattttgaatgacttatcttctgatgcaccaggagtgccaaggattgaagaagagaagtctgaagaggagacttcagcacctgccatcaccactgtaacggtgccaactccaatttaccaaactagcagtggacagtatattgccattacccagggaggagcaatacagctggctaacaatggtaccgatggggtacagggcctgcaaacattaaccatgaccaatgcagcagccactcagccgggtactaccattctacagtatgcacagaccactgatggacagcagatcttagtgcccagcaaccaagttgttgttcaagctgcctctggagacgtacaaacataccagattcgcacagcacccactagcactattgcccctggagttgttatggcatcctccccagcacttcctacacagcctgctgaagaagcagcacgaaagagagaggtccgtctaatgaagaacagggaagcagctcgagagtgtcgtagaaagaagaaagaatatgtgaaatgtttagaaaacagagtggcagtgcttgaaaatcaaaacaagacattgattgaggagctaaaagcacttaaggacctttactgccacaaatcagattaatttgggatttaaattttcacctgttaaggtggaaaatggactggcttggccacaacctgaaagacaaaataaacattttattttctaaacatttctttttttctatgcgcaaaactgcctgaaagcaactacagaatttcattcatttgtgcttttgcattaaactgtgaatgttccaacacctgcctccacttctcccctcaagaaattttcaacgccaggaatcatgaagagacttctgcttttcaacccccaccctcctcaagaagtaataatttgtttacttgtaaattgatgggagaaatgaggaaaagaaaatctttttaaaaatgatttcaaggtttgtgctgagctccttgattgccttagggacagaattaccccagcctcttgagctgaagtaatgtgtgggccgcatgcataaagtaagtaaggtgcaatgaagaagtgttgattgccaaattgacatgttgtcacattctcattgtgaattatgtaaagttgttaagagacataccctctaaaaaagaactttagcatggtattgaaggaattagaaatgaatttggagtgctttttatgtatgttgtcttcttcaatactgaaaatttgtccttggttcttaaaagcattctgtactaatacagctcttccatagggcagttgttgcttcttaattcagttctgtatgtgttcaacatttttgaatacattaaaagaagtaaccaactgaacgacaaagcatggtatttgaattttaaattaaagcaaagtaaataaaagtacaaagcatattttagttagtactaaattcttagtaaaatgctgatcagtaaaccaatcccttgagttatataacaagatttttaaataaatgttattgtcctcaccttcaaaaatatttatattgtcactcatttacgtaaaaagatatttctaatttactgttgcccattgcacttacataccaccaccaagaaagccttcaagatgtcaaataaagcaaagtgatatatatttgtttatgaaatgttacatgtagaaaaatactgattttaaatattttccatattaacaatttaacagagaatctctagtgaattttttaaatgaaagaagttgtaaggatataaaaagtacagtgttagatgtgcacaaggaaagttattttcagacatatttgaatgactgctgtactgcaatatttggattgtcattcttacaaaacatttttttgttctcttgtaaaaagagtagttattagttctgctttagctttccaatatgctgtatagcctttgtcattttataattttaattcctgattaaaacagtctgtatttgtgtatatcatacattgttttcaataccacttttaattgttactcattttattcactaagctcgataaatctaacagttactcttaaaaaaaaaaaaaaagactaaggtggattttaaaaattggaaactgacataatgttaggttataatttctcatttggagccgggcgcagtggctcacgcctgtaatcccagcactttgggaggccaaggtgggtggatcacctgtggtcaagagttcaagaccagcctggccatcatggtgaaaccccatctctactaaaaatacaaaaattagccaggcgtggtggctggcgcctgtaatcccagctactcaggaggttgaggcagcagaattgcttgaacccaggaggcagagggttgcagtgagccgagatagcaccattgcactccagcctgggcgactccatctcaaaaaataaaaa

SEQ ID NO: 282766 - DNA, 2943 bp, Homo sapiens
gcactgggcggcgctggctggctccctggctgcggctcctcagtcggcggcggctgctgctgcctgtggcccgggcggctgggagaagcggagtgttggtgagtgacgcggcggaggtgtagtttgacgcggtgtgttacgtgggggagagaataaaactccagcgagatccgggccgtgaacgaaagcagtgacggaggagcttgtaccaccggtaactaaatgaccatggaatctggagccgagaaccagcagagtggagatgcagctgtaacagaagctgaaaaccaacaaatgacagttcaagcccagccacagattgccacattagcccaggtatctatgccagcagctcatgcaacatcatctgctcccaccgtaactctagtacagctgcccaatgggcagacagttcaagtccatggagtcattcaggcggcccagccatcagttattcagtctccacaagtccaaacagttcagatttcaactattgcagaaagtgaagattcacaggagtcagtggatagtgtaactgattcccaaaagcgaagggaaattctttcaaggaggccttcctacagaagagaagtctgaagaggagacttcagcacctgccatcaccactgtaacggtgccaactccaatttaccaaactagcagtggacagtatattgccattacccagggaggagcaatacagctggctaacaatggtaccgatggggtacagggcctgcaaacattaaccatgaccaatgcagcagccactcagccgggtactaccattctacagtatgcacagaccactgatggacagcagatcttagtgcccagcaaccaagttgttgttcaagctgcctctggagacgtacaaacataccagattcgcacagcacccactagcactattgcccctggagttgttatggcatcctccccagcacttcctacacagcctgctgaagaagcagcacgaaagagagaggtccgtctaatgaagaacagggaagcagctcgagagtgtcgtagaaagaagaaagaatatgtgaaatgtttagaaaacagagtggcagtgcttgaaaatcaaaacaagacattgattgaggagctaaaagcacttaaggacctttactgccacaaatcagattaatttgggatttaaattttcacctgttaaggtggaaaatggactggcttggccacaacctgaaagacaaaataaacattttattttctaaacatttctttttttctatgcgcaaaactgcctgaaagcaactacagaatttcattcatttgtgcttttgcattaaactgtgaatgttccaacacctgcctccacttctcccctcaagaaattttcaacgccaggaatcatgaagagacttctgcttttcaacccccaccctcctcaagaagtaataatttgtttacttgtaaattgatgggagaaatgaggaaaagaaaatctttttaaaaatgatttcaaggtttgtgctgagctccttgattgccttagggacagaattaccccagcctcttgagctgaagtaatgtgtgggccgcatgcataaagtaagtaaggtgcaatgaagaagtgttgattgccaaattgacatgttgtcacattctcattgtgaattatgtaaagttgttaagagacataccctctaaaaaagaactttagcatggtattgaaggaattagaaatgaatttggagtgctttttatgtatgttgtcttcttcaatactgaaaatttgtccttggttcttaaaagcattctgtactaatacagctcttccatagggcagttgttgcttcttaattcagttctgtatgtgttcaacatttttgaatacattaaaagaagtaaccaactgaacgacaaagcatggtatttgaattttaaattaaagcaaagtaaataaaagtacaaagcatattttagttagtactaaattcttagtaaaatgctgatcagtaaaccaatcccttgagttatataacaagatttttaaataaatgttattgtcctcaccttcaaaaatatttatattgtcactcatttacgtaaaaagatatttctaatttactgttgcccattgcacttacataccaccaccaagaaagccttcaagatgtcaaataaagcaaagtgatatatatttgtttatgaaatgttacatgtagaaaaatactgattttaaatattttccatattaacaatttaacagagaatctctagtgaattttttaaatgaaagaagttgtaaggatataaaaagtacagtgttagatgtgcacaaggaaagttattttcagacatatttgaatgactgctgtactgcaatatttggattgtcattcttacaaaacatttttttgttctcttgtaaaaagagtagttattagttctgctttagctttccaatatgctgtatagcctttgtcattttataattttaattcctgattaaaacagtctgtatttgtgtatatcatacattgttttcaataccacttttaattgttactcattttattcactaagctcgataaatctaacagttactcttaaaaaaaaaaaaaaagactaaggtggattttaaaaattggaaactgacataatgttaggttataatttctcatttggagccgggcgcagtggctcacgcctgtaatcccagcactttgggaggccaaggtgggtggatcacctgtggtcaagagttcaagaccagcctggccatcatggtgaaaccccatctctactaaaaatacaaaaattagccaggcgtggtggctggcgcctgtaatcccagctactcaggaggttgaggcagcagaattgcttgaacccaggaggcagagggttgcagtgagccgagatagcaccattgcactccagcctgggcgactccatctcaaaaaataaaaa

SEQ ID NO: 282767 - DNA, 3174 bp, Homo sapiens
gcactgggcggcgctggctggctccctggctgcggctcctcagtcggcggcggctgctgctgcctgtggcccgggcggctgggagaagcggagtgttggtgagtgacgcggcggaggtgtagtttgacgcggtgtgttacgtgggggagagaataaaactccagcgagatccgggccgtgaacgaaagcagtgacggaggagcttgtaccaccggtaactaaatgaccatggaatctggagccgagaaccagcagagtggagatgcagctgtaacagaagctgaaaaccaacaaatgacagttcaagcccagccacagattgccacattagcccaggtatctatgccagcagctcatgcaacatcatctgctcccaccgtaactctagtacagctgcccaatgggcagacagttcaagtccatggagtcattcaggcggcccagccatcagttattcagtctccacaagtccaaacagttcagatttcaactattgcagaaagtgaagattcacaggagtcagtggatagtgtaactgattcccaaaagcgaagggaaattctttcaaggaggccttcctacaggaaaattttgaatgacttatcttctgatgcaccaggagtgccaaggattgaagaagagaagtctgaagaggagacttcagcacctgccatcaccactgtaacggtgccaactccaatttaccaaactagcagtggacagtatattgccattacccagggaggagcaatacagctggctaacaatggtaccgatggggtacagggcctgcaaacattaaccatgaccaatgcagcagccactcagccgggtactaccattctacagtatgcacagaccactgatggacagcagatcttagtgcccagcaaccaagttgttgttcaaggtactcaaaaattgtaaagcaggatgtcagtgaatttgaattctgaacgtcagtttgaagatgagtctacttgaaattttttaatatgaatttaccaatatcaaaggaagacactgaggactatactctatctaggaagatcatccaagctgtgccccacttaccttttagacttaagctgcctctggagacgtacaaacataccagattcgcacagcacccactagcactattgcccctggagttgttatggcatcctccccagcacttcctacacagcctgctgaagaagcagcacgaaagagagaggtccgtctaatgaagaacagggaagcagctcgagagtgtcgtagaaagaagaaagaatatgtgaaatgtttagaaaacagagtggcagtgcttgaaaatcaaaacaagacattgattgaggagctaaaagcacttaaggacctttactgccacaaatcagattaatttgggatttaaattttcacctgttaaggtggaaaatggactggcttggccacaacctgaaagacaaaataaacattttattttctaaacatttctttttttctatgcgcaaaactgcctgaaagcaactacagaatttcattcatttgtgcttttgcattaaactgtgaatgttccaacacctgcctccacttctcccctcaagaaattttcaacgccaggaatcatgaagagacttctgcttttcaacccccaccctcctcaagaagtaataatttgtttacttgtaaattgatgggagaaatgaggaaaagaaaatctttttaaaaatgatttcaaggtttgtgctgagctccttgattgccttagggacagaattaccccagcctcttgagctgaagtaatgtgtgggccgcatgcataaagtaagtaaggtgcaatgaagaagtgttgattgccaaattgacatgttgtcacattctcattgtgaattatgtaaagttgttaagagacataccctctaaaaaagaactttagcatggtattgaaggaattagaaatgaatttggagtgctttttatgtatgttgtcttcttcaatactgaaaatttgtccttggttcttaaaagcattctgtactaatacagctcttccatagggcagttgttgcttcttaattcagttctgtatgtgttcaacatttttgaatacattaaaagaagtaaccaactgaacgacaaagcatggtatttgaattttaaattaaagcaaagtaaataaaagtacaaagcatattttagttagtactaaattcttagtaaaatgctgatcagtaaaccaatcccttgagttatataacaagatttttaaataaatgttattgtcctcaccttcaaaaatatttatattgtcactcatttacgtaaaaagatatttctaatttactgttgcccattgcacttacataccaccaccaagaaagccttcaagatgtcaaataaagcaaagtgatatatatttgtttatgaaatgttacatgtagaaaaatactgattttaaatattttccatattaacaatttaacagagaatctctagtgaattttttaaatgaaagaagttgtaaggatataaaaagtacagtgttagatgtgcacaaggaaagttattttcagacatatttgaatgactgctgtactgcaatatttggattgtcattcttacaaaacatttttttgttctcttgtaaaaagagtagttattagttctgctttagctttccaatatgctgtatagcctttgtcattttataattttaattcctgattaaaacagtctgtatttgtgtatatcatacattgttttcaataccacttttaattgttactcattttattcactaagctcgataaatctaacagttactcttaaaaaaaaaaaaaaagactaaggtggattttaaaaattggaaactgacataatgttaggttataatttctcatttggagccgggcgcagtggctcacgcctgtaatcccagcactttgggaggccaaggtgggtggatcacctgtggtcaagagttcaagaccagcctggccatcatggtgaaaccccatctctactaaaaatacaaaaattagccaggcgtggtggctggcgcctgtaatcccagctactcaggaggttgaggcagcagaattgcttgaacccaggaggcagagggttgcagtgagccgagatagcaccattgcactccagcctgggcgactccatctcaaaaaataaaaa

SEQ ID NO: 282768 - DNA, 1345 bp, Homo sapiens
gcactgggcggcgctggctggctccctggctgcggctcctcagtcggcggcggctgctgctgcctgtggcccgggcggctgggagaagcggagtgttggtgagtgacgcggcggaggtgtagtttgacgcggtgtgttacgtgggggagagaataaaactccagcgagatccgggccgtgaacgaaagcagtgacggaggagcttgtaccaccggtaactaaatgaccatggaatctggagccgagaaccagcagagtggagatgcagctgtaacagaagctgaaaaccaacaaatgacagttcaagcccagccacagattgccacattagcccaggtatctatgccagcagctcatgcaacatcatctgctcccaccgtaactctagtacagctgcccaatgggcagacagttcaagtccatggagtcattcaggcggcccagccatcagttattcagtctccacaagtccaaacagttcagtcttcctgtaaggacttaaaaagacttttctccggaacacagatttcaactattgcagaaagtgaagattcacaggagtcagtggatagtgtaactgattcccaaaagcgaagggaaattctttcaaggaggccttcctacaggaaaattttgaatgacttatcttctgatgcaccaggagtgccaaggattgaagaagagaagtctgaagaggagacttcagcacctgccatcaccactgtaacggtgccaactccaatttaccaaactagcagtggacagtatattgccattacccagggaggagcaatacagctggctaacaatggtaccgatggggtacagggcctgcaaacattaaccatgaccaatgcagcagccactcagccgggtactaccattctacagtatgcacagaccactgatggacagcagatcttagtgcccagcaaccaagttgttgttcaagctgcctctggagacgtacaaacataccagattcgcacagcacccactagcactattgcccctggagttgttatggcatcctccccagcacttcctacacagcctgctgaagaagcagcacgaaagagagaggtccgtctaatgaagaacagggaagcagctcgagagtgtcgtagaaagaagaaagaatatgtgaaatgtttagaaaacagagtggcagtgcttgaaaatcaaaacaagacattgattgaggagctaaaagcacttaaggacctttactgccacaaatcagattaatttgggattaatttatttaccaaactagcagtggacagtatattgccattacccagggaggagcaatacagctggagtcagtggatagtgtaactga

SEQ ID NO: 282769 - DNA, 1481 bp, Homo sapiens
gcactgggcggcgctggctggctccctggctgcggctcctcagtcggcggcggctgctgctgcctgtggcccgggcggctgggagaagcggagtgttggtgagtgacgcggcggaggtgtagtttgacgcggtgtgttacgtgggggagagaataaaactccagcgagatccgggccgtgaacgaaagcagtgacggaggagcttgtaccaccggtaactaaatgaccatggaatctggagccgagaaccagcagagtggagatgcagctgtaacagaagctgaaaaccaacaaatgacagttcaagcccagccacagattgccacattagcccaggtatctatgccagcagctcatgcaacatcatctgctcccaccgtaactctagtacagctgcccaatgggcagacagttcaagtccatggagtcattcaggcggcccagccatcagttattcagtctccacaagtccaaacagttcagatttcaactattgcagaaagtgaagattcacaggagtcagtggatagtgtaactgattcccaaaagcgaagggaaattctttcaaggaggccttcctacaggaaaattttgaatgacttatcttctgatgcaccaggagtgccaaggattgaagaagagaagtctgaagaggagacttcagcacctgccatcaccactgtaacggtgccaactccaatttaccaaactagcagtggacagtatattgccattacccagggaggagcaatacagctggctaacaatggtaccgatggggtacagggcctgcaaacattaaccatgaccaatgcagcagccactcagccgggtactaccattctacagtatgcacagaccactgatggacagcagatcttagtgcccagcaaccaagttgttgttcaagctgcctctggagacgtacaaacataccagattcgcacagcacccactagcactattgcccctggagttgttatggcatcctccccagcacttcctacacagcctgctgaagaagcagcacgaaagagagaggtccgtctaatgaagaacaggtacaaatactgcatttacttagattgttatgtgttaagtgtgtcttcacattctgctggatgtgtatctttacatctactggtaataggatctttgcattgaattttttttttccagcagaattaatggatcttgctaaattttctttatttaataagctgcacttataagatagctgtatgattatgggtcaatctttgatcgtggagtagttttctttcatgcagtttccccacaggagatttaatgcacaacttccctatgtctgcactccaaccagttagccaggttatttaaaaatggtttcttttcatgtatagtattgttcaagaagatcaagagtttcatatatgtatattaactgtgtgttaaattttatctatattaaatttacttgatataaagtaaaaatatggtgg

SEQ ID NO: 282770 - DNA, 1363 bp, Homo sapiens
gcttttttagagggtatgtctcttaacaactttacataattcacaatgagaatgtgacaacatgtcaatttggcaatcaacacttcttcattgcaccttactaactttagcatggtattgaaggaattagaaatgaatttggagtgctttttatgtatgttgtcttcttcaatactgaaaatttgtccttggttcttaaaagcattctgtactaatacagctcttccatagggcagttgttgcttcttaattcagttctgtatgtgttcaacatttttgaatacattaaaagaagtaaccaactgaacgacaaagcatggtatttgaattttaaattaaagcaaagtaaataaaagtacaaagcatattttagttagtactaaattcttagtaaaatgctgatcagtaaaccaatcccttgagttatataacaagatttttaaataaatgttattgtcctcaccttcaaaaatatttatattgtcactcatttacgtaaaaagatatttctaatttactgttgcccattgcacttacataccaccaccaagaaagccttcaagatgtcaaataaagcaaagtgatatatatttgtttatgaaatgttacatgtagaaaaatactgattttaaatattttccatattaacaatttaacagagaatctctagtgaattttttaaatgaaagaagttgtaaggatataaaaagtacagtgttagatgtgcacaaggaaagttattttcagacatatttgaatgactgctgtactgcaatatttggattgtcattcttacaaaacatttttttgttctcttgtaaaaagagtagttattagttctgctttagctttccaatatgctgtatagcctttgtcattttataattttaattcctgattaaaacagtctgtatttgtgtatatcatacattgttttcaataccacttttaattgttactcattttattcactaagctcgataaatctaacagttactcttaaaaaaaaaaaaaaagactaaggtggattttaaaaattggaaactgacataatgttaggttataatttctcatttggagccgggcgcagtggctcacgcctgtaatcccagcactttgggaggccaaggtgggtggatcacctgtggtcaagagttcaagaccagcctggccatcatggtgaaaccccatctctactaaaaatacaaaaattagccaggcgtggtggctggcgcctgtaatcccagctactcaggaggttgaggcagcagaattgcttgaacccaggaggcagagggttgcagtgagccgagatagcaccattgcactccagcctgggcgactccatctcaaaaaataaaaa

SEQ ID NO: 282771 - DNA, 398 bp, Homo sapiens
gcactgggcggcgctggctggctccctggctgcggctcctcagtcggcggcggctgctgctgcctgtggcccgggcggctgggagaagcggagtgttggtgagtgacgcggcggaggtgtagtttgacgcggtgtgttacgtgggggagagaataaaactccagcgagatccgggccgtgaacgaaagcagtgacggaggagcttgtaccaccgccgccgcctaggtgccggtgggggatggaggaggaagaaggcgacagttgagggcagaggaggtgaaggtgcctgctgccttcccggtggcttcggtgcctgccatgcccgcttcgcaaggggaagagctgcaacgtctgacctactcttctctccactctttgtgcaataaagttcgaaaccc

SEQ ID NO: 282772 - DNA, 378 bp, Homo sapiens
cttcatacatcatacagtaacacacttatgtgcaccattggtgctgagctgctggttatcccactctgccatgtgtgctgtttctctttgcttttgccactactccactctgtgcttgaaattctgtgactcttccctgtaagtaataataacaagtctaacttttttcttttgttttaaattcacattcttccctgatagcctccccttctcttaggttgggtagagtaattctcagtgtgtccatttttcttttagcaaacctcattactaaactgaattgtattgtgtctcttttccccattccttcgcatacatacccccaataatttatttgaggtcagagacccctatctttctcacttttgtagtttcagt

SEQ ID NO: 282773 - DNA, 2996 bp, Homo sapiens
gcactgggcggcgctggctggctccctggctgcggctcctcagtcggcggcggctgctgctgcctgtggcccgggcggctgggagaagcggagtgttggtgagtgacgcggcggaggtgtagtttgacgcggtgtgttacgtgggggagagaataaaactccagcgagatccgggccgtgaacgaaagcagtgacggaggagcttgtaccaccggtaactaaatgaccatggaatctggagccgagaaccagcagagtggagatgcagctgtaacagaagctgaaaaccaacaaatgacagttcaagcccagccacagattgccacattagcccaggtatctatgccagcagctcatgcaacatcatctgctcccaccgtaactctagtacagctgcccaatgggcagacagttcaagtccatggagtcattcaggcggcccagccatcagttattcagtctccacaagtccaaacagttcagatttcaactattgcagaaagtgaagattcacaggagtcagtggatagtgtaactgattcccaaaagcgaagggaaattctttcaaggaggccttcctacaggaaaattttgaatgacttatcttctgatgcaccaggagtgccaaggattgaagaagagaagtctgaagaggagacttcagcacctgccatcaccactgtaacggtgccaactccaatttaccaaactagcagtggacagtatattgccattacccagggaggagcaatacagctggctaacaatggtaccgatggggtacagggcctgcaaacattaaccatgaccaatgcagcagccactcagccgggtactaccattctacagtatgcacagaccactgatggacagcagatcttagtgcccagcaaccaagttgttgttcaagctgcctctggagacgtacaaacataccagattcgcacagcacccactagcactattgcccctggagttgttatggcatcctccccagcacttcctacacagcctgctgaagaagcagcacgaaagagagaggtccgtctaatgaagaacagggaagcagctcgagagtgtcgtagaaagaagaaagaatatgtgaaatgtttagaaaacagagtggcagtgcttgaaaatcaaaacaagacattgattgaggagctaaaagcacttaaggacctttactgccacaaatcagattaatttgggatttaaattttcacctgttaaggtggaaaatggactggcttggccacaacctgaaagacaaaataaacattttattttctaaacatttctttttttctatgcgcaaaactgcctgaaagcaactacagaatttcattcatttgtgcttttgcattaaactgtgaatgttccaacacctgcctccacttctcccctcaagaaattttcaacgccaggaatcatgaagagacttctgcttttcaacccccaccctcctcaagaagtaataatttgtttacttgtaaattgatgggagaaatgaggaaaagaaaatctttttaaaaatgatttcaaggtttgtgctgagctccttgattgccttagggacagaattaccccagcctcttgagctgaagtaatgtgtgggccgcatgcataaagtaagtaaggtgcaatgaagaagtgttgattgccaaattgacatgttgtcacattctcattgtgaattatgtaaagttgttaagagacataccctctaaaaaagaactttagcatggtattgaaggaattagaaatgaatttggagtgctttttatgtatgttgtcttcttcaatactgaaaatttgtccttggttcttaaaagcattctgtactaatacagctcttccatagggcagttgttgcttcttaattcagttctgtatgtgttcaacatttttgaatacattaaaagaagtaaccaactgaacgacaaagcatggtatttgaattttaaattaaagcaaagtaaataaaagtacaaagcatattttagttagtactaaattcttagtaaaatgctgatcagtaaaccaatcccttgagttatataacaagatttttaaataaatgttattgtcctcaccttcaaaaatatttatattgtcactcatttacgtaaaaagatatttctaatttactgttgcccattgcacttacataccaccaccaagaaagccttcaagatgtcaaataaagcaaagtgatatatatttgtttatgaaatgttacatgtagaaaaatactgattttaaatattttccatattaacaatttaacagagaatctctagtgaattttttaaatgaaagaagttgtaaggatataaaaagtacagtgttagatgtgcacaaggaaagttattttcagacatatttgaatgactgctgtactgcaatatttggattgtcattcttacaaaacatttttttgttctcttgtaaaaagagtagttattagttctgctttagctttccaatatgctgtatagcctttgtcattttataattttaattcctgattaaaacagtctgtatttgtgtatatcatacattgttttcaataccacttttaattgttactcattttattcactaagctcgataaatctaacagttactcttaaaaaaaaaaaaaaagactaaggtggattttaaaaattggaaactgacataatgttaggttataatttctcatttggagccgggcgcagtggctcacgcctgtaatcccagcactttgggaggccaaggtgggtggatcacctgtggtcaagagttcaagaccagcctggccatcatggtgaaaccccatctctactaaaaatacaaaaattagccaggcgtggtggctggcgcctgtaatcccagctactcaggaggttgaggcagcagaattgcttgaacccaggaggcagagggttgcagtgagccgagatagcaccattgcactccagcctgggcgactccatctcaaaaaataaaaa

SEQ ID NO: 282774 - DNA, 3038 bp, Homo sapiens
gcactgggcggcgctggctggctccctggctgcggctcctcagtcggcggcggctgctgctgcctgtggcccgggcggctgggagaagcggagtgttggtgagtgacgcggcggaggtgtagtttgacgcggtgtgttacgtgggggagagaataaaactccagcgagatccgggccgtgaacgaaagcagtgacggaggagcttgtaccaccggtaactaaatgaccatggaatctggagccgagaaccagcagagtggagatgcagctgtaacagaagctgaaaaccaacaaatgacagttcaagcccagccacagattgccacattagcccaggtatctatgccagcagctcatgcaacatcatctgctcccaccgtaactctagtacagctgcccaatgggcagacagttcaagtccatggagtcattcaggcggcccagccatcagttattcagtctccacaagtccaaacagttcagtcttcctgtaaggacttaaaaagacttttctccggaacacagatttcaactattgcagaaagtgaagattcacaggagtcagtggatagtgtaactgattcccaaaagcgaagggaaattctttcaaggaggccttcctacaggaaaattttgaatgacttatcttctgatgcaccaggagtgccaaggattgaagaagagaagtctgaagaggagacttcagcacctgccatcaccactgtaacggtgccaactccaatttaccaaactagcagtggacagtatattgccattacccagggaggagcaatacagctggctaacaatggtaccgatggggtacagggcctgcaaacattaaccatgaccaatgcagcagccactcagccgggtactaccattctacagtatgcacagaccactgatggacagcagatcttagtgcccagcaaccaagttgttgttcaagctgcctctggagacgtacaaacataccagattcgcacagcacccactagcactattgcccctggagttgttatggcatcctccccagcacttcctacacagcctgctgaagaagcagcacgaaagagagaggtccgtctaatgaagaacagggaagcagctcgagagtgtcgtagaaagaagaaagaatatgtgaaatgtttagaaaacagagtggcagtgcttgaaaatcaaaacaagacattgattgaggagctaaaagcacttaaggacctttactgccacaaatcagattaatttgggatttaaattttcacctgttaaggtggaaaatggactggcttggccacaacctgaaagacaaaataaacattttattttctaaacatttctttttttctatgcgcaaaactgcctgaaagcaactacagaatttcattcatttgtgcttttgcattaaactgtgaatgttccaacacctgcctccacttctcccctcaagaaattttcaacgccaggaatcatgaagagacttctgcttttcaacccccaccctcctcaagaagtaataatttgtttacttgtaaattgatgggagaaatgaggaaaagaaaatctttttaaaaatgatttcaaggtttgtgctgagctccttgattgccttagggacagaattaccccagcctcttgagctgaagtaatgtgtgggccgcatgcataaagtaagtaaggtgcaatgaagaagtgttgattgccaaattgacatgttgtcacattctcattgtgaattatgtaaagttgttaagagacataccctctaaaaaagaactttagcatggtattgaaggaattagaaatgaatttggagtgctttttatgtatgttgtcttcttcaatactgaaaatttgtccttggttcttaaaagcattctgtactaatacagctcttccatagggcagttgttgcttcttaattcagttctgtatgtgttcaacatttttgaatacattaaaagaagtaaccaactgaacgacaaagcatggtatttgaattttaaattaaagcaaagtaaataaaagtacaaagcatattttagttagtactaaattcttagtaaaatgctgatcagtaaaccaatcccttgagttatataacaagatttttaaataaatgttattgtcctcaccttcaaaaatatttatattgtcactcatttacgtaaaaagatatttctaatttactgttgcccattgcacttacataccaccaccaagaaagccttcaagatgtcaaataaagcaaagtgatatatatttgtttatgaaatgttacatgtagaaaaatactgattttaaatattttccatattaacaatttaacagagaatctctagtgaattttttaaatgaaagaagttgtaaggatataaaaagtacagtgttagatgtgcacaaggaaagttattttcagacatatttgaatgactgctgtactgcaatatttggattgtcattcttacaaaacatttttttgttctcttgtaaaaagagtagttattagttctgctttagctttccaatatgctgtatagcctttgtcattttataattttaattcctgattaaaacagtctgtatttgtgtatatcatacattgttttcaataccacttttaattgttactcattttattcactaagctcgataaatctaacagttactcttaaaaaaaaaaaaaaagactaaggtggattttaaaaattggaaactgacataatgttaggttataatttctcatttggagccgggcgcagtggctcacgcctgtaatcccagcactttgggaggccaaggtgggtggatcacctgtggtcaagagttcaagaccagcctggccatcatggtgaaaccccatctctactaaaaatacaaaaattagccaggcgtggtggctggcgcctgtaatcccagctactcaggaggttgaggcagcagaattgcttgaacccaggaggcagagggttgcagtgagccgagatagcaccattgcactccagcctgggcgactccatctcaaaaaataaaaa

SEQ ID NO: 282775 - DNA, 2752 bp, Homo sapiens
agctgctggttatcccactctgccatgtgtgctgtttctctttgcttttgccactactccactctgtgcttgaaattctgtgactcttccctgtatctatgccagcagctcatgcaacatcatctgctcccaccgtaactctagtacagctgcccaatgggcagacagttcaagtccatggagtcattcaggcggcccagccatcagttattcagtctccacaagtccaaacagttcagatttcaactattgcagaaagtgaagattcacaggagtcagtggatagtgtaactgattcccaaaagcgaagggaaattctttcaaggaggccttcctacaggaaaattttgaatgacttatcttctgatgcaccaggagtgccaaggattgaagaagagaagtctgaagaggagacttcagcacctgccatcaccactgtaacggtgccaactccaatttaccaaactagcagtggacagtatattgccattacccagggaggagcaatacagctggctaacaatggtaccgatggggtacagggcctgcaaacattaaccatgaccaatgcagcagccactcagccgggtactaccattctacagtatgcacagaccactgatggacagcagatcttagtgcccagcaaccaagttgttgttcaagctgcctctggagacgtacaaacataccagattcgcacagcacccactagcactattgcccctggagttgttatggcatcctccccagcacttcctacacagcctgctgaagaagcagcacgaaagagagaggtccgtctaatgaagaacagggaagcagctcgagagtgtcgtagaaagaagaaagaatatgtgaaatgtttagaaaacagagtggcagtgcttgaaaatcaaaacaagacattgattgaggagctaaaagcacttaaggacctttactgccacaaatcagattaatttgggatttaaattttcacctgttaaggtggaaaatggactggcttggccacaacctgaaagacaaaataaacattttattttctaaacatttctttttttctatgcgcaaaactgcctgaaagcaactacagaatttcattcatttgtgcttttgcattaaactgtgaatgttccaacacctgcctccacttctcccctcaagaaattttcaacgccaggaatcatgaagagacttctgcttttcaacccccaccctcctcaagaagtaataatttgtttacttgtaaattgatgggagaaatgaggaaaagaaaatctttttaaaaatgatttcaaggtttgtgctgagctccttgattgccttagggacagaattaccccagcctcttgagctgaagtaatgtgtgggccgcatgcataaagtaagtaaggtgcaatgaagaagtgttgattgccaaattgacatgttgtcacattctcattgtgaattatgtaaagttgttaagagacataccctctaaaaaagaactttagcatggtattgaaggaattagaaatgaatttggagtgctttttatgtatgttgtcttcttcaatactgaaaatttgtccttggttcttaaaagcattctgtactaatacagctcttccatagggcagttgttgcttcttaattcagttctgtatgtgttcaacatttttgaatacattaaaagaagtaaccaactgaacgacaaagcatggtatttgaattttaaattaaagcaaagtaaataaaagtacaaagcatattttagttagtactaaattcttagtaaaatgctgatcagtaaaccaatcccttgagttatataacaagatttttaaataaatgttattgtcctcaccttcaaaaatatttatattgtcactcatttacgtaaaaagatatttctaatttactgttgcccattgcacttacataccaccaccaagaaagccttcaagatgtcaaataaagcaaagtgatatatatttgtttatgaaatgttacatgtagaaaaatactgattttaaatattttccatattaacaatttaacagagaatctctagtgaattttttaaatgaaagaagttgtaaggatataaaaagtacagtgttagatgtgcacaaggaaagttattttcagacatatttgaatgactgctgtactgcaatatttggattgtcattcttacaaaacatttttttgttctcttgtaaaaagagtagttattagttctgctttagctttccaatatgctgtatagcctttgtcattttataattttaattcctgattaaaacagtctgtatttgtgtatatcatacattgttttcaataccacttttaattgttactcattttattcactaagctcgataaatctaacagttactcttaaaaaaaaaaaaaaagactaaggtggattttaaaaattggaaactgacataatgttaggttataatttctcatttggagccgggcgcagtggctcacgcctgtaatcccagcactttgggaggccaaggtgggtggatcacctgtggtcaagagttcaagaccagcctggccatcatggtgaaaccccatctctactaaaaatacaaaaattagccaggcgtggtggctggcgcctgtaatcccagctactcaggaggttgaggcagcagaattgcttgaacccaggaggcagagggttgcagtgagccgagatagcaccattgcactccagcctgggcgactccatctcaaaaaataaaaa

SEQ ID NO: 282776 - DNA, 2985 bp, Homo sapiens
gcactgggcggcgctggctggctccctggctgcggctcctcagtcggcggcggctgctgctgcctgtggcccgggcggctgggagaagcggagtgttggtgagtgacgcggcggaggtgtagtttgacgcggtgtgttacgtgggggagagaataaaactccagcgagatccgggccgtgaacgaaagcagtgacggaggagcttgtaccaccggtaactaaatgaccatggaatctggagccgagaaccagcagagtggagatgcagctgtaacagaagctgaaaaccaacaaatgacagttcaagcccagccacagattgccacattagcccaggtatctatgccagcagctcatgcaacatcatctgctcccaccgtaactctagtacagctgcccaatgggcagacagttcaagtccatggagtcattcaggcggcccagccatcagttattcagtctccacaagtccaaacagttcagtcttcctgtaaggacttaaaaagacttttctccggaacacagatttcaactattgcagaaagtgaagattcacaggagtcagtggatagtgtaactgattcccaaaagcgaagggaaattctttcaaggaggccttcctacagaagagaagtctgaagaggagacttcagcacctgccatcaccactgtaacggtgccaactccaatttaccaaactagcagtggacagtatattgccattacccagggaggagcaatacagctggctaacaatggtaccgatggggtacagggcctgcaaacattaaccatgaccaatgcagcagccactcagccgggtactaccattctacagtatgcacagaccactgatggacagcagatcttagtgcccagcaaccaagttgttgttcaagctgcctctggagacgtacaaacataccagattcgcacagcacccactagcactattgcccctggagttgttatggcatcctccccagcacttcctacacagcctgctgaagaagcagcacgaaagagagaggtccgtctaatgaagaacagggaagcagctcgagagtgtcgtagaaagaagaaagaatatgtgaaatgtttagaaaacagagtggcagtgcttgaaaatcaaaacaagacattgattgaggagctaaaagcacttaaggacctttactgccacaaatcagattaatttgggatttaaattttcacctgttaaggtggaaaatggactggcttggccacaacctgaaagacaaaataaacattttattttctaaacatttctttttttctatgcgcaaaactgcctgaaagcaactacagaatttcattcatttgtgcttttgcattaaactgtgaatgttccaacacctgcctccacttctcccctcaagaaattttcaacgccaggaatcatgaagagacttctgcttttcaacccccaccctcctcaagaagtaataatttgtttacttgtaaattgatgggagaaatgaggaaaagaaaatctttttaaaaatgatttcaaggtttgtgctgagctccttgattgccttagggacagaattaccccagcctcttgagctgaagtaatgtgtgggccgcatgcataaagtaagtaaggtgcaatgaagaagtgttgattgccaaattgacatgttgtcacattctcattgtgaattatgtaaagttgttaagagacataccctctaaaaaagaactttagcatggtattgaaggaattagaaatgaatttggagtgctttttatgtatgttgtcttcttcaatactgaaaatttgtccttggttcttaaaagcattctgtactaatacagctcttccatagggcagttgttgcttcttaattcagttctgtatgtgttcaacatttttgaatacattaaaagaagtaaccaactgaacgacaaagcatggtatttgaattttaaattaaagcaaagtaaataaaagtacaaagcatattttagttagtactaaattcttagtaaaatgctgatcagtaaaccaatcccttgagttatataacaagatttttaaataaatgttattgtcctcaccttcaaaaatatttatattgtcactcatttacgtaaaaagatatttctaatttactgttgcccattgcacttacataccaccaccaagaaagccttcaagatgtcaaataaagcaaagtgatatatatttgtttatgaaatgttacatgtagaaaaatactgattttaaatattttccatattaacaatttaacagagaatctctagtgaattttttaaatgaaagaagttgtaaggatataaaaagtacagtgttagatgtgcacaaggaaagttattttcagacatatttgaatgactgctgtactgcaatatttggattgtcattcttacaaaacatttttttgttctcttgtaaaaagagtagttattagttctgctttagctttccaatatgctgtatagcctttgtcattttataattttaattcctgattaaaacagtctgtatttgtgtatatcatacattgttttcaataccacttttaattgttactcattttattcactaagctcgataaatctaacagttactcttaaaaaaaaaaaaaaagactaaggtggattttaaaaattggaaactgacataatgttaggttataatttctcatttggagccgggcgcagtggctcacgcctgtaatcccagcactttgggaggccaaggtgggtggatcacctgtggtcaagagttcaagaccagcctggccatcatggtgaaaccccatctctactaaaaatacaaaaattagccaggcgtggtggctggcgcctgtaatcccagctactcaggaggttgaggcagcagaattgcttgaacccaggaggcagagggttgcagtgagccgagatagcaccattgcactccagcctgggcgactccatctcaaaaaataaaaa

SEQ ID NO: 282777 - DNA, 3216 bp, Homo sapiens
gcactgggcggcgctggctggctccctggctgcggctcctcagtcggcggcggctgctgctgcctgtggcccgggcggctgggagaagcggagtgttggtgagtgacgcggcggaggtgtagtttgacgcggtgtgttacgtgggggagagaataaaactccagcgagatccgggccgtgaacgaaagcagtgacggaggagcttgtaccaccggtaactaaatgaccatggaatctggagccgagaaccagcagagtggagatgcagctgtaacagaagctgaaaaccaacaaatgacagttcaagcccagccacagattgccacattagcccaggtatctatgccagcagctcatgcaacatcatctgctcccaccgtaactctagtacagctgcccaatgggcagacagttcaagtccatggagtcattcaggcggcccagccatcagttattcagtctccacaagtccaaacagttcagtcttcctgtaaggacttaaaaagacttttctccggaacacagatttcaactattgcagaaagtgaagattcacaggagtcagtggatagtgtaactgattcccaaaagcgaagggaaattctttcaaggaggccttcctacaggaaaattttgaatgacttatcttctgatgcaccaggagtgccaaggattgaagaagagaagtctgaagaggagacttcagcacctgccatcaccactgtaacggtgccaactccaatttaccaaactagcagtggacagtatattgccattacccagggaggagcaatacagctggctaacaatggtaccgatggggtacagggcctgcaaacattaaccatgaccaatgcagcagccactcagccgggtactaccattctacagtatgcacagaccactgatggacagcagatcttagtgcccagcaaccaagttgttgttcaaggtactcaaaaattgtaaagcaggatgtcagtgaatttgaattctgaacgtcagtttgaagatgagtctacttgaaattttttaatatgaatttaccaatatcaaaggaagacactgaggactatactctatctaggaagatcatccaagctgtgccccacttaccttttagacttaagctgcctctggagacgtacaaacataccagattcgcacagcacccactagcactattgcccctggagttgttatggcatcctccccagcacttcctacacagcctgctgaagaagcagcacgaaagagagaggtccgtctaatgaagaacagggaagcagctcgagagtgtcgtagaaagaagaaagaatatgtgaaatgtttagaaaacagagtggcagtgcttgaaaatcaaaacaagacattgattgaggagctaaaagcacttaaggacctttactgccacaaatcagattaatttgggatttaaattttcacctgttaaggtggaaaatggactggcttggccacaacctgaaagacaaaataaacattttattttctaaacatttctttttttctatgcgcaaaactgcctgaaagcaactacagaatttcattcatttgtgcttttgcattaaactgtgaatgttccaacacctgcctccacttctcccctcaagaaattttcaacgccaggaatcatgaagagacttctgcttttcaacccccaccctcctcaagaagtaataatttgtttacttgtaaattgatgggagaaatgaggaaaagaaaatctttttaaaaatgatttcaaggtttgtgctgagctccttgattgccttagggacagaattaccccagcctcttgagctgaagtaatgtgtgggccgcatgcataaagtaagtaaggtgcaatgaagaagtgttgattgccaaattgacatgttgtcacattctcattgtgaattatgtaaagttgttaagagacataccctctaaaaaagaactttagcatggtattgaaggaattagaaatgaatttggagtgctttttatgtatgttgtcttcttcaatactgaaaatttgtccttggttcttaaaagcattctgtactaatacagctcttccatagggcagttgttgcttcttaattcagttctgtatgtgttcaacatttttgaatacattaaaagaagtaaccaactgaacgacaaagcatggtatttgaattttaaattaaagcaaagtaaataaaagtacaaagcatattttagttagtactaaattcttagtaaaatgctgatcagtaaaccaatcccttgagttatataacaagatttttaaataaatgttattgtcctcaccttcaaaaatatttatattgtcactcatttacgtaaaaagatatttctaatttactgttgcccattgcacttacataccaccaccaagaaagccttcaagatgtcaaataaagcaaagtgatatatatttgtttatgaaatgttacatgtagaaaaatactgattttaaatattttccatattaacaatttaacagagaatctctagtgaattttttaaatgaaagaagttgtaaggatataaaaagtacagtgttagatgtgcacaaggaaagttattttcagacatatttgaatgactgctgtactgcaatatttggattgtcattcttacaaaacatttttttgttctcttgtaaaaagagtagttattagttctgctttagctttccaatatgctgtatagcctttgtcattttataattttaattcctgattaaaacagtctgtatttgtgtatatcatacattgttttcaataccacttttaattgttactcattttattcactaagctcgataaatctaacagttactcttaaaaaaaaaaaaaaagactaaggtggattttaaaaattggaaactgacataatgttaggttataatttctcatttggagccgggcgcagtggctcacgcctgtaatcccagcactttgggaggccaaggtgggtggatcacctgtggtcaagagttcaagaccagcctggccatcatggtgaaaccccatctctactaaaaatacaaaaattagccaggcgtggtggctggcgcctgtaatcccagctactcaggaggttgaggcagcagaattgcttgaacccaggaggcagagggttgcagtgagccgagatagcaccattgcactccagcctgggcgactccatctcaaaaaataaaaa

SEQ ID NO: 282778 - DNA, 1314 bp, Homo sapiens
gcactgggcggcgctggctggctccctggctgcggctcctcagtcggcggcggctgctgctgcctgtggcccgggcggctgggagaagcggagtgttggtgagtgacgcggcggaggtgtagtttgacgcggtgtgttacgtgggggagagaataaaactccagcgagatccgggccgtgaacgaaagcagtgacggaggagcttgtaccaccggtaactaaatgaccatggaatctggagccgagaaccagcagagtggagatgcagctgtaacagaagctgaaaaccaacaaatgacagttcaagcccagccacagattgccacattagcccaggtatctatgccagcagctcatgcaacatcatctgctcccaccgtaactctagtacagctgcccaatgggcagacagttcaagtccatggagtcattcaggcggcccagccatcagttattcagtctccacaagtccaaacagttcagatttcaactattgcagaaagtgaagattcacaggagtcagtggatagtgtaactgattcccaaaagcgaagggaaattctttcaaggaggccttcctacaggaaaattttgaatgacttatcttctgatgcaccaggagtgccaaggattgaagaagagaagtctgaagaggagacttcagcacctgccatcaccactgtaacggtgccaactccaatttaccaaactagcagtggacagtatattgccattacccagggaggagcaatacagctggctaacaatggtaccgatggggtacagggcctgcaaacattaaccatgaccaatgcagcagccactcagccgggtactaccattctacagtatgcacagaccactgatggacagcagatcttagtgcccagcaaccaagttgttgttcaagctgcctctggagacgtacaaacataccagattcgcacagcacccactagcactattgcccctggagttgttatggcatcctccccagcacttcctacacagcctgctgaagaagcagcacgaaagagagaggtccgtctaatgaagaacagatgaagtcttgctctgtcacccaggcaggagtgcaatggtgcaatctcagctcactgcagcctccacctcctgggttcaagcaattctcctgcctcaacctcccgagtagctgggattacaggtgcccaccaccacgcctggctaatttttgtattagtagagacatgatttcactattttggccaggctggtctcgaactcttgaccttgtgatccaccctcctcggacttccaaagtgctgggattacagg

SEQ ID NO: 282779 - DNA, 2424 bp, Homo sapiens
gcatgctctgctcaggcggcagcagtggctttttggaggtgtctcggccatgacacacatttgacatgccctccctcaacctacttatagactatttttcttgctctgcagcatggaccaaagagaaattctgcagaagttcctggatgaggcccaaagcaagaaaattactaaagaggagtttgccaatgaatttctgaagctgaaaaggcaatctaccaagtacaaggcagacaaaacctatcctacaactgtggctgagaagcccaagaatatcaagaaaaacagatataaggatattttgccctatgattatagccgggtagaactatccctgataacctctgatgaggattccagctacatcaatgccaacttcattaagggagtttatggacccaaggcttatattgccacccagggtcctttatctacaaccctcctggacttctggaggatgatttgggaatatagtgtccttatcattgttatggcatgcatggagtatgaaatgggaaagaaaaagtgtgagcgctactgggctgagccaggagagatgcagctggaatttggccctttctctgtatcctgtgaagctgaaaaaaggaaatctgattatataatcaggactctaaaagttaagttcaatagtgaaactcgaactatctaccagtttcattacaagaattggccagaccatgatgtaccttcatctatagaccctattcttgagctcatctgggatgtacgttgttaccaagaggatgacagtgttcccatatgcattcactgcagtgctggctgtggaaggactggtgttatttgtgctattgattatacatggatgttgctaaaagatgggataattcctgagaacttcagtgttttcagtttgatccgggaaatgcggacacagaggccttcattagttcaaacgcaggaacaatatgaactggtctacaatgctgtattagaactatttaagagacagatggatgttatcagagataaacattctggaacagagagtcaagcaaagcattgtattcctgagaaaaatcacactctccaagcagactcttattctcctaatttaccaaaaagtaccacaaaagcagcaaaaatgatgaaccaacaaaggacaaaaatggaaatcaaagaatcttcttcctttgactttaggacttctgaaataagtgcaaaagaagagctagttttgcaccctgctaaatcaagcacttcttttgactttctggagctaaattacagttttgacaaaaatgctgacacaaccatgaaatggcagacaaaggcatttccaatagttggggagcctcttcagaagcatcaaagtttggatttgggctctcttttgtttgagggatgttctaattctaaacctgtaaatgcagcaggaagatattttaattcaaaggtgccaataacacggaccaaatcaactccttttgaattgatacagcagagagaaaccaaggaggtggacagcaaggaaaacttttcttatttggaatctcaaccacatgattcttgttttgtagagatgcaggctcaaaaagtaatgcatgtttcttcagcagaactgaattattcactgccatatgactctaaacaccaaatacgtaatgcctctaatgtaaagcaccatgactctagtgctcttggtgtatattcttacatacctttagtggaaaatccttatttttcatcatggcctccaagtggtaccagttctaagatgtctcttgatttacctgagaagcaagatggaactgtttttccttcttctctgttgccaacatcctctacatccctcttctcttattacaattcacatgattctttatcactgaattctccaaccaatatttcctcactattgaaccaggagtcagctgtactagcaactgctccaaggatagatgatgaaatcccccctccacttcctgtacggacacctgaatcatttattgtggttgaggaagctggagaattctcaccaaatgttcccaaatccttatcctcagctgtgaaggtaaaaattggaacatcactggaatggggtggaacatctgaaccaaagaaatttgatgactctgtgatacttagaccaagcaagagtgtaaaactccgaagtcctaaatcaggtaaaaatttctcttggctttagatgacatttagccctaagattggaagaatggttcgttaagtttagagtaattcacttcaggaagttacttggttcccataatagcttccagtattcattgatttatttctggctttcccagactagaaattttgtaaagagtcatgggggaagctagggctaaccagaaaataaaataaaaataatgggataaaaaatcggaactactgttttccccctagtcggagcacatccgg

SEQ ID NO: 282780 - DNA, 1473 bp, Homo sapiens
ggattattaattactcttaacaattatatgtgatctgatcaacagtcatctgagtctgtctttagtctttcccttatatttttttcttttgattctaggtatctgtaattcttgcccaccaaacaagcctgcagaatctgttcagtcaaataactccagctcatttctgaattttggttttgcaaaccgtttttcaaaacccaaaggaccaaggaatccaccaccaacttggaatatttaataaaactccagatttataataatatgggctgcaagtacacctgcaaataaaactactagaatactgctagttaaaataagtgctctatatgcataatatcaaatatgaagatatgctaatgtgttaatagcttttaaaagaaaagcaaaatgccaataagtgccagttttgcattttcatatcatttgcattgagttgaaaactgcaaataaaagtttgtcacttgagcttatgtacagaatgctatatgagaaacacttttagaatggatttatttttcatttttgccagttatttttattttcttttacttttttacataaacataaacttcaaaaggtttgtaagatttggatctcaactaatttctacattgccagaatatactataaaaagttaaaaaaaaaacttactttgtgggttgcaatacaaactgctcttgacaatgactattccctgacagttatttttgcctaaatggagtataccttgtaaatcttcccaaatgttgtggaaaactggaatattaagaaaatgagaaattatatttattagaataaaatgtgcaaataatgacaattatttgaatgtaacaaggaattcaactgaaatcctgataagttttaaccaaagtcattaaattaccaattctagaaaagtaatcaatgaaatataatagctatcttttggtagcaaaagatataaattgtatatgtttatacaggatctttcagatcatgtgcaatttttatctaaccaatcagaaatactagtttaaaatgaatttctatatgaatatggatctgccataagaaaatctagttcaactctaattttatgtagtaaataaattggcaggtaattgtttttacaaagaatccacctgacttcccctaatgcattaaaaatatttttatttaaataactttatttataacttttagaaacatgtagtattgtttaaacatcatttgttcttcagtatttttcatttggaagtccaatagggcaaattgaatgaagtattattatctgtctcttgtagtacaatgtatccaacagacactcaataaactttttggttgttaaactgacttcattgcagtagtgtttaggtaatacttctccagaaactagtgaaatcaaaccacagtaattttatctgctgagtatatatcattgtaatcaattacttccaaatgtctttatcaataaacaaatatactaaaaga

SEQ ID NO: 282781 - DNA, 2767 bp, Homo sapiens
gcatgctctgctcaggcggcagcagtggctttttggaggtgtctcggccatgacacacatttgacatgccctccctcaacctacttatagactatttttcttgctctgcagcatggaccaaagagaaattctgcagaagttcctggatgaggcccaaagcaagaaaattactaaagaggagtttgccaatgaatttctgaagctgaaaaggcaatctaccaagtacaaggcagacaaaacctatcctacaactgtggctgagaagcccaagaatatcaagaaaaacagatataaggatattttgccctatgattatagccgggtagaactatccctgataacctctgatgaggattccagctacatcaatgccaacttcattaagggagtttatggacccaaggcttatattgccacccagggtcctttatctacaaccctcctggacttctggaggatgatttgggaatatagtgtccttatcattgttatggcatgcatggagtatgaaatgggaaagaaaaagtgtgagcgctactgggctgagccaggagagatgcagctggaatttggccctttctctgtatcctgtgaagctgaaaaaaggaaatctgattatataatcaggactctaaaagttaagttcaatagtgaaactcgaactatctaccagtttcattacaagaattggccagaccatgatgtaccttcatctatagaccctattcttgagctcatctgggatgtacgttgttaccaagaggatgacagtgttcccatatgcattcactgcagtgctggctgtggaaggactggtgttatttgtgctattgattatacatggatgttgctaaaagatgggataattcctgagaacttcagtgttttcagtttgatccgggaaatgcggacacagaggccttcattagttcaaacgcaggaacaatatgaactggtctacaatgctgtattagaactatttaagagacagatggatgttatcagagataaacattctggaacagagagtcaagcaaagcattgtattcctgagaaaaatcacactctccaagcagactcttattctcctaatttaccaaaaagtaccacaaaagcagcaaaaatgatgaaccaacaaaggacaaaaatggaaatcaaagaatcttcttcctttgactttaggacttctgaaataagtgcaaaagaagagctagttttgcaccctgctaaatcaagcacttcttttgactttctggagctaaattacagttttgacaaaaatgctgacacaaccatgaaatggcagacaaaggcatttccaatagttggggagcctcttcagaagcatcaaagtttggatttgggctctcttttgtttgagggatgttctaattctaaacctgtaaatgcagcaggaagatattttaattcaaaggtgccaataacacggaccaaatcaactccttttgaattgatacagcagagagaaaccaaggaggtggacagcaaggaaaacttttcttatttggaatctcaaccacatgattcttgttttgtagagatgcaggctcaaaaagtaatgcatgtttcttcagcagaactgaattattcactgccatatgactctaaacaccaaatacgtaatgcctctaatgtaaagcaccatgactctagtgctcttggtgtatattcttacatacctttagtggaaaatccttatttttcatcatggcctccaagtggtaccagttctaagatgtctcttgatttacctgagaagcaagatggaactgtttttccttcttctctgttgccaacatcctctacatccctcttctcttattacaattcacatgattctttatcactgaattctccaaccaatatttcctcactattgaaccaggagtcagctgtactagcaactgctccaaggatagatgatgaaatcccccctccacttcctgtacggacacctgaatcatttattgtggttgaggaagctggagaattctcaccaaatgttcccaaatccttatcctcagctgtgaaggtaaaaattggaacatcactggaatggggtggaacatctgaaccaaagaaatttgatgactctgtgatacttagaccaagcaagagtgtaaaactccgaagtcctaaatcagaactacatcaagatcgttcttctcccccacctcctctcccagaaagaactctagagtccttctttcttgccgatgaagattgtatgcaggcccaatctatagaaacatattctactagctatcctgacaccatggaaaattcaacatcttcaaaacagacactgaagactcctggaaaaagtttcacaaggagtaagagtttgaaaattttgcgaaacatgaaaaagagtatctgtaattcttgcccaccaaacaagcctgcagaatctgttcagtcaaataactccagctcatttctgaattttggttttgcaaaccgtttttcaaaacccaaaggaccaaggaatccaccaccaacttggaatatttaataaaactccagatttataataatatgggctgcaagtacacctgcaaataaaactactagaatactgctagttaaaataagtgctctatatgcataatatcaaatatgaagatatgctaatgtgttaatagcttttaaaagaaaagcaaaatgccaataagtgccagttttgcattttcatatcatttgcattgagttgaaaactgcaaataaaagtttgtcacttgagctt

SEQ ID NO: 282782 - DNA, 1603 bp, Homo sapiens
tagagacaaggtttcaccgtgttggccaggatggtcttgatctcctgaccttatgatccacccacctcggcctcccaaagtgctgggattacagctgtgagccactgtgcccggcccaagaaaccctttttaaggaagtgacaactgaacccaaaacatgaaggagcagccagccagccaaagggtccagagaagagtatttcagatagagggaacaaaatctctgaggtatctgtaattcttgcccaccaaacaagcctgcagaatctgttcagtcaaataactccagctcatttctgaattttggttttgcaaaccgtttttcaaaacccaaaggaccaaggaatccaccaccaacttggaatatttaataaaactccagatttataataatatgggctgcaagtacacctgcaaataaaactactagaatactgctagttaaaataagtgctctatatgcataatatcaaatatgaagatatgctaatgtgttaatagcttttaaaagaaaagcaaaatgccaataagtgccagttttgcattttcatatcatttgcattgagttgaaaactgcaaataaaagtttgtcacttgagcttatgtacagaatgctatatgagaaacacttttagaatggatttatttttcatttttgccagttatttttattttcttttacttttttacataaacataaacttcaaaaggtttgtaagatttggatctcaactaatttctacattgccagaatatactataaaaagttaaaaaaaaaacttactttgtgggttgcaatacaaactgctcttgacaatgactattccctgacagttatttttgcctaaatggagtataccttgtaaatcttcccaaatgttgtggaaaactggaatattaagaaaatgagaaattatatttattagaataaaatgtgcaaataatgacaattatttgaatgtaacaaggaattcaactgaaatcctgataagttttaaccaaagtcattaaattaccaattctagaaaagtaatcaatgaaatataatagctatcttttggtagcaaaagatataaattgtatatgtttatacaggatctttcagatcatgtgcaatttttatctaaccaatcagaaatactagtttaaaatgaatttctatatgaatatggatctgccataagaaaatctagttcaactctaattttatgtagtaaataaattggcaggtaattgtttttacaaagaatccacctgacttcccctaatgcattaaaaatatttttatttaaataactttatttataacttttagaaacatgtagtattgtttaaacatcatttgttcttcagtatttttcatttggaagtccaatagggcaaattgaatgaagtattattatctgtctcttgtagtacaatgtatccaacagacactcaataaactttttggttgttaaactgacttcattgcagtagtgtttaggtaatacttctccagaaactagtgaaatcaaaccacagtaattttatctgctgagtatatatcattgtaatcaattacttccaaatgtctttatcaataaacaaatatactaaaaga

SEQ ID NO: 282783 - DNA, 2185 bp, Homo sapiens
gcatgctctgctcaggcggcagcagtggctttttggaggtgtctcggccatgacacacatttgacatgccctccctcaacctacttatagactatttttcttgctctgcagcatggaccaaagagaaattctgcagaagttcctggatgaggcccaaagcaagaaaattactaaagaggagtttgccaatgaatttctgaagctgaaaaggcaatctaccaagtacaaggcagacaaaacctatcctacaactgtggctgagaagcccaagaatatcaagaaaaacagatataaggatattttgccctatgattatagccgggtagaactatccctgataacctctgatgaggattccagctacatcaatgccaacttcattaagggagtttatggacccaaggcttatattgccacccagggtcctttatctacaaccctcctggacttctggaggatgatttgggaatatagtgtccttatcattgttatggcatgcatggagtatgaaatgggaaagaaaaagtgtgagcgctactgggctgagccaggagagatgcagctggaatttggccctttctctgtatcctgtgaagctgaaaaaaggaaatctgattatataatcaggactctaaaagttaagttcaatagtgaaactcgaactatctaccagtttcattacaagaattggccagaccatgatgtaccttcatctatagaccctattcttgagctcatctgggatgtacgttgttaccaagaggatgacagtgttcccatatgcattcactgcagtgctggctgtggaaggactggtgttatttgtgctattgattatacatggatgttgctaaaagatgggataattcctgagaacttcagtgttttcagtttgatccgggaaatgcggacacagaggccttcattagttcaaacgcaggaacaatatgaactggtctacaatgctgtattagaactatttaagagacagatggatgttatcagagataaacattctggaacagagagtcaagcaaagcattgtattcctgagaaaaatcacactctccaagcagactcttattctcctaatttaccaaaaagtaccacaaaagcagcaaaaatgatgaaccaacaaaggacaaaaatggaaatcaaagaatcttcttcctttgactttaggacttctgaaataagtgcaaaagaagagctagttttgcaccctgctaaatcaagcacttcttttgactttctggagctaaattacagttttgacaaaaatgctgacacaaccatgaaatggcagacaaaggcatttccaatagttggggagcctcttcagaagcatcaaagtttggatttgggctctcttttgtttgagggatgttctaattctaaacctgtaaatgcagcaggaagatattttaattcaaaggtgccaataacacggaccaaatcaactccttttgaattgatacagcagagagaaaccaaggaggtggacagcaaggaaaacttttcttatttggaatctcaaccacatgattcttgttttgtagagatgcaggctcaaaaagtaatgcatgtttcttcagcagaactgaattattcactgccatatgactctaaacaccaaatacgtaatgcctctaatgtaaagcaccatgactctagtgctcttggtgtatattcttacatacctttagtggaaaatccttatttttcatcatggcctccaagtggtaccagttctaagatgtctcttgatttacctgagaagcaagatggaactgtttttccttcttctctgttgccaacatcctctacatccctcttctcttattacaattcacatgattctttatcactgaattctccaaccaatatttcctcactattgaaccaggagtcagctgtactagcaactgctccaaggatagatgatgaaatcccccctccacttcctgtacggacacctgaatcatttattgtggttgaggaagctggtgagtacagttcagtaagtataaaataaagtgtgggatgggcatggtggctcatgcctttaattccagcactttgggaagctgatgtgtgagccttgagtttgaggagttcattgaggccaggagttcaagactagcctgcgcaacatagtgagacctcatctctaattttttttttt

SEQ ID NO: 282784 - DNA, 642 bp, Homo sapiens
tacaagactatgaaaaagtagcaataatttattaacaaaatattgaaaggaatattttcccctttaatttgatagataattcctgagaacttcagtgttttcagtttgatccgggaaatgcggacacagaggccttcattagttcaaacgcaggtatgaactatagtgaatggatcagaacatgtgtctgagtcttgctccatctgtttaatggtgaggcatccaaaaacagctgactgctcagatataacaccaatttaccattacgtgctctagagtccattgccattttctctaactctgaatatcccaatatttttcctgtatcccttgtcctgggtcaaattcctttcattccttattttactgtctgttcagaaaatattaagataccaatgtaatattacttacttccttacaaaggatgttgtaaaagtattcaacaaactgacttgtggacttgaaatagctaggtcatgttaatttgaaattttgtagtgataaaattcatctctgaaagcatagaaaatcagggatttgtaatttctacccaggatgtggtaacagaatatggagaattcagtctatgtgctcgttttaggaaacactgaaaaataaaaataaaaaccatattcctattac

SEQ ID NO: 282785 - DNA, 3768 bp, Homo sapiens
gcatgctctgctcaggcggcagcagtggctttttggaggtgtctcggccatgacacacatttgacatgccctccctcaacctacttatagactatttttcttgctctgcagcatggaccaaagagaaattctgcagaagttcctggatgaggcccaaagcaagaaaattactaaagaggagtttgccaatgaatttctgaagctgaaaaggcaatctaccaagtacaaggcagacaaaacctatcctacaactgtggctgagaagcccaagaatatcaagaaaaacagatataaggatattttgccctatgattatagccgggtagaactatccctgataacctctgatgaggattccagctacatcaatgccaacttcattaagggagtttatggacccaaggcttatattgccacccagggtcctttatctacaaccctcctggacttctggaggatgatttgggaatatagtgtccttatcattgttatggcatgcatggagtatgaaatgggaaagaaaaagtgtgagcgctactgggctgagccaggagagatgcagctggaatttggccctttctctgtatcctgtgaagctgaaaaaaggaaatctgattatataatcaggactctaaaagttaagttcaatagtgaaactcgaactatctaccagtttcattacaagaattggccagaccatgatgtaccttcatctatagaccctattcttgagctcatctgggatgtacgttgttaccaagaggatgacagtgttcccatatgcattcactgcagtgctggctgtggaaggactggtgttatttgtgctattgattatacatggatgttgctaaaagatgggataattcctgagaacttcagtgttttcagtttgatccgggaaatgcggacacagaggccttcattagttcaaacgcaggaacaatatgaactggtctacaatgctgtattagaactatttaagagacagatggatgttatcagagataaacattctggaacagagagtcaagcaaagcattgtattcctgagaaaaatcacactctccaagcagactcttattctcctaatttaccaaaaagtaccacaaaagcagcaaaaatgatgaaccaacaaaggacaaaaatggaaatcaaagaatcttcttcctttgactttaggacttctgaaataagtgcaaaagaagagctagttttgcaccctgctaaatcaagcacttcttttgactttctggagctaaattacagttttgacaaaaatgctgacacaaccatgaaatggcagacaaaggcatttccaatagttggggagcctcttcagaagcatcaaagtttggatttgggctctcttttgtttgagggatgttctaattctaaacctgtaaatgcagcaggaagatattttaattcaaaggtgccaataacacggaccaaatcaactccttttgaattgatacagcagagagaaaccaaggaggtggacagcaaggaaaacttttcttatttggaatctcaaccacatgattcttgttttgtagagatgcaggctcaaaaagtaatgcatgtttcttcagcagaactgaattattcactgccatatgactctaaacaccaaatacgtaatgcctctaatgtaaagcaccatgactctagtgctcttggtgtatattcttacatacctttagtggaaaatccttatttttcatcatggcctccaagtggtaccagttctaagatgtctcttgatttacctgagaagcaagatggaactgtttttccttcttctctgttgccaacatcctctacatccctcttctcttattacaattcacatgattctttatcactgaattctccaaccaatatttcctcactattgaaccaggagtcagctgtactagcaactgctccaaggatagatgatgaaatcccccctccacttcctgtacggacacctgaatcatttattgtggttgaggaagctggagaattctcaccaaatgttcccaaatccttatcctcagctgtgaaggtaaaaattggaacatcactggaatggggtggaacatctgaaccaaagaaatttgatgactctgtgatacttagaccaagcaagagtgtaaaactccgaagtcctaaatcagaactacatcaagatcgttcttctcccccacctcctctcccagaaagaactctagagtccttctttcttgccgatgaagattgtatgcaggcccaatctatagaaacatattctactagctatcctgacaccatggaaaattcaacatcttcaaaacagacactgaagactcctggaaaaagtttcacaaggagtaagagtttgaaaattttgcgaaacatgaaaaagagtatctgtaattcttgcccaccaaacaagcctgcagaatctgttcagtcaaataactccagctcatttctgaattttggttttgcaaaccgtttttcaaaacccaaaggaccaaggaatccaccaccaacttggaatatttaataaaactccagatttataataatatgggctgcaagtacacctgcaaataaaactactagaatactgctagttaaaataagtgctctatatgcataatatcaaatatgaagatatgctaatgtgttaatagcttttaaaagaaaagcaaaatgccaataagtgccagttttgcattttcatatcatttgcattgagttgaaaactgcaaataaaagtttgtcacttgagcttatgtacagaatgctatatgagaaacacttttagaatggatttatttttcatttttgccagttatttttattttcttttacttttttacataaacataaacttcaaaaggtttgtaagatttggatctcaactaatttctacattgccagaatatactataaaaagttaaaaaaaaaacttactttgtgggttgcaatacaaactgctcttgacaatgactattccctgacagttatttttgcctaaatggagtataccttgtaaatcttcccaaatgttgtggaaaactggaatattaagaaaatgagaaattatatttattagaataaaatgtgcaaataatgacaattatttgaatgtaacaaggaattcaactgaaatcctgataagttttaaccaaagtcattaaattaccaattctagaaaagtaatcaatgaaatataatagctatcttttggtagcaaaagatataaattgtatatgtttatacaggatctttcagatcatgtgcaatttttatctaaccaatcagaaatactagtttaaaatgaatttctatatgaatatggatctgccataagaaaatctagttcaactctaattttatgtagtaaataaattggcaggtaattgtttttacaaagaatccacctgacttcccctaatgcattaaaaatatttttatttaaataactttatttataacttttagaaacatgtagtattgtttaaacatcatttgttcttcagtatttttcatttggaagtccaatagggcaaattgaatgaagtattattatctgtctcttgtagtacaatgtatccaacagacactcaataaactttttggttgttaaactgacttcattgcagtagtgtttaggtaatacttctccagaaactagtgaaatcaaaccacagtaattttatctgctgagtatatatcattgtaatcaattacttccaaatgtctttatcaataaacaaatatactaaaaga

SEQ ID NO: 282786 - DNA, 1955 bp, Homo sapiens
gcatgctctgctcaggcggcagcagtggctttttggaggtgtctcggccatgacacacatttgacatgccctccctcaacctacttatagactatttttcttgctctgcagcatggaccaaagagaaattctgcagaagttcctggatgaggcccaaagcaagaaaattactaaagaggagtttgccaatgaatttctgaagctgaaaaggcaatctaccaagtacaaggcagacaaaacctatcctacaactgtggctgagaagcccaagaatatcaagaaaaacagatataaggatattttgccctatgattatagccgggtagaactatccctgataacctctgatgaggattccagctacatcaatgccaacttcattaagggagtttatggacccaaggcttatattgccacccagggtcctttatctacaaccctcctggacttctggaggatgatttgggaatatagtgtccttatcattgttatggcatgcatggagtatgaaatgggaaaggaagctgaaaaaaggaaatctgattatataatcaggactctaaaagttaagttcaatagtgtatctgtaattcttgcccaccaaacaagcctgcagaatctgttcagtcaaataactccagctcatttctgaattttggttttgcaaaccgtttttcaaaacccaaaggaccaaggaatccaccaccaacttggaatatttaataaaactccagatttataataatatgggctgcaagtacacctgcaaataaaactactagaatactgctagttaaaataagtgctctatatgcataatatcaaatatgaagatatgctaatgtgttaatagcttttaaaagaaaagcaaaatgccaataagtgccagttttgcattttcatatcatttgcattgagttgaaaactgcaaataaaagtttgtcacttgagcttatgtacagaatgctatatgagaaacacttttagaatggatttatttttcatttttgccagttatttttattttcttttacttttttacataaacataaacttcaaaaggtttgtaagatttggatctcaactaatttctacattgccagaatatactataaaaagttaaaaaaaaaacttactttgtgggttgcaatacaaactgctcttgacaatgactattccctgacagttatttttgcctaaatggagtataccttgtaaatcttcccaaatgttgtggaaaactggaatattaagaaaatgagaaattatatttattagaataaaatgtgcaaataatgacaattatttgaatgtaacaaggaattcaactgaaatcctgataagttttaaccaaagtcattaaattaccaattctagaaaagtaatcaatgaaatataatagctatcttttggtagcaaaagatataaattgtatatgtttatacaggatctttcagatcatgtgcaatttttatctaaccaatcagaaatactagtttaaaatgaatttctatatgaatatggatctgccataagaaaatctagttcaactctaattttatgtagtaaataaattggcaggtaattgtttttacaaagaatccacctgacttcccctaatgcattaaaaatatttttatttaaataactttatttataacttttagaaacatgtagtattgtttaaacatcatttgttcttcagtatttttcatttggaagtccaatagggcaaattgaatgaagtattattatctgtctcttgtagtacaatgtatccaacagacactcaataaactttttggttgttaaactgacttcattgcagtagtgtttaggtaatacttctccagaaactagtgaaatcaaaccacagtaattttatctgctgagtatatatcattgtaatcaattacttccaaatgtctttatcaataaacaaatatactaaaaga

SEQ ID NO: 282787 - DNA, 498 bp, Homo sapiens
gctcgcgtggtcactttccactcattggacgtggtagcagcaacgagagctccaaaccctccgacaccagacaccagagcccagatctgcgccctggacatgtcgcgccgccttctccagtgacactgtccggtcagaacgctttggtggtctaggcatgcagccgatagagaacactttgacaagcgtcacagccagcggatgtggcctttgaacccctcagaagacctcagctcaaaggttactacgtcaccgaatctctccctgaccaccacgctgtgaagtagcctgggaagaaaggccatctcagctcttccagccgtcctacctgaagcctgaacatgtgagtgaaaccactgtggactcccagcttttgctgagccctcaggtttctgcagctgtaggagtgaattcacgtgaggcgagtggcagagctacccgatcaaccttcacaattgtgctaaataataaataagtaaacgatgactgtttttaatc

SEQ ID NO: 282788 - DNA, 3093 bp, Homo sapiens
atttggagtcaggcctggctgttgctcaggtgaccagcttgtgtctctgggagggcgctgctttccccggccacccggcgcgatgatccagaatgtcggaaatcacctgcgacggggcttggcctctgtgttctccaaccgcacatcccggaagtcagccttacgtgcggggaacgacagtgccatggcagacggcgagggataccggaaccccacggaggtgcagatgagccagctggtgctgccctgccacaccaaccaacgtggtgagctgagcgtcgggcagctgctcaagtggattgacaccacggcttgcctgtccgcggagaggcacgctggctgcccctgtgtcacagcttccatggatgacatctattttgagcacaccattagtgttggacaagtggtgaatatcaaggccaaggtgaaccgggccttcaactccagcatggaggtgggcatccaggtggcctcggaggacctgtgctctgagaagcagtggaatgtgtgcaaggccttggccaccttcgtggcccgccgagagatcaccaaggtgaagctgaagcagatcacgccgcggacagaagaggagaagatggagcacagtgtggcggctgagcgccggcgcatgcgccttgtctatgcagacaccatcaaggacctcctggccaactgcgccattcagggcgatctggagagcagagactgtagccgcatggtgccggctgagaagacccgtgtggagagtgtggagctggtcctgcctccccacgccaatcaccagggcaacacctttgggggccagatcatggcctggatggagaatgtggccaccattgcagccagccggctctgccgtgcccaccctacgctgaaggccattgaaatgttccacttccgaggcccgtcccaggtcggcgaccgtctggtgctcaaagccatcgtgaacaatgccttcaaacatagcatggaggtgggcgtgtgcgtggaggcctatcgccaggaggctgagacccaccggcgccacatcaacagtgcctttatgacctttgtggtcctggacgcagatgaccagccccagttgctgccctggattcggccccagcccggcgatggtgagcggcggtaccgagaggccagtgccagaaagaagatccgcctggacaggaagtacatcgtgtcctgtaagcagacagaggtgcccctctccgtcccctgggaccctagcaaccaggtgtacctgagctacaataacgtctcctccttgaagatgcttgtggccaaggacaactgggtgctgtcctcggagatcagtcaggtccgcctgtacactctggaggatgacaagttcctctccttccacatggagatggtggtgcatgtggatgcagcccaggccttcctgctgctctcggacctgcgtcagaggccagagtgggacaagcactaccggagcgtggagctagtgcagcaggtagacgaggacgacgccatctaccacgtcaccagccctgccctcggaggtcacacaaagccccaggacttcgtgatcctggcctcgaggcggaagccttgtgacaatggggacccctatgtcatcgcgctgaggtcggtcacgctgcccacacaccgagagacgccagagtacagacgcggagagaccctctgctcaggcttctgcctctggcgcgagggggaccagctgaccaaggtatcctactacaaccaggccaccccaggtgttctcaactatgtgaccaccaacgtggccggcctctcctctgagttctacaccaccttcaaggcttgtgagcagtttctcttggacaaccggaatgatctggcccccagcctccagaccctctagatgccctcagtggccacatcatgcccactcccactccatcctgtccccaaggactcacatacagtgcctggagaaagccaaagacctttatttcttcctgcctccccgtgggaagcctccgccctgaggtccgctggcccaccacccctgggtgctcagtttctaccaacatgagccagcaagtccttgtggtagccctggggtagcctgtagtagactcgggtcctgtccacagccctagctgccagcaatgctgtcctcacagaggcatagtcgcccccagctgggttgtgctccactgtgacggtggcccggggggaggatgccagcagcctgcctatggctccagctgtgctgtggcccagcagcatggcctgcatctggaaggacacaggttgccagagcccctggcacaactctagcatatctgtgagcagctgttccctgtagccactgcccagcacctcctcaggccagcctggtgccacagtcacgtgggggaagacctcagccacagctgtaagcagctctctgccagccacatggccggggaccgaaaaactcccgtgggagattttggccccaacccacacaggccaatgcaagaggccaaggctggagaggcgtgccagcaaggccagggatggccggagggctgcgggctccactatttgcaaatggatgccccagtgtccgggatgtgtggccagctgctgcaggcaggactccagcgtcaggatgttgccacttggagtatgaacaatgggcacggggttttcagccacagttccctcgaggccagtgttcagcaggatcatgccttctgtgtctggaagaggcggcagaggcaacagtgtttaggatttgggttatcataaggtgttaagagtcccttgttaaaggggcagtgggagttatggggtcatcaaggaccttgcctctctggaatctgtcaacccagttttgggctccaggtggatgggttgctttataaatgtgcctggtgcatgagaaactcttgtttcagctcttggcctttacccatgactcagcctgggggctggtgccggccttgcctgcagcaatgtagctgaggactggtctgaaggccaggagccctgtgctcttgacatcactgtactccctctccctccccgcaaccctgccccaccttgcatccagggtatggtgtaaataaacctgtgttgccatggcaacagagaccg

SEQ ID NO: 282789 - DNA, 1437 bp, Homo sapiens
ggaggacgttagatgtggcggtaaagagggtgggcttgaggcaggccattggggtgctgatcctggcctcggcccttacccctgtggccttggcaagccctcacccttccttgtctcaggttcctcctctgtagaatggatacagcaccagccccagcctcagagggttgttgtaaggatttggtgcaattccacatggaaagcccttgagaagagtggctggtgtgtagtgagtgctcagtaaatgtggactctcattaccattgtgagtggcctgtaaggatccccattttacagaggaggaaactgaggtctggccaggggaggtggtgttcccaggtcactcagagagtttgaggggagctggggctacagcttagtttcccactttgctggccaggatgttttgattccagctgccccagcgacacctgaactccacgttagggctgcaggaactccttgggccctgggggatggagagggggcaggacggagggtgggggtagctggttgcctatcccgacttcctccccaggatggtgagcggcggtaccgagaggccagtgccagaaagaagatccgcctggacaggaagtacatcgtgtcctgtaagcagacagaggtgcccctctccgtcccctgggaccctagcaaccaggtgtacctgagctacaataacatcatgcccactcccactccatcctgtccccaaggactcacatacagtgcctggagaaagccaaagacctttatttcttcctgcctccccgtgggaagcctccgccctgaggtccgctggcccaccacccctgggtgctcagtttctaccaacatgagccagcaagccagggatggccggagggctgcgggctccactatttgcaaatggatgccccagtgtccgggatgtgtggccagctgctgcaggcaggactccagcgtcaggatgttgccacttggagtatgaacaatgggcacggggttttcagccacagttccctcgaggccagtgttcagcaggatcatgccttctgtgtctggaagaggcggcagaggcaacagtgtttaggatttgggttatcataaggtgttaagagtcccttgttaaaggggcagtgggagttatggggtcatcaaggaccttgcctctctggaatctgtcaacccagttttgggctccaggtggatgggttgctttataaatgtgcctggtgcatgagaaactcttgtttcagctcttggcctttacccatgactcagcctgggggctggtgccggccttgcctgcagcaatgtagctgaggactggtctgaaggccaggagccctgtgctcttgacatcactgtactccctctccctccccgcaaccctgccccaccttgcatccagggtatggtgtaaataaacctgtgttgccatggcaacagagaccg

SEQ ID NO: 282790 - DNA, 349 bp, Homo sapiens
  misc_feature (313)..(313): n is a, c, g, or t
actcaccaccagcctcgtgcccactgggctcccaccccttcccaggaccctcccctagcttggtccccctgagcttggcttcccaccctgcaggtatcctactacaaccaggccaccccaggtgttctcaactatgtgaccaccaacgtggccggcctctcctctgagttctacaccaccttcaaggcttgtgagcagtttctcttggacaaccggaatgatctggcccccagcctccagaccctctagatgccctcagtggccacatcatgcccactcccactccatcctgtccccaaggactcgaatgttnagggatccttagagtaacctgcagcatcagctgctg

SEQ ID NO: 282791 - DNA, 308 bp, Homo sapiens
ctgactctacaggatcttcattgtgaactgggcttccaactccagcataaggtgggcatccaggtggcctcggaggacctgtgctctgagaagcagtggaatgtgtgcaaggccttggccaccttcgtggcccgccgagagatcaccaaggtgaagctgaagcagatcacgccgcggacagaagaggagaagatggagcacagtgtggcggctgagcgccggcgcatgcgccttgtctatgcagacaccatcaaggacctcctggccaactgcgccattcagggcggtgagcagctgccagctgtgca

SEQ ID NO: 282792 - DNA, 3246 bp, Homo sapiens
atttggagtcaggcctggctgttgctcaggtgaccagcttgtgtctctgggagggcgctgctttccccggccacccggcgcgatgatccagaatgtcggaaatcacctgcgacggctctctttggaaggagaaattgcagaacccctgggctggtttattatcagcagcaatctccaaacaagccccaggggctgtcagatcccccacgggctggctgtgtagagtggaatcaccttcagcaagtgtcggcctctggaattctattcgggcttggcctctgtgttctccaaccgcacatcccggaagtcagccttacgtgcggggaacgacagtgccatggcagacggcgagggataccggaaccccacggaggtgcagatgagccagctggtgctgccctgccacaccaaccaacgtggtgagctgagcgtcgggcagctgctcaagtggattgacaccacggcttgcctgtccgcggagaggcacgctggctgcccctgtgtcacagcttccatggatgacatctattttgagcacaccattagtgttggacaagtggtgaatatcaaggccaaggtgaaccgggccttcaactccagcatggaggtgggcatccaggtggcctcggaggacctgtgctctgagaagcagtggaatgtgtgcaaggccttggccaccttcgtggcccgccgagagatcaccaaggtgaagctgaagcagatcacgccgcggacagaagaggagaagatggagcacagtgtggcggctgagcgccggcgcatgcgccttgtctatgcagacaccatcaaggacctcctggccaactgcgccattcagggcgatctggagagcagagactgtagccgcatggtgccggctgagaagacccgtgtggagagtgtggagctggtcctgcctccccacgccaatcaccagggcaacacctttgggggccagatcatggcctggatggagaatgtggccaccattgcagccagccggctctgccgtgcccaccctacgctgaaggccattgaaatgttccacttccgaggcccgtcccaggtcggcgaccgtctggtgctcaaagccatcgtgaacaatgccttcaaacatagcatggaggtgggcgtgtgcgtggaggcctatcgccaggaggctgagacccaccggcgccacatcaacagtgcctttatgacctttgtggtcctggacgcagatgaccagccccagttgctgccctggattcggccccagcccggcgatggtgagcggcggtaccgagaggccagtgccagaaagaagatccgcctggacaggaagtacatcgtgtcctgtaagcagacagaggtgcccctctccgtcccctgggaccctagcaaccaggtgtacctgagctacaataacgtctcctccttgaagatgcttgtggccaaggacaactgggtgctgtcctcggagatcagtcaggtccgcctgtacactctggaggatgacaagttcctctccttccacatggagatggtggtgcatgtggatgcagcccaggccttcctgctgctctcggacctgcgtcagaggccagagtgggacaagcactaccggagcgtggagctagtgcagcaggtagacgaggacgacgccatctaccacgtcaccagccctgccctcggaggtcacacaaagccccaggacttcgtgatcctggcctcgaggcggaagccttgtgacaatggggacccctatgtcatcgcgctgaggtcggtcacgctgcccacacaccgagagacgccagagtacagacgcggagagaccctctgctcaggcttctgcctctggcgcgagggggaccagctgaccaaggtatcctactacaaccaggccaccccaggtgttctcaactatgtgaccaccaacgtggccggcctctcctctgagttctacaccaccttcaaggcttgtgagcagtttctcttggacaaccggaatgatctggcccccagcctccagaccctctagatgccctcagtggccacatcatgcccactcccactccatcctgtccccaaggactcacatacagtgcctggagaaagccaaagacctttatttcttcctgcctccccgtgggaagcctccgccctgaggtccgctggcccaccacccctgggtgctcagtttctaccaacatgagccagcaagtccttgtggtagccctggggtagcctgtagtagactcgggtcctgtccacagccctagctgccagcaatgctgtcctcacagaggcatagtcgcccccagctgggttgtgctccactgtgacggtggcccggggggaggatgccagcagcctgcctatggctccagctgtgctgtggcccagcagcatggcctgcatctggaaggacacaggttgccagagcccctggcacaactctagcatatctgtgagcagctgttccctgtagccactgcccagcacctcctcaggccagcctggtgccacagtcacgtgggggaagacctcagccacagctgtaagcagctctctgccagccacatggccggggaccgaaaaactcccgtgggagattttggccccaacccacacaggccaatgcaagaggccaaggctggagaggcgtgccagcaaggccagggatggccggagggctgcgggctccactatttgcaaatggatgccccagtgtccgggatgtgtggccagctgctgcaggcaggactccagcgtcaggatgttgccacttggagtatgaacaatgggcacggggttttcagccacagttccctcgaggccagtgttcagcaggatcatgccttctgtgtctggaagaggcggcagaggcaacagtgtttaggatttgggttatcataaggtgttaagagtcccttgttaaaggggcagtgggagttatggggtcatcaaggaccttgcctctctggaatctgtcaacccagttttgggctccaggtggatgggttgctttataaatgtgcctggtgcatgagaaactcttgtttcagctcttggcctttacccatgactcagcctgggggctggtgccggccttgcctgcagcaatgtagctgaggactggtctgaaggccaggagccctgtgctcttgacatcactgtactccctctccctccccgcaaccctgccccaccttgcatccagggtatggtgtaaataaacctgtgttgccatggcaacagagaccg

SEQ ID NO: 282793 - DNA, 2639 bp, Homo sapiens
atttggagtcaggcctggctgttgctcaggtgaccagcttgtgtctctgggagggcgctgctttccccggccacccggcgcgatgatccagaatgtcggaaatcacctgcgacggggcttggcctctgtgttctccaaccgcacatcccggaagtcagccttacgtgcggggaacgacagtgccatggcagacggcgagggataccggaaccccacggaggtgcagatgagccagctggtgctgccctgccacaccaaccaacgtggtgagctgagcgtcgggcagctgctcaagtggattgacaccacggcttgcctgtccgcggagaggcacgctggctgcccctgtgtcacagcttccatggatgacatctattttgagcacaccattagtgttggacaagtggtgaatatcaaggccaaggtgaaccgggccttcaactccagcatggaggtgggcatccaggtggcctcggaggacctgtgctctgagaagcagtggaatgtgtgcaaggccttggccaccttcgtggcccgccgagagatcaccaaggtgaagctgaagcagatcacgccgcggacagaagaggagaagatggagcacagtgtggcggctgagcgccggcgcatgcgccttgtctatgcagacaccatcaaggacctcctggccaactgcgccattcagggcgatctggagagcagagactgtagccgcatggtgccggctgagaagacccgtgtggagagtgtggagctggtcctgcctccccacgccaatcaccagggcaacacctttgggggccagatcatggcctggatggagaatgtggccaccattgcagccagccggctctgccgtgcccaccctacgctgaaggccattgaaatgttccacttccgaggcccgtcccaggtcggcgaccgtctggtgctcaaagccatcgtgaacaatgccttcaaacatagcatggaggtgggcgtgtgcgtggaggcctatcgccaggaggctgagacccaccggcgccacatcaacagtgcctttatgacctttgtggtcctggacgcagatgaccagccccagttgctgccctggattcggccccagcccggcgatggtgagcggcggtaccgagaggccagtgccagaaagaagatccgcctggacaggaagtacatcgtgtcctgtaagcagacagaggtgcccctctccgtcccctgggaccctagcaaccaggtgtacctgagctacaataacgtctcctccttgaagatgcttgtggccaaggacaactgggtgctgtcctcggagatcagtcaggtccgcctgtacactctggaggatgacaagttcctctccttccacatggagatggtggtgcatgtggatgcagcccaggccttcctgctgctctcggacctgcgtcagaggccagagtgggacaagcactaccggagcgtggagctagtgcagcaggtagacgaggacgacgccatctaccacgtcaccagccctgccctcggaggtcacacaaagccccaggacttcgtgatcctggcctcgaggcggaagccttgtgacaatggggacccctatgtcatcgcgctgaggtcggtcacgctgcccacacaccgagagacgccagagtacagacgcggagagaccctctgctcaggcttctgcctctggcgcgagggggaccagctgaccaaggtatcctactacaaccaggccaccccaggtgttctcaactatgtgaccaccaacgtggccggcctctcctctgagttctacaccaccttcaaggcttgtgagcagtttctcttggacaaccggaatgatctggcccccagcctccagaccctctagatgccctcagtggccacatcatgcccactcccactccatcctgtccccaaggactcacatacagtgcctggagaaagccaaagacctttatttcttcctgcctccccgtgggaagcctccgccctgaggtccgctggcccaccacccctgggtgctcagtttctaccaacatgagccagcaagccagggatggccggagggctgcgggctccactatttgcaaatggatgccccagtgtccgggatgtgtggccagctgctgcaggcaggactccagcgtcaggatgttgccacttggagtatgaacaatgggcacggggttttcagccacagttccctcgaggccagtgttcagcaggatcatgccttctgtgtctggaagaggcggcagaggcaacagtgtttaggatttgggttatcataaggtgttaagagtcccttgttaaaggggcagtgggagttatggggtcatcaaggaccttgcctctctggaatctgtcaacccagttttgggctccaggtggatgggttgctttataaatgtgcctggtgcatgagaaactcttgtttcagctcttggcctttacccatgactcagcctgggggctggtgccggccttgcctgcagcaatgtagctgaggactggtctgaaggccaggagccctgtgctcttgacatcactgtactccctctccctccccgcaaccctgccccaccttgcatccagggtatggtgtaaataaacctgtgttgccatggcaacagagaccg

SEQ ID NO: 282794 - DNA, 6370 bp, Homo sapiens
  misc_feature (3625)..(3625): n is a, c, g, or t
  misc_feature (4427)..(4427): n is a, c, g, or t
  misc_feature (4459)..(4459): n is a, c, g, or t
  misc_feature (4483)..(4484): n is a, c, g, or t
  misc_feature (4498)..(4499): n is a, c, g, or t
  misc_feature (4509)..(4509): n is a, c, g, or t
  misc_feature (4513)..(4513): n is a, c, g, or t
  misc_feature (4553)..(4553): n is a, c, g, or t
  misc_feature (4562)..(4562): n is a, c, g, or t
  misc_feature (4581)..(4581): n is a, c, g, or t
  misc_feature (4594)..(4594): n is a, c, g, or t
  misc_feature (4605)..(4605): n is a, c, g, or t
  misc_feature (4615)..(4615): n is a, c, g, or t
  misc_feature (4635)..(4635): n is a, c, g, or t
  misc_feature (4639)..(4639): n is a, c, g, or t
  misc_feature (4843)..(4844): n is a, c, g, or t
  misc_feature (4912)..(4912): n is a, c, g, or t
  misc_feature (4943)..(4943): n is a, c, g, or t
  misc_feature (5221)..(5221): n is a, c, g, or t
  misc_feature (5234)..(5234): n is a, c, g, or t
  misc_feature (5321)..(5321): n is a, c, g, or t
  misc_feature (5560)..(5560): n is a, c, g, or t
  misc_feature (5883)..(5883): n is a, c, g, or t
  misc_feature (5887)..(5887): n is a, c, g, or t
atttggagtcaggcctggctgttgctcaggtgaccagcttgtgtctctgggagggcgctgctttccccggccacccggcgcgatgatccagaatgtcggaaatcacctgcgacggggcttggcctctgtgttctccaaccgcacatcccggaagtcagccttacgtgcggggaacgacagtgccatggcagacggcgagggataccggaaccccacggaggtgcagatgagccagctggtgctgccctgccacaccaaccaacgtggtgagctgagcgtcgggcagctgctcaagtggattgacaccacggcttgcctgtccgcggagaggcacgctggctgcccctgtgtcacagcttccatggatgacatctattttgagcacaccattagtgttggacaagtggtgaatatcaaggccaaggtgaaccgggccttcaactccagcatggaggtgggcatccaggtggcctcggaggacctgtgctctgagaagcagtggaatgtgtgcaaggccttggccaccttcgtggcccgccgagagatcaccaaggtgaagctgaagcagatcacgccgcggacagaagaggagaagatggagcacagtgtggcggctgagcgccggcgcatgcgccttgtctatgcagacaccatcaaggacctcctggccaactgcgccattcagggcgatctggagagcagagactgtagccgcatggtgccggctgagaagacccgtgtggagagtgtggagctggtcctgcctccccacgccaatcaccagggcaacacctttgggggccagatcatggcctggatggagaatgtggccaccattgcagccagccggctctgccgtgcccaccctacgctgaaggccattgaaatgttccacttccgaggcccgtcccaggtcggcgaccgtctggtgctcaaagccatcgtgaacaatgccttcaaacatagcatggaggtgggcgtgtgcgtggaggcctatcgccaggaggctgagacccaccggcgccacatcaacagtgcctttatgacctttgtggtcctggacgcagatgaccagccccagttgctgccctggattcggccccagcccggcgatggtgagcggcggtaccgagaggccagtgccagaaagaagatccgcctggacaggaagtacatcgtgtcctgtaagcagacagaggtgcccctctccgtcccctgggaccctagcaaccaggtgtacctgagctacaataacgtctcctccttgaagatgcttgtggccaaggacaactgggtgctgtcctcggagatcagtcaggtccgcctgtacactctggaggatgacaagttcctctccttccacatggagatggtggtgcatgtggatgcagcccaggccttcctgctgctctcggacctgcgtcagaggccagagtgggacaagcactaccggagcgtggagctagtgcagcaggtagacgaggacgacgccatctaccacgtcaccagccctgccctcggaggtcacacaaagccccaggacttcgtgatcctggcctcgaggcggaagccttgtgacaatggggacccctatgtcatcgcgctgaggtcggtcacgctgcccacacaccgagagacgccagagtacagacgcggagagaccctctgctcaggcttctgcctctggcgcgagggggaccagctgaccaagtgctgctgggttagggtctccctgactgagctggtctcggcaagtggcttctattcctgggggctcgaatccaggtcaaagggtcgcaggagcgacggttggaatggaaaactagctggaggacacctgagtactcttaaagcaatccccgtggccaaaatcaacagccgatttggataccttcaagacacctgaaaccttatcatgagccagatgccaaggaagagactctgggaggatccagaggaccccctggttgcagccacgtagagactgacgctgaggaggactccaactatcatgagcaacacccgtcgaacacagccaccccgctaagaacagatcaagaagctgtcacagatggcggaagaaaacctgaggaaagcgggacaaccagtcacaatgaataatttaatggtagctatgatagcagttatcaccactgccgtgagtattccttcaataagggctggtaataatgcctggatgcaatcattctatgacacagttacacatgctttctgatctcagtatttaccataataaatcggctcctataattgaggcataccaccctcaaaaacctatttgtaaacaggattggacccagttagaaaaaatgaacgtacttatttaggaagattgctttgcagaataggcagagatgctgcacaacgattcctatggaatcattactaattggtcccccaaggggatgtttagcttgaattgcacctctcagtctgcatgccacggtcacactatgttcagatgatctgaacaaaacagtcagatggtagaaatgttaagtacggcaaaagttcctattatctggaaccatggcggtatagtggcacctcaacctcaaataatatggcccgctctaggagctaaacataaggatttgtaaaaactattaaatgctcttaataagatcaaaatttgggaaagaataaaagagtatctagaaggacactctacaaacttgtttttggatatagcaaaattaaaagaacaaatatgtaaagcatcccgggcaacctgaccttaatgccaggaaccagagtgcttaaaggagctgcagaaaaattagcagctagtaacccatttaaatgggtaaaaacacttggaagctctgtgatttcaatgatgactatgctttttaatctgttgtttgcctttgtatagtctgcagatgcggatcccgactcctgcgagagtctctttgcaaatcgaagaagggagacatgttgggagcaagccccccagagtctggccataaactggccccaaaactggccataagcaaaacctctgcagcactaaaacatgtccataatggccctaacgcccaatctggaaggttgtgggtttatgggaatgagagcaaggaacacctggcctgcccagggcggaaaaccgcttaaaggcattcttaagccacaaacaaaagcatgagcgatctgtgtcttacgggtgtgttcctgctgcaattaattcagcccatccctttgtttcccataagggatacttttagttaatttaatatctatagaaacaatgctaatgactggtttgctgttaaatgaaggggtgggttgcccctccacacctgtgggtgtttctcgttaggtggaacgagagacttggaaaagagacacagagacaaagtatagagaaagaaaagtgggcccaggggaccagcattcagcatacagaggatccacactggcaccggcctctgagttcccttagtatttattgatcattatcgagcatggcaggataataggataatagtggagagaaggtcagaaggtaaacacatgaacaaaggtctctgcatcataaacaaggtaaagaattaagtgctgtgctttagatatgtatacacataaacatctcaatgccttnaagagcagtattgctgcccgcatgtcatacctacagccctaaggcggttttcccctatctcagtagatggaagtatattccatgtaaagtaaatcggctttacacccagacattccattgcccagagacgagcaggagacagaagccttcctcttatctcaactgcaaagaggtgttccttcctcttttactaatcctcctcagcacagaccctttatgggtgtcgggctgggggatggtcaggtctttcccttcccacgaggccatatttcagactatcacatggggagaaaccttggacaatacctggctttcctaggcagaggtccctgcggcctttgcagtattttgcgtctctgggtacttgagattagggagtggtttgagattagggagtggtgatgactcttaaggagcatgctgccttcaagcatttgtttaacaaagcacatcttgcacagcccttaatccatttaaccctgagttgacacagcacatgtttcagggagcacagggttgggggtaaggttacagattaacggcatctcaaggcagaagaatttttcttaatacagaacaaaatggagtctcctatgtctacttctttctacacagacacagtaacaatctgatctctcttttccccacagttaataaatatgtgggtaaatctctgttgggggctctcagctctgaaggctgtgagacccctgattttctacttcacacctctatatttttgtgtgtgtgtctttaattcctctagcgctgctgagttagtgaccgagctggtctcggcagnggtgggcgggtcttttgagttcaggagttcangagcagcctggccaacatggtgannccccttctctactnnaaatatgaanattntccgggcatggtggtgtgcctctgtactttcagctactcnggaagctgnggcacaagaattgctggancatgggaggtggnggctgcagtgngctgagatcntgccactgcactccagcccnggcnatagagtaagactctgtctcaaaacaaaaagagttttaggccaggtgtggtggctcacgcctgtaatcccagcactttgggaggctgaggtgggcagatcacctgaggtcaggagttcgagaccagtctggccaacatggcgaaaccccatctctctctactaaaaatacaaaatttagccaggtgtggtggtgggtgcctgtnntcacagctgcttgggaggctgaggcaggagaattggttgaacccaggaggcagaggttacagtgagcngagatcgtgccactgcattccagccggggtnagagagcgagactctgcctcaaaaaaagaaggcttagtgtgcaactcatcagagttgcacagggcagagaaagaatgggaaaaaaacaatttctagaaaacttttcgaattttctgatcaacaccaaatattccaaataggaaaaatacaaaaaaatccatacctatatgtggcataatatgattgtagagcaccaaagtaaaagatcttattttttattaaaattaaaaaaaaattaaaatagagggtctcactatgctgcccaggctggtcttganctcctggcttcangctatcctcccaccatggcatcctaaagtgctgggattgcaggcatgagctgctgcatctggcccaaagtaaaagatcttagaagcngccagaaaaaatagatttgggctgggcatgaatagattgatcaccaaaaaggtggcagactaacttctcgacagaatccacagaagccagaaggcagtggaacattagctttgatgtactaaaataaaataccacgctaggctcctacatacagtgaaaatgttttgagaatgagaattataattttttggcaaacaaaactaaaggagtttacaactaagaaactcttttgtgagacngccttgctctgttgcccaggctggagtgcagtgacgaaatctcagctcactgcaacctcggcctcccgggttcaggcaattcttgtgtctcagccttccaagtagctgggattacagatgtgcgccaccaggcccagctactttttatatttttagtggagatggggtttcactgtgttggccaggctggtctcaaactcctgacttcaagtgatctgcccgccttggcctgctaaagtgctgggattacaggcatgagcgactgtgcctctccagtccctgtgtttttttttgtttttggaggttttatttgtttgtttttngagncactttcactgtgttgcccaggcctgtctgttggcctcaagtgatcctcctgccttggatctcccagggtgctgggattacaggtgtgaaccactgtgctcagcccattttttatttgtttcttgaaggaaggtagcagtattaattaattttggactttgctcactaaagtttgaatgttaagaatagatgtatacagtctggatgcagtggtgcatgcttgtaattttagcactttggggggctgaagcgggaggatcgcttgggctcaagagtttgagaccagcctgggcaacatggtgaaaccttgtctctacaaaaaaattttaaaaaattagccagacatgatggcatgcacctataatcccagctacttgggaggctgaggtgggaggattgcttgagtccagggaggtcgaggctgcagtgagccatgatcacaccactgcactccagcctgggtgacagagtgatactgtctca

SEQ ID NO: 282795 - DNA, 852 bp, Homo sapiens
ggggacctcggaggcctgtttctgagcccctccccgcggactcgctccccggacgcccccagcgggctcctctggcctcggccctgcacgccgccggggcggagcctcccatcctttggggcttggcctctgtgttctccaaccgcacatcccggaagtcagccttacgtgcggggaacgacagtgccatggcagacggcgagggataccggaaccccacggaggtgcagatgagccagctggtgctgccctgccacaccaaccaacgtggtgagctgagcgtcgggcagctgctcaagtggattgacaccacggcttgcctgtccgcggagaggcacgctggctgcccctgtgtcacagcttccatggatgacatctattttgagcacaccattagatgtaggacaagtggtgaatatcaaggccaacggagaacaagaggcctaacaaaatccagacatgggaaagtgggcaataccaaggtgaggcaacaagaaggaccatggagcatctgagaaagcaagaggaaactgtgatgcaaggcctaagagccaccattacgagaccccagccagaagagaatcacacaagggtagacagcatgaaaggaaaaatcaacgcaagaagaacagagaaaacacagaagacagactgagaagcaacaagatggagtgaacggcatggaacagaccagagggacaatgacagcctataggaaaacactacacagaccacacaaccaaggggaaacaccagggaccaaaaatgaccgaccaaaacaagggaaagaaacaaggaaaaaacaaaagaacagaaaagcacggaaagagggcacagcatagaagaaagaac

SEQ ID NO: 282796 - DNA, 2966 bp, Homo sapiens
ggggacctcggaggcctgtttctgagcccctccccgcggactcgctccccggacgcccccagcgggctcctctggcctcggccctgcacgccgccggggcggagcctcccatcctttggggcttggcctctgtgttctccaaccgcacatcccggaagtcagccttacgtgcggggaacgacagtgccatggcagacggcgagggataccggaaccccacggaggtgcagatgagccagctggtgctgccctgccacaccaaccaacgtggtgagctgagcgtcgggcagctgctcaagtggattgacaccacggcttgcctgtccggtgggcatccaggtggcctcggaggacctgtgctctgagaagcagtggaatgtgtgcaaggccttggccaccttcgtggcccgccgagagatcaccaaggtgaagctgaagcagatcacgccgcggacagaagaggagaagatggagcacagtgtggcggctgagcgccggcgcatgcgccttgtctatgcagacaccatcaaggacctcctggccaactgcgccattcagggcgatctggagagcagagactgtagccgcatggtgccggctgagaagacccgtgtggagagtgtggagctggtcctgcctccccacgccaatcaccagggcaacacctttgggggccagatcatggcctggatggagaatgtggccaccattgcagccagccggctctgccgtgcccaccctacgctgaaggccattgaaatgttccacttccgaggcccgtcccaggtcggcgaccgtctggtgctcaaagccatcgtgaacaatgccttcaaacatagcatggaggtgggcgtgtgcgtggaggcctatcgccaggaggctgagacccaccggcgccacatcaacagtgcctttatgacctttgtggtcctggacgcagatgaccagccccagttgctgccctggattcggccccagcccggcgatggtgagcggcggtaccgagaggccagtgccagaaagaagatccgcctggacaggaagtacatcgtgtcctgtaagcagacagaggtgcccctctccgtcccctgggaccctagcaaccaggtgtacctgagctacaataacgtctcctccttgaagatgcttgtggccaaggacaactgggtgctgtcctcggagatcagtcaggtccgcctgtacactctggaggatgacaagttcctctccttccacatggagatggtggtgcatgtggatgcagcccaggccttcctgctgctctcggacctgcgtcagaggccagagtgggacaagcactaccggagcgtggagctagtgcagcaggtagacgaggacgacgccatctaccacgtcaccagccctgccctcggaggtcacacaaagccccaggacttcgtgatcctggcctcgaggcggaagccttgtgacaatggggacccctatgtcatcgcgctgaggtcggtcacgctgcccacacaccgagagacgccagagtacagacgcggagagaccctctgctcaggcttctgcctctggcgcgagggggaccagctgaccaaggtatcctactacaaccaggccaccccaggtgttctcaactatgtgaccaccaacgtggccggcctctcctctgagttctacaccaccttcaaggcttgtgagcagtttctcttggacaaccggaatgatctggcccccagcctccagaccctctagatgccctcagtggccacatcatgcccactcccactccatcctgtccccaaggactcacatacagtgcctggagaaagccaaagacctttatttcttcctgcctccccgtgggaagcctccgccctgaggtccgctggcccaccacccctgggtgctcagtttctaccaacatgagccagcaagtccttgtggtagccctggggtagcctgtagtagactcgggtcctgtccacagccctagctgccagcaatgctgtcctcacagaggcatagtcgcccccagctgggttgtgctccactgtgacggtggcccggggggaggatgccagcagcctgcctatggctccagctgtgctgtggcccagcagcatggcctgcatctggaaggacacaggttgccagagcccctggcacaactctagcatatctgtgagcagctgttccctgtagccactgcccagcacctcctcaggccagcctggtgccacagtcacgtgggggaagacctcagccacagctgtaagcagctctctgccagccacatggccggggaccgaaaaactcccgtgggagattttggccccaacccacacaggccaatgcaagaggccaaggctggagaggcgtgccagcaaggccagggatggccggagggctgcgggctccactatttgcaaatggatgccccagtgtccgggatgtgtggccagctgctgcaggcaggactccagcgtcaggatgttgccacttggagtatgaacaatgggcacggggttttcagccacagttccctcgaggccagtgttcagcaggatcatgccttctgtgtctggaagaggcggcagaggcaacagtgtttaggatttgggttatcataaggtgttaagagtcccttgttaaaggggcagtgggagttatggggtcatcaaggaccttgcctctctggaatctgtcaacccagttttgggctccaggtggatgggttgctttataaatgtgcctggtgcatgagaaactcttgtttcagctcttggcctttacccatgactcagcctgggggctggtgccggccttgcctgcagcaatgtagctgaggactggtctgaaggccaggagccctgtgctcttgacatcactgtactccctctccctccccgcaaccctgccccaccttgcatccagggtatggtgtaaataaacctgtgttgccatggcaacagagaccg

SEQ ID NO: 282797 - DNA, 5826 bp, Homo sapiens
gctttgcccagtagttggaaagtgaactcgactcgtgatggttctcctgtcactttggttgatagcagccgctctggtagaggttaggacttcagctgatggacaagctggtaatgaagaaatggtgcaaatagatttaccaataaagagatatagagagtatgagctggtgactccagtcagcacaaatctagaaggacgctatctctcccatactctttctgcgagtcacaaaaagaggtcagcgagggacgtgtcttccaaccctgagcagttgttctttaacatcacggcatttggaaaagattttcatctgcgactaaagcccaacactcaactagtagctcctggggctgttgtggagtggcatgagacatctctggtgcctgggaatataaccgatcccattaacaaccatcaaccaggaagtgctacgtatagaatccggaaaacagagcctttgcagactaactgtgcttatgttggtgacatcgtggacattccaggaacctctgttgccatcagcaactgtgatggtctggctggaatgataaaaagtgataatgaagagtatttcattgaacccttggaaagaggtaaacagatggaggaagaaaaaggaaggattcatgttgtctacaagagatcagctgtagaacaggctcccatagacatgtccaaagacttccactacagagagtcggacctggaaggccttgatgatctaggtactgtttatggcaacatccaccagcagctgaatgaaacaatgagacgccgcagacacgcgggagaaaacgattacaatatcgaggtactgctgggagtggatgactctgtggtccgtttccatggcaaagagcacgtccaaaactacctcctgaccctaatgaacattgtgaatgaaatttaccatgatgagtccctcggagtgcatataaatgtggtcctggtgcgcatgataatgctgggatatgcaaagtccatcagcctcatagaaaggggaaacccatccagaagcttggagaatgtgtgtcgctgggcgtcccaacagcaaagatctgatctcaaccactctgaacaccatgaccatgcaatttttttaaccaggcaagactttggacctgctggaatgcaaggatatgctccagtcaccggcatgtgtcatccagtgagaagttgtaccctgaatcatgaggatggtttttcatctgcttttgtagtagcccatgaaacgggccatgtgttgggaatggagcatgatggacaaggcaacaggtgtggtgatgagactgctatgggaagtgtcatggctcccttggtacaagcagcattccatcgttaccactggtcccgatgcagtggtcaagaactgaaaagatatatccattcctatgactgtctccttgatgacccttttgatcatgattggcctaaactcccagaacttcctggaatcaattattctatggatgagcaatgtcgttttgattttggtgttggctataaaatgtgcaccgcgttccgaacctttgacccatgtaaacagctgtggtgtagccatcctgataatccctacttttgtaagactaaaaagggacctccacttgatgggactgaatgtgctgctggaaaatggtgctataagggtcattgcatgtggaagaatgctaatcagcaaaaacaagatggcaattgggggtcatggactaaatttggctcctgttctcggacatgtggaactggtgttcgtttcagaacacgccagtgcaataatcccatgcccatcaatggtggtcaggattgtcctggtgttaattttgagtaccagctttgtaacacagaagaatgccaaaaacactttgaggacttcagagcacagcagtgtcagcagcgaaactcccactttgaataccagaataccaaacaccactggttgccatatgaacatcctgaccccaagaaaagatgccacctttactgtcagtccaaggagactggagatgttgcttacatgaaacaactggtgcatgatggaacgcactgttcttacaaagatccatatagcatatgtgtgcgaggagagtgtgtgaaagtgggctgtgataaagaaattggttctaataaggttgaggataagtgtggtgtctgtggaggagataattcccactgccgaaccgtgaaggggacatttaccagaactcccaggaagcttgggtaccttaagatgtttgatataccccctggggctagacatgtgttaatccaagaagacgaggcttctcctcatattcttgctattaagaaccaggctacaggccattatattttaaatggcaaaggggaggaagccaagtcgcggaccttcatagatcttggtgtggagtgggattataacattgaagatgacattgaaagtcttcacaccgatggacctttacatgatcctgttattgtttgattatacctcaagaaaatgatacccgctctagcctgacatataagtacatcatccatgaagactctgtacctacaatcaacagcaacaatgtcatccaggaagaattagatacttttgagtgggctttgaagagctggtctcagtgttccaaaccctgtggtggaggtttccagtacactaaatatggatgccgtaggaaaagtgataataaaatggtccatcgcagcttctgtgaggccaacaaaaagccgaaacctattagacgaatgtgcaatattcaagagtgtacacatccactctgggtagcagaagaatgggaacactgcaccaaaacctgtggaagttctggctatcagcttcgcactgtacgctgccttcagccactccttgatggcaccaaccgctctgtgcacagcaaatactgcatgggtgaccgtcccgagagccgccggccctgtaacagagtgccctgccctgcacagtggaaaacaggaccctggagtgagtgttcagtgacctgcggtgaaggaacggaggtgaggcaggtcctctgcagggctggggaccactgtgatggtgaaaagcctgagtcggtcagagcctgtcaactgcctccttgtaatgatgaaccatgtttgggagacaagtccatattctgtcaaatggaagtgttggcacgatactgctccataccaggttataacaagttatgttgtgagtcctgcagcaagcgcagtagcaccctgccaccaccataccttctagaagctgctgaaactcatgatgatgtcatctctaaccctagtgacctccctagatctctagtgatgcctacatctttggttccttatcattcagagacccctgcaaagaagatgtctttgagtagcatctcttcagtgggaggtccaaatgcatatgctgctttcaggccaaacagtaaacctgatggtgctaatttacgccagaggagtgctcagcaagcaggaagtaagactgtgagactggtcaccgtaccatcctccccacccaccaagagggtccacctcagttcagcttcacaaatggctgctgcttccttctttgcagccagtgattcaataggtgcttcttctcaggcaagaacctcaaagaaagatggaaagatcattgacaacagacgtccgacaagatcatccaccttagaaagatgagaaagtgaaccaaaaaggctagaaaccagaggaaaacctggacaacctctctcttcccatggtgcatatgcttgtttaaagtggaaatctctatagatcgtcagctcattttatctgtaattggaagaacagaaagtgctggctcactttctagttgctttcatcctccttttgttctgcattgactcatttaccagaattcattggaagaaatcaccaaagattattacaaaagaaaaatatgttgctaagattgtgttggtcgctctctgaagcagaaaagggactggaaccaattgtgcatatcagctgactttttgtttgttttagaaaagttacagtaaaaattaaaaagagataccaatggtttacactttaacaagaaattttggatatggaacaaagaattcttagacttgtattcctatttatctatattagaaatattgtatgagcaaatttgcagctgttgtgtaaatactgtatattgcaaaaatcagtattattttaagagatgtgttctcaaatgattgtttactatattacatttctggatgttctaggtgcctgtcgttgagtattgccttgtttgacattctataggttaattttcaaagcagagtattacaaaagagaagttagaattacagctactgacaatataaagggttttgttgaatcaacaatgtgatacgtaaattatagaaaaagaaaagaaacacaaaagctatagatatacagatatcagcttacctattgccttctatacttataatttaaaggattggtgtcttagtacacttgtggtcacagggatcaacgaatagtaaataatgaactcgtgcaagacaaaactgaaaccctctttccaggacctcagtaggcaccgttgaggtgtcctttgtttttgtgtgtgtgtgttcttttttaattttcgcattgttgacagatacaaacagttatactcaatgtactgtaataatcgcaaaggaaaaagttttgggataacttatttgtatgttggtagctgagaaaaatatcatcagtctagaattgatatttgagtatagtagagctttggggctttgaaggcaggttcaagaaagcatatgtcgatggttgagatatttattttccatatggttcatgttcaaatgttcacaaccacaatgcatctgactgcaataatgtgctaataatttatgtcagtagtcaccttgctcacagcaaagccagaaatgctctctccagggagtagatgtaaagtacttgtacatagaattcagaactgaagatatttattaaaagttgatttttttttcttgatagtatttttatgtactaaatatttacactaatatcaattacatattttggtaaactagagagacataattagagatgcatgctttgttctgtgcatagagacctttaagcaaactactacagccaactcaaaagctaaaactgaacaaatttgatgttatgcaaacatcttgcatttttagtagttgatattaagttgatgacttgtttcccttcaaggaaacattaaattgtatggactcagctagctgttcaatgaaattgtgaattagaaacatttttaaaagtttttgaaagagataagtgcatcatgaattacatgtacatgagaggagatagtgatatcagcataatgattttgaggtcagtacctgagctgtctaaaaatatattatacaaactaaaatgtagatgaattaacctctcaaagcacagaatgtgcaagaacttttgcattttaatcgttgtaaactaacagcttaaactattgactctatacctctaaagaattgctgctactttgtgcaagaactttgaaggtcaaattaggcaaattccagatagtaaaacaatccctaagccttaagtcttttttttttcctaaaaattcccatagaataaaattctctctagtttacttgtgtgtgcatacatctcatccacaggggaagataaagatggtcacacaaacagtttccataaagatgtacatattcattatacttctgacctttgggctttcttttctactaagctaaaaattcctttttatcaaagtgtacactactgatgctgtttgttgtactgagagcacgtaccaataaaaatgttaacaaaatataaaac

SEQ ID NO: 282798 - DNA, 827 bp, Homo sapiens
ctggtgactccagtcagcacaaatctagaaggacgctatctctcccatactctttctgcgagtcacaaaaagaggtcagcgagggacgtgtcttccaaccctgagcagttgttctttaacatcacggcatttggaaaagattttcatctgcgactaaagcccaacactcaactagtagctcctggggctgttgtggagtggcatgagacatctctggtgcctgggaatataaccgatcccattaacaaccatcaaccaggaagtgctacgtatagaatccggaaaacagagcctttgcagactaactgtgcttatgttggtgacatcgtggacattccaggaacctctgttgccatcagcaactgtgatggtctggtaagactccttctgttttgtgcgtatgtttgcaggtgctgggagtgcagccatggcttctgcatagtttggaaggtggaggtggaaaggaggcttcattgttatgttacattttaagttcagaaaaagacactagaaagcattttgctgtcaaagatatgcattttggcttaatttgtgacaattttgtttcttggaataatgcgaagacgacattattccaagaaacaaaagtcaaatattttagcatttttttttgttaatgtttttccttgtattacattggaagattttatttccttattttgttcaaagtattctgaaaactttccaaagaagcatagattccttcaaaatgaccgtattttactccttatgtggaaactttggatatcttcgtaaagaaagtattttgaaagtgttctttagcttcctcacagaatgctaatgtg

SEQ ID NO: 282799 - DNA, 4012 bp, Homo sapiens
atggttactcacagtttaagctttgccagcacgaaccccatggactcttgatccctatgtggtaacttaggaaacttggtgcttataggagtaagttctcctgggtttctaagaataaggcttaaataccctttctctaaagagccaagaaaagatgccacctttactgtcagtccaaggagactggagatgttgcttacatgaaacaactggtgcatgatggaacgcactgttcttacaaagatccatatagcatatgtgtgcgaggagagtgtgtgaaagtgggctgtgataaagaaattggttctaataaggttgaggataagtgtggtgtctgtggaggagataattcccactgccgaaccgtgaaggggacatttaccagaactcccaggaagcttgggtaccttaagatgtttgatataccccctggggctagacatgtgttaatccaagaagacgaggcttctcctcatattcttgctattaagaaccaggctacaggccattatattttaaatggcaaaggggaggaagccaagtcgcggaccttcatagatcttggtgtggagtgggattataacattgaagatgacattgaaagtcttcacaccgatggacctttacatgatcctgttattgtttgattatacctcaagaaaatgatacccgctctagcctgacatataagtacatcatccatgaagactctgtacctacaatcaacagcaacaatgtcatccaggaagaattagatacttttgagtgggctttgaagagctggtctcagtgttccaaaccctgtggtggaggtttccagtacactaaatatggatgccgtaggaaaagtgataataaaatggtccatcgcagcttctgtgaggccaacaaaaagccgaaacctattagacgaatgtgcaatattcaagagtgtacacatccactctgggtagcagaagaatgggaacactgcaccaaaacctgtggaagttctggctatcagcttcgcactgtacgctgccttcagccactccttgatggcaccaaccgctctgtgcacagcaaatactgcatgggtgaccgtcccgagagccgccggccctgtaacagagtgccctgccctgcacagtggaaaacaggaccctggagtgagtgttcagtgacctgcggtgaaggaacggaggtgaggcaggtcctctgcagggctggggaccactgtgatggtgaaaagcctgagtcggtcagagcctgtcaactgcctccttgtaatgatgaaccatgtttgggagacaagtccatattctgtcaaatggaagtgttggcacgatactgctccataccaggttataacaagttatgttgtgagtcctgcagcaagcgcagtagcaccctgccaccaccataccttctagaagctgctgaaactcatgatgatgtcatctctaaccctagtgacctccctagatctctagtgatgcctacatctttggttccttatcattcagagacccctgcaaagaagatgtctttgagtagcatctcttcagtgggaggtccaaatgcatatgctgctttcaggccaaacagtaaacctgatggtgctaatttacgccagaggagtgctcagcaagcaggaagtaagactgtgagactggtcaccgtaccatcctccccacccaccaagagggtccacctcagttcagcttcacaaatggctgctgcttccttctttgcagccagtgattcaataggtgcttcttctcaggcaagaacctcaaagaaagatggaaagatcattgacaacagacgtccgacaagatcatccaccttagaaagatgagaaagtgaaccaaaaaggctagaaaccagaggaaaacctggacaacctctctcttcccatggtgcatatgcttgtttaaagtggaaatctctatagatcgtcagctcattttatctgtaattggaagaacagaaagtgctggctcactttctagttgctttcatcctccttttgttctgcattgactcatttaccagaattcattggaagaaatcaccaaagattattacaaaagaaaaatatgttgctaagattgtgttggtcgctctctgaagcagaaaagggactggaaccaattgtgcatatcagctgactttttgtttgttttagaaaagttacagtaaaaattaaaaagagataccaatggtttacactttaacaagaaattttggatatggaacaaagaattcttagacttgtattcctatttatctatattagaaatattgtatgagcaaatttgcagctgttgtgtaaatactgtatattgcaaaaatcagtattattttaagagatgtgttctcaaatgattgtttactatattacatttctggatgttctaggtgcctgtcgttgagtattgccttgtttgacattctataggttaattttcaaagcagagtattacaaaagagaagttagaattacagctactgacaatataaagggttttgttgaatcaacaatgtgatacgtaaattatagaaaaagaaaagaaacacaaaagctatagatatacagatatcagcttacctattgccttctatacttataatttaaaggattggtgtcttagtacacttgtggtcacagggatcaacgaatagtaaataatgaactcgtgcaagacaaaactgaaaccctctttccaggacctcagtaggcaccgttgaggtgtcctttgtttttgtgtgtgtgtgttcttttttaattttcgcattgttgacagatacaaacagttatactcaatgtactgtaataatcgcaaaggaaaaagttttgggataacttatttgtatgttggtagctgagaaaaatatcatcagtctagaattgatatttgagtatagtagagctttggggctttgaaggcaggttcaagaaagcatatgtcgatggttgagatatttattttccatatggttcatgttcaaatgttcacaaccacaatgcatctgactgcaataatgtgctaataatttatgtcagtagtcaccttgctcacagcaaagccagaaatgctctctccagggagtagatgtaaagtacttgtacatagaattcagaactgaagatatttattaaaagttgatttttttttcttgatagtatttttatgtactaaatatttacactaatatcaattacatattttggtaaactagagagacataattagagatgcatgctttgttctgtgcatagagacctttaagcaaactactacagccaactcaaaagctaaaactgaacaaatttgatgttatgcaaacatcttgcatttttagtagttgatattaagttgatgacttgtttcccttcaaggaaacattaaattgtatggactcagctagctgttcaatgaaattgtgaattagaaacatttttaaaagtttttgaaagagataagtgcatcatgaattacatgtacatgagaggagatagtgatatcagcataatgattttgaggtcagtacctgagctgtctaaaaatatattatacaaactaaaatgtagatgaattaacctctcaaagcacagaatgtgcaagaacttttgcattttaatcgttgtaaactaacagcttaaactattgactctatacctctaaagaattgctgctactttgtgcaagaactttgaaggtcaaattaggcaaattccagatagtaaaacaatccctaagccttaagtcttttttttttcctaaaaattcccatagaataaaattctctctagtttacttgtgtgtgcatacatctcatccacaggggaagataaagatggtcacacaaacagtttccataaagatgtacatattcattatacttctgacctttgggctttcttttctactaagctaaaaattcctttttatcaaagtgtacactactgatgctgtttgttgtactgagagcacgtaccaataaaaatgttaacaaaatataaaac

SEQ ID NO: 282800 - DNA, 599 bp, Homo sapiens
gaagttggaagaggcaaggaaggatttgagcctagagcctttggaaggagcatggccctgttggttctggcctccagaactgcaagaaaatacatttttgttgttttaaaccacccagttcatggtaatttgtaacaccagctacaagaaattaacacaaggctgatgtgactttccatcaggagagagacagccccaggtgagacctgcctgcctcattgtctgacagctttcccagcctcctccaggctcccctccgttttctcttatacgcattcccccaataaacttcctgtacatttaataccatctcagtgtctgctcccaggaggaccctaactgacacactggggcatttagcctccaattccttttctcccttggctgagatctgttccaggaagtatctccaggacactccagcctgttgcacaggccaaagaaaagccctcaggcagaggagcaaatacttgcaagaggacaccagtggcaagaacagggacatggtgagacttcgacatcattggctacagtagtactagtcactcttgactgtggtttatgttgtttcaataaagtagctttccttctcaaaaaca

SEQ ID NO: 282801 - DNA, 725 bp, Homo sapiens
gaagttggaagaggcaaggaaggatttgagcctagagcctttggaaggagcatggccctgttggttctggcctccagaactgcaagaaaatacatttttgttgttttaaaccacccagttcatggtaatttgtaacaccagctacaagaaattaacacaaggctgatgtgactttccatcaggagagagacagccccaggtaggtgtttcagatatcacatccaatagaacaaattaaagacaaacaccctaaattctagatgttgatttgtgagcaagttatttctcctatgggcaactctagttgaaatatgcaattcattatgttgaaacatggaattgttattttcataggttaaaaaaaaatcacatagtggcaatatagtagtagtgctcgttttttgttttttgtttttttgtcaaaaatgctagacaacatggaagatcagggaaatattaacagtctgattcagtaacctttaacagcttcttttcaggttacacaggctaagctaacttttatatcaggatcaggatctgcagagttattagtatagtgctctgcagatcctggtcctagtatagcaggatctgcagaccctagttgtacctggccatgttccccaccaatgactgagaaagaaatggctcgaacagaaaacagtggtcttgaaaggcaacgcaacagtaggttacaaatagcattagctttttctttaaagaaa

SEQ ID NO: 282802 - DNA, 1091 bp, Homo sapiens
tttttctatttcagatgccttcaatgttgtgtttattgacacatccacccctttcccatttctttttcaatagggaggatactgggatgaggatgcttgtaatgtggtgcacactgattaccagagcacagctgagatactgttgggtcctgtctcctcccaaagcacacatcacatcccagggtgcacaccagtaaatgatcagattctggacatggggagccaaggacaggggaaggcagagagaggagcagaattgcaaccactgtcgtcatgaaggaagctaggtgagagagctggcacaaggtggcaacatttgcatgaagaggacaaacaactggaaataccaccagggggcgtgtgtagctgtaacacaccagtcatgctctttccctacagttaccaggcggggtttgatcactatgcataacctgagaaagatagacaaacagcagacagatagataggttgggggtgcttagatagacaaatatcaccagcctcctaagctcatcctggtgttgtgattggccacaccaaaacgtaacatctccagtctatctgatatcattgaacaggtctcctctaaggcaaggagttggattcccctagaacacctgccaaagtgcagtggaagggaaggaggtcttgcctgggggcagtggtcactgggcctgggtttctgtgctgattctgcccttagcaacctgggtgacctagggcaggtcacttaacatttctgcgctacacttttctgacttgtaaaatcacatgcttgggtggcagatgcagactgttagtaatttttaaactttagagatcacggaggagaaaactgagatccaaagaagttaaattacttgtccaaagccacttgatgtgggagtggaatgaccgagaggatgtggattctggaaccagagccagttccacatgatggttccagcacacccctcacactgccctctggtgatctactgtctcctcatctcttcctcctctgcagaatggaggaatagcagcacctacctcccaaggttttggaagaataaatgagtacctgacacaaggaaagcctccaatatatgtta

SEQ ID NO: 282803 - DNA, 1402 bp, Homo sapiens
ggcctgtctcgcttcgcggccacctcttccccaacgctacccgctccgtaccctgactcgctgctcctctgtgctggcagagagcgcgcagaacgtagctggacccaagggtttatttaccacattggctggtgtgtccatctgctgtgcaaccacatttatctccggtgagataaaccccatttatctcctagcaagtccctggcgcacagtgagctctgataaaaagcagcccatctacctcctccaaccagacccaactagcccagatgcttaattctccatgacttgtaacacctcaatacctttgtatttgctgttccatctacctggagagcctttccagggagctagaggagggagagattcctatgaactgaaaagggaggatactgggatgaggatgcttgtaatgtggtgcacactgattaccagagcacagctgagatactgttgggtcctgtctcctcccaaagcacacatcacatcccagggtgcacaccagtaaatgatcagattctggacatggggagccaaggacaggggaaggcagagagaggagcagaattgcaaccactgtcgtcatgaaggaagctaggtgagagagctggcacaaggtggcaacatttgcatgaagaggacaaacaactggaaataccaccagggggcgtgtgtagctgtaacacaccagtcatgctctttccctacagttaccaggcggggtttgatcactatgcataacctgagaaagatagacaaacagcagacagatagataggttgggggtgcttagatagacaaatatcaccagcctcctaagctcatcctggtgttgtgattggccacaccaaaacgtaacatctccagtctatctgatatcattgaacaggtctcctctaaggcaaggagttggattcccctagaacacctgccaaagtgcagtggaagggaaggaggtcttgcctgggggcagtggtcactgggcctgggtttctgtgctgattctgcccttagcaacctgggtgacctagggcaggtcacttaacatttctgcgctacacttttctgacttgtaaaatcacatgcttgggtggcagatgcagactgttagtaatttttaaactttagagatcacggaggagaaaactgagatccaaagaagttaaattacttgtccaaagccacttgatgtgggagtggaatgaccgagaggatgtggattctggaaccagagccagttccacatgatggttccagcacacccctcacactgccctctggtgatctactgtctcctcatctcttcctcctctgcagaatggaggaatagcagcacctacctcccaaggttttggaagaataaatgagtacctgacacaaggaaagcctccaatatatgtta

SEQ ID NO: 282804 - DNA, 561 bp, Homo sapiens
tttttctatttcagatgccttcaatgttgtgtttattgacacatccacccctttcccatttctttttcaatagggaggatactgggatgaggatgcttgtaatgtggtgcacactgattaccagagcacagctgagatactgttgggtcctgtctcctcccaaagcacacatcacatcccagggtgcacaccagtaaatgatcagattctggacatggggagccaaggacaggggaaggcagagagaggagcagaattgcaaccactgtcgtcatgaaggaagctagagatcacggaggagaaaactgagatccaaagaagttaaattacttgtccaaagccacttgatgtgggagtggaatgaccgagaggatgtggattctggaaccagagccagttccacatgatggttccagcacacccctcacactgccctctggtgatctactgtctcctcatctcttcctcctctgcagaatggaggaatagcagcacctacctcccaaggttttggaagaataaatgagtacctgacacaaggaaagcctccaatatatgtta

SEQ ID NO: 282805 - DNA, 642 bp, Homo sapiens
ggcctgtctcgcttcgcggccacctcttccccaacgctacccgctccgtaccctgactcgctgctcctctgtgctggcagagagcgcgcagaacgtagctggacccaagggtttatttaccacattggctggtgtgtccatctgctgtgcaaccacatttatctccggtgagataaaccccatttatctcctagcaagtccctggcgcacagtgagctctgataaaagtacgttgaattggaacctggaactggactaacagctcccaagttcgtatctccgcctcagatctccttttaaactctagacgtgtgcatccatctgcctccatgcatccgcctccatgcatccgcctccgcatccgcctccatgcatccgcctccgcagcacctcccttgggatgcctaatagactctcaaatgttacatgccttctgtattgctccttcccccatcatttcatgcgtaggcagctagcagtctctgccacttttccttgctgtggtcttctgctcaaatatcagcttttcaaagaggtcttgaacaccctaagacagctctgtcatcctctctgctccctggcctttcccagcactctcttgttttgctttattttttctttatgatacttatacctacctga

SEQ ID NO: 282806 - DNA, 758 bp, Homo sapiens
taaataaccacaagcacattagggggggcatcctgtgttgttcaggttccttctgggtggcaaactagctctgggccctgtccagacagggacatggacagatggagtgagtccagagaaaggcacccaaatggcaggagaccagatatcagtgctttaagggagcctgtgcaccctggccaaccccacacagcagagctgggagcacaagcagaagcctcagcaggcagtgctggtccacagtggagccagctgccccaggagggaagtgggctccctgaggctggagatatttaagcaggggcattttggaagggattcttagggtatcctgagggttggatgtgacacacacaggacccttcaactctgaggtcacgaggaaggaggcgctgtgagaaacatgtttgtgaaaggaaagaccttgggccactggggaaggcctagctgcctccagcttggtggtggacagagccccagccgggaggccggggacctaagttctggttccactctaccctgtctctgtgtctggcctggagtaggaacctgccctctctgtgccgcctgctgcccagaacacctggtagatgaggctgaggctcagtgaggttgtggagccctcctgcctctatgggagtcccactgccctgaggctctgcttctgctctaggtcctacccctgccctgcccccactcctcctgggctcctggaccttcaggagcccatgtccctccccagggctgaacgagtgtct

SEQ ID NO: 282807 - DNA, 500 bp, Homo sapiens
ctttgtgaggttgaccaagtgattgaggagtgactttgaatgtgtggctatgcgtatttgagtgtgaatgtctatcattagatgctgctgtggatgcttgactgcccttactcactgttccatcagtccctacatcacacactaatccttcccccagcttcactgcccagagcttaggagcacatgggaaatggctatcctagatgaggaaggagtctgtggcaacaggccgagaattagggcccaggagtgtcacaggttacacagtacatctccaactgcctctgactcacctagtgccccaggtaaaaggcacccagataaaaggtaggggaggaggagagagagagaaggaagagtctaggctgagcaacatgaaggggcccccaaccttctgcagcctcctgctgctgtcattgctcctgagcccagaccctacagcaggtgagtacttgggggtatagaaagctgggggtctgggtgaatgggatgaagttgaa

SEQ ID NO: 282808 - DNA, 492 bp, Homo sapiens
gcctgctgtactcagctctaccgaaagccactctcagacaagctactgaggaaggtcatccaggtggaactgcaggaggctgacggggactgtcacctccaggctttcgtgtgagctcccacccctgatacccctgactctgacctcagtcccaacccctaatgctgatcccaaccccagccctaactgctaattctgttgccaactcaggttttcatctggtccttgctcctaacccctaattagggtcattggggatgaccctaatctcatccccaagctatggtcatagctttggacctttctctacccaggcttcacctggctcaacgcagcatctgcatccacccccagaaccccagcctgtcacagtggtttgagcaccaagagagaaagctccatgggactctgcccaagctgaattttgggatgctaaggaaaatgggctgaagcccccaatagccaaataataaagcagcattggataataat

SEQ ID NO: 282809 - DNA, 439 bp, Homo sapiens
cccagataaaaggtaggggaggaggagagagagagaaggaagagtctaggctgagcaacatgaaggggcccccaaccttctgcagcctcctgctgctgtcattgctcctgagcccagaccctacagcagcattcctactgccacccagcactgcctgctgtactcagctctaccgaaagccactctcagacaagctactgaggaaggtcatccaggtggaactgcaggaggctgacggggactgtcacctccaggctttcgtgcttcacctggctcaacgcagcatctgcatccacccccagaaccccagcctgtcacagtggtttgagcaccaagagagaaagctccatgggactctgcccaagctgaattttgggatgctaaggaaaatgggctgaagcccccaatagccaaataataaagcagcattggataataa

SEQ ID NO: 282810 - DNA, 1259 bp, Homo sapiens
gctgcgtcgtcgacgctgggctttcgggtcccgcgcccagagatgggctccaaggcaaagaagcgcgtgctgctgcccacccgcccagcgccccccacggtggagcagatcctggaggatgtgcggggtgcgccggcagaggatccagtgttcaccatcctggccccggaagaccccccagttcccttcaggatgatggaggatgcggaggccccgggagagcagctctaccagcaaagccgggcctacgtggctgccaaccagcggctgcagcaggcgggcaacgtgctgaggcagaggtgtgagctcctgcagcgagccggcgaggacctggagcgggaggtggcccagatgaagcaggcagcattaccggcagccgaggctgcctcctcaggctgacctctcggggcctgcaggcttgggcagcgcacaaggtggcctgcacccaggctttccctgggggtccgtcggccccagactggcattcacggggtcccagcccacgtgggtgttgacacaggcgcccctcctgatgctggggctgcggttcatccgtcgtctcattcatgccgagttggtgggacccacccagctggctccgtcctgcgtgacctgagggccccactggggttctggaagaggatagggacattattgctgtactgtgattctgtcgtcagctcacagtggccgtgctctgcagtggggcccctgggagcaggtgccacctccttcctctcccggggcaggcactcgcctgtccacttctgagtccaggtgttgggatcgaggtgttaactgtgattccatccagcgagtgcccacccaatgtcagagcagcccgagggccagcctgagcccctgaccccacttccttctgggccccgggctcctcccacaagccacgttgatcttcacaacgaccctgggccgctggggtcacccaagagaagcagccctgagacccagccaggctgggcctagctccacggcacgggtgtctcccagccactgcccttgctggaggaccgctgtgagtcactggccaggagcccagggtgtcctgagtctcatagccaccctgccagctgcagcaggtcctgggcctgcttccctgcgggttctggccctgggggagggggcgttagtgcggcggagggtcttgccaaaggcttttcatcctaaatagcaacttgagtggaaacctgggcaaggcggcccagaggctgggccctgcacataaagctttcgtgtgtgtc

SEQ ID NO: 282811 - DNA, 2533 bp, Homo sapiens
gctgcgtcgtcgacgctgggctttcgggtcccgcgcccagagatgggctccaaggcaaagaagcgcgtgctgctgcccacccgcccagcgccccccacggtggagcagatcctggaggatgtgcggggtgcgccggcagaggatccagtgttcaccatcctggccccggaagaccccccagttcccttcaggatgatggaggatgcggaggccccgggagagcagctctaccagcaaagccgggcctacgtggctgccaaccagcggctgcagcaggcgggcaacgtgctgaggcagaggtgtgagctcctgcagcgagccggcgaggacctggagcgggaggtggcccagatgaagcaggcagcattaccggcagccgaggctgcctcctcaggctgacctctcggggcctgcaggcttgggcagcgcacaaggtggcctgcacccaggctttccctgggggtccgtcggccccagactggcattcacggggtcccagcccacgtgggtgttgacacaggcgcccctcctgatgctggggctgcggttcatccgtcgtctcattcatgccgagttggtgggacccacccagctggctccgtcctgcgtgacctgagggccccactggggttctggaagaggatagggacattattgctgtactgtgattctgtcgtcagctcacagtggccgtgctctgcagtggggcccctgggagcaggtgccacctccttcctctcccggggcaggcactcgcctgtccacttctgagtccaggtgttgggatcgaggtgttaactgtgattccatccagcgagtgcccacccaatgtcagagcagcccgagggccagcctgagcccctgaccccacttccttctgggccccgggctcctcccacaagccacgttgatcttcacaacgaccctgggccgctggggtcacccaagagaagcagccctgagacccagccaggctgggcctagctccacggcacgggtgtctcccagccactgcccttgctggaggaccgctgtgagtcactggccaggagcccagggtgtcctgagtctcatagccaccctgccagctgcagcaggtcctgggcctgcttccctgcgggttctggccctgggggagggggcgttagtgcggcggagggtcttgccaaaggcttttcatcctaaatagcaacttgagtggaaacctgggcaaggcggcccagaggctgggccctgcacataaagctttcgtgtgtgtctggccgtctgaatggtgcctctgtgagcggctccgtcccggggccccggaagctggggagggatgggtaccggcgaccccgggaaccctgctcagtcctgccgggcactgcatgcagggaccgtccgcctgacccagagacctggggctgcctcaccctctctccagacccacagccagctttgtttcttgaatgtggaagatgtttcttattccctgaagaaagggggcctgccacacacagcctgggaggcgcctcatccagaaactgggacttggctagcccggcctgggccctagggacttctcactggtcatgcttctgaagctgctcacctggccgagggaggtcccggcagtgtcccagggtggaaggtggggagggggccggctcctgccatcccttcccaccctgcacttctgtgctgcttgcagtcatagctttccttgtccccccagctgggccagggctgtgctccctgaagtggctttgacgtggggccgtcccagctcccgcagcccctgtccaccattgactctccccggtagtggctgctgtggctgccccatcccagctgttgcaccagccacagctcctagtggctcatgggtgcctcctgccccacactggggcctgccataataactggcccaggtaccaatgcccaggttggaccccctgtctggggtgctgtgcaccccctggagcctgccctcccttgggaccagggggagactcctggcctcagccagtgcctccccggcccatctgggtggggtgcccacaaaccctgtgcccccagtttctgctttctggctctgcttccagggatctaacctggggggtctcagcaattctgtggcagcacatagacagcgatgaacctacccgcccacagcccattttgaggaagaggtgatggcggcaggcaatgcaagagctcagtttattaaatgtgtgcgagtcggacaaaaaaaaaaaaataaaacaacaaccaacaacggggcgcgcccgccaaatagctccccccacgagggggacccactactagaccgctgccccgattgtctggtgccaccgcggcgccccaagggagcaccacatcaaacggacagccagtggccacctcaccgacccgggcacggagaaaccacccagcccgtcgactctgaagcgaaccaaccacggcgcggcacacagcgagacccccaaacggatgagcctagggcatcacactacggcacggtcacacacatgcgcggcatgcccgtcac

SEQ ID NO: 282812 - DNA, 470 bp, Homo sapiens
ttagggacatatctcagaaaacttccagcctgaaacgcgtacatccaggttcaccacagcacgattcacagagccaggagtggggggcagctagagcatccataggaggacaagtgggtcagcccagcctccatcagattcacagagacagaaagtaggatgggggtgggtgccaggggctggggacaggatgagcaggaaatgtttcaccgggacagagtttgaagatgtaaagtggccgggcgtggtggctcgcgcctgtaatcccggcactttgggaggccgaggtgggcggatcacctgaggccaggagtttgagaccagcctgagcaacacggtgaaaccccgtctctactaaaaatacaaaaattagtcaggtgtgggggcgggcaccttgaggatgtcacgctcagtgggagacgccaggcataaaatgacaaatcctgtgtgattccactcctaggatgtcc

SEQ ID NO: 282813 - DNA, 2279 bp, Homo sapiens
gctgcgtcgtcgacgctgggctttcgggtcccgcgcccaggtgggaagaggccggcgactggggtgaccgcggggaaactgaggcagagagatgggctccaaggcaaagaagcgcgtgctgctgcccacccgcccagcgccccccacggtggagcagatcctggaggatgtgcggggtgcgccggcagaggatccagtgttcaccatcctggccccggaagaccccccagttcccttcaggatgatggaggatgcggaggccccgggagagcagctctaccagcaaagccgggcctacgtggctgccaaccagcggctgcagcaggcgggcaacgtgctgaggcagaggtgtgagctcctgcagcgagccggcgaggacctggagcgggaggtggcccagatgaagcaggcagcattaccggcagccgaggctgcctcctcaggctgacctctcggggcctgcaggcttgggcagcgcacaaggtggcctgcacccaggctttccctgggggtccgtcggccccagactggcattcacggggtcccagcccacgtgggtgttgacacaggcgcccctcctgatgctggggctgcggttcatccgtcgtctcattcatgccgagttggtgggacccacccagctggctccgtcctgcgtgacctgagggccccactggggttctggaagaggatagggacattattgctgtactgtgattctgtcgtcagctcacagtggccgtgctctgcagtggggcccctgggagcaggtgccacctccttcctctcccggggcaggcactcgcctgtccacttctgagtccaggtgttgggatcgaggtgttaactgtgattccatccagcgagtgcccacccaatgtcagagcagcccgagggccagcctgagcccctgaccccacttccttctgggccccgggctcctcccacaagccacgttgatcttcacaacgaccctgggccgctggggtcacccaagagaagcagccctgagacccagccaggctgggcctagctccacggcacgggtgtctcccagccactgcccttgctggaggaccgctgtgagtcactggccaggagcccagggtgtcctgagtctcatagccaccctgccagctgcagcaggtcctgggcctgcttccctgcgggttctggccctgggggagggggcgttagtgcggcggagggtcttgccaaaggcttttcatcctaaatagcaacttgagtggaaacctgggcaaggcggcccagaggctgggccctgcacataaagctttcgtgtgtgtctggccgtctgaatggtgcctctgtgagcggctccgtcccggggccccggaagctggggagggatgggtaccggcgaccccgggaaccctgctcagtcctgccgggcactgcatgcagggaccgtccgcctgacccagagacctggggctgcctcaccctctctccagacccacagccagctttgtttcttgaatgtggaagatgtttcttattccctgaagaaagggggcctgccacacacagcctgggaggcgcctcatccagaaactgggacttggctagcccggcctgggccctagggacttctcactggtcatgcttctgaagctgctcacctggccgagggaggtcccggcagtgtcccagggtggaaggtggggagggggccggctcctgccatcccttcccaccctgcacttctgtgctgcttgcagtcatagctttccttgtccccccagctgggccagggctgtgctccctgaagtggctttgacgtggggccgtcccagctcccgcagcccctgtccaccattgactctccccggtagtggctgctgtggctgccccatcccagctgttgcaccagccacagctcctagtggctcatgggtgcctcctgccccacactggggcctgccataataactggcccaggtaccaatgcccaggttggaccccctgtctggggtgctgtgcaccccctggagcctgccctcccttgggaccagggggagactcctggcctcagccagtgcctccccggcccatctgggtggggtgcccacaaaccctgtgcccccagtttctgctttctggctctgcttccagggatctaacctggggggtctcagcaattctgtggcagcacatagacagcgatgaacctacccgcccacagcccattttgaggaagaggtgatggcggcaggcaatgcaagagctcagtttattaaatgtgtgcgagtcggaca

SEQ ID NO: 282814 - DNA, 2535 bp, Homo sapiens
gctgcgtcgtcgacgctgggctttcgggtcccgcgcccaggtgggaagaggccggcgactggggtgaccgcggggaaactgaggcagagagatgggctccaaggcaaagaagcgcgtgctgctgcccacccgcccagcgccccccacggtggagcagatcctggaggatgtgcggggtgcgccggcagaggatccagtgttcaccatcctggccccggaagggatgggggtgtcactatgttgtccaggctggtctctaactcttgggctcaagtgttcctcccgcctcggcctcccaaagtgctggattacaggcgtgagccaccacacctggctgcatccgtcatgttaagaagaccccggctggcaagctcactcggggactgcagggaaccctgccctttgggggcagtagtgaggggtgcccaggaggatggggtggtcagcaggcagtgatgctgctgtgtcctgtctcagaccccccagttcccttcaggatgatggaggatgcggaggccccgggagagcagctctaccagcaaagccgggcctacgtggctgccaaccagcggctgcagcaggcgggcaacgtgctgaggcagaggtgtgagctcctgcagcgagccggcgaggacctggagcgggaggtggcccagatgaagcaggcagcattaccggcagccgaggctgcctcctcaggctgacctctcggggcctgcaggcttgggcagcgcacaaggtggcctgcacccaggctttccctgggggtccgtcggccccagactggcattcacggggtcccagcccacgtgggtgttgacacaggcgcccctcctgatgctggggctgcggttcatccgtcgtctcattcatgccgagttggtgggacccacccagctggctccgtcctgcgtgacctgagggccccactggggttctggaagaggatagggacattattgctgtactgtgattctgtcgtcagctcacagtggccgtgctctgcagtggggcccctgggagcaggtgccacctccttcctctcccggggcaggcactcgcctgtccacttctgagtccaggtgttgggatcgaggtgttaactgtgattccatccagcgagtgcccacccaatgtcagagcagcccgagggccagcctgagcccctgaccccacttccttctgggccccgggctcctcccacaagccacgttgatcttcacaacgaccctgggccgctggggtcacccaagagaagcagccctgagacccagccaggctgggcctagctccacggcacgggtgtctcccagccactgcccttgctggaggaccgctgtgagtcactggccaggagcccagggtgtcctgagtctcatagccaccctgccagctgcagcaggtcctgggcctgcttccctgcgggttctggccctgggggagggggcgttagtgcggcggagggtcttgccaaaggcttttcatcctaaatagcaacttgagtggaaacctgggcaaggcggcccagaggctgggccctgcacataaagctttcgtgtgtgtctggccgtctgaatggtgcctctgtgagcggctccgtcccggggccccggaagctggggagggatgggtaccggcgaccccgggaaccctgctcagtcctgccgggcactgcatgcagggaccgtccgcctgacccagagacctggggctgcctcaccctctctccagacccacagccagctttgtttcttgaatgtggaagatgtttcttattccctgaagaaagggggcctgccacacacagcctgggaggcgcctcatccagaaactgggacttggctagcccggcctgggccctagggacttctcactggtcatgcttctgaagctgctcacctggccgagggaggtcccggcagtgtcccagggtggaaggtggggagggggccggctcctgccatcccttcccaccctgcacttctgtgctgcttgcagtcatagctttccttgtccccccagctgggccagggctgtgctccctgaagtggctttgacgtggggccgtcccagctcccgcagcccctgtccaccattgactctccccggtagtggctgctgtggctgccccatcccagctgttgcaccagccacagctcctagtggctcatgggtgcctcctgccccacactggggcctgccataataactggcccaggtaccaatgcccaggttggaccccctgtctggggtgctgtgcaccccctggagcctgccctcccttgggaccagggggagactcctggcctcagccagtgcctccccggcccatctgggtggggtgcccacaaaccctgtgcccccagtttctgctttctggctctgcttccagggatctaacctggggggtctcagcaattctgtggcagcacatagacagcgatgaacctacccgcccacagcccattttgaggaagaggtgatggcggcaggcaatgcaagagctcagtttattaaatgtgtgcgagtcggaca

SEQ ID NO: 282815 - DNA, 563 bp, Homo sapiens
gctgcgtcgtcgacgctgggctttcgggtcccgcgcccaggtgggaagaggccggcgactggggtgaccgcggggaaactgaggcagagagatgggctccaaggcaaagaagcgcgtgctgctgcccacccgcccagcgccccccacggtggagcagatcctggaggatgtgcggggtgcgccggcagaggatccagtgttcaccatcctggccccggaagaaggtagggggagcccggtcccggggaaaagcggacctgagaccccggcagcaaggggacgggagagaagcacacccctaactcctgaccccacgccctgggaacccccgcaacatgggcacggtccgtatcctctccgagtctccctctactcctccgtagagtgggaccgattttcagagggttcttctgacaggggtggaggccgggcgctgtggttcaggcctgtaagcccagcactttcggaggatgaggcgggaggatcgcttgagcccaggagttcgagaccagcctggccaacatggtgaaaccccgtctctgctaaaaatgaaaaaacaaaac

SEQ ID NO: 282816 - DNA, 1087 bp, Homo sapiens
aggagagcccatggtgtagttccagtccaagcccaaaggcatgagaactaggagagctgatggagtaaatttccagctgagtccaggtccgagtctgaaagcaggagaccagtgtcccagctggacacagagcaaattcccccttactcagccaatttgttttattcaatggattggatgaggtccacccacattggagagagcaatctgcttgactcagtctaccgattcacatgttaatctcatccagaaacgacccacagacacaatagaataatgtttaaccaaatgtctcagcaccctgtggcccagtcatgttgacacataaaattatcacaagtactctgctcctgattattttatgtgataaggttattactattttagagttaggagtaccttagggactattggcttagtaactgtcattttgcaaatgaggaaatcaagacccagaaagccttgttagtgaagactggagtccagattcttctttttttttactgcactccagcatgggcaacagagcaagaccctgtctgtctcaaaaggaatgaggctctgaaacaaacagactatggcgtaggtgcaccttgaggatgtcacgctcagtgggagacgccaggcataaaatgacaaatcctgtgtgattccactcctaggatgtccctagctccatcagattcacagagacagaaagtaggatgggggtgggtgccaggggctggggacaggatgagcaggaaatgtttcaccgggacagagtttgaagatgtaaagtggccgggcgtggtggctcgcgcctgtaatcccggcactttgggaggccgaggtgggcggatcacctgaggccaggagtttgagaccagcctgagcaacacggtgaaaccccgtctctactaaaaatacaaaaattagtcaggtgtgggggcgggcacctgtaatcccagctactcggaggtggagtttgcagtgagctgagattgtaccactgcactccagcctgggcaacagagtgagactctgtctcaaaaaaaagttacagcaagacttttctttttgagacagggtctggctctgttgccca

SEQ ID NO: 282817 - DNA, 2230 bp, Homo sapiens
gctgcgtcgtcgacgctgggctttcgggtcccgcgcccagagatgggctccaaggcaaagaagcgcgtgctgctgcccacccgcccagcgccccccacggtggagcagatcctggaggatgtgcggggtgcgccggcagaggatccagtgttcaccatcctggccccggaagaccccccagttcccttcaggatgatggaggatgcggaggccccgggagagcagctctaccagcaaagccgggcctacgtggctgccaaccagcggctgcagcaggcgggcaacgtgctgaggcagaggtgtgagctcctgcagcgagccggcgaggacctggagcgggaggtggcccagatgaagcaggcagcattaccggcagccgaggctgcctcctcaggctgacctctcggggcctgcaggcttgggcagcgcacaaggtggcctgcacccaggctttccctgggggtccgtcggccccagactggcattcacggggtcccagcccacgtgggtgttgacacaggcgcccctcctgatgctggggctgcggttcatccgtcgtctcattcatgccgagttggtgggacccacccagctggctccgtcctgcgtgacctgagggccccactggggttctggaagaggatagggacattattgctgtactgtgattctgtcgtcagctcacagtggccgtgctctgcagtggggcccctgggagcaggtgccacctccttcctctcccggggcaggcactcgcctgtccacttctgagtccaggtgttgggatcgaggtgttaactgtgattccatccagcgagtgcccacccaatgtcagagcagcccgagggccagcctgagcccctgaccccacttccttctgggccccgggctcctcccacaagccacgttgatcttcacaacgaccctgggccgctggggtcacccaagagaagcagccctgagacccagccaggctgggcctagctccacggcacgggtgtctcccagccactgcccttgctggaggaccgctgtgagtcactggccaggagcccagggtgtcctgagtctcatagccaccctgccagctgcagcaggtcctgggcctgcttccctgcgggttctggccctgggggagggggcgttagtgcggcggagggtcttgccaaaggcttttcatcctaaatagcaacttgagtggaaacctgggcaaggcggcccagaggctgggccctgcacataaagctttcgtgtgtgtctggccgtctgaatggtgcctctgtgagcggctccgtcccggggccccggaagctggggagggatgggtaccggcgaccccgggaaccctgctcagtcctgccgggcactgcatgcagggaccgtccgcctgacccagagacctggggctgcctcaccctctctccagacccacagccagctttgtttcttgaatgtggaagatgtttcttattccctgaagaaagggggcctgccacacacagcctgggaggcgcctcatccagaaactgggacttggctagcccggcctgggccctagggacttctcactggtcatgcttctgaagctgctcacctggccgagggaggtcccggcagtgtcccagggtggaaggtggggagggggccggctcctgccatcccttcccaccctgcacttctgtgctgcttgcagtcatagctttccttgtccccccagctgggccagggctgtgctccctgaagtggctttgacgtggggccgtcccagctcccgcagcccctgtccaccattgactctccccggtagtggctgctgtggctgccccatcccagctgttgcaccagccacagctcctagtggctcatgggtgcctcctgccccacactggggcctgccataataactggcccaggtaccaatgcccaggttggaccccctgtctggggtgctgtgcaccccctggagcctgccctcccttgggaccagggggagactcctggcctcagccagtgcctccccggcccatctgggtggggtgcccacaaaccctgtgcccccagtttctgctttctggctctgcttccagggatctaacctggggggtctcagcaattctgtggcagcacatagacagcgatgaacctacccgcccacagcccattttgaggaagaggtgatggcggcaggcaatgcaagagctcagtttattaaatgtgtgcgagtcggaca

SEQ ID NO: 282818 - DNA, 757 bp, Homo sapiens
gctgcgtcgtcgacgctgggctttcgggtcccgcgcccagagatgggctccaaggcaaagaagcgcgtgctgctgcccacccgcccagcgccccccacggtggagcagatcctggaggatgtgcggggtgcgccggcagaggatccagtgttcaccatcctggccccggaagactgcactccagcatgggcaacagagcaagaccctgtctgtctcaaaaggaatgaggctctgaaacaaacagactatggcgtaggtgcaccttgaggatgtcacgctcagtgggagacgccaggcataaaatgacaaatcctgtgtgattccactcctaggatgtccctagctccatcagattcacagagacagaaagtaggatgggggtgggtgccaggggctggggacaggatgagcaggaaatgtttcaccgggacagagtttgaagatgtaaagtggccgggcgtggtggctcgcgcctgtaatcccggcactttgggaggccgaggtgggcggatcacctgaggccaggagtttgagaccagcctgagcaacacggtgaaaccccgtctctactaaaaatacaaaaattagtcaggtgtgggggcgggcacctgtaatcccagctactcggaggtggagtttgcagtgagctgagattgtaccactgcactccagcctgggcaacagagtgagactctgtctcaaaaaaaagttacagcaagacttttctttttgagacagggtctggctctgttgccca

SEQ ID NO: 282819 - DNA, 2300 bp, Homo sapiens
ccgggagcgggaccgcgacgggtgcgtacgagttcgctgggcgggaggagcagcccgggcaagggcggagaggtggacgccccggtcagcgcccccttccccgccttcagagatgggctccaaggcaaagaagcgcgtgctgctgcccacccgcccagcgccccccacggtggagcagatcctggaggatgtgcggggtgcgccggcagaggatccagtgttcaccatcctggccccggaagaccccccagttcccttcaggatgatggaggatgcggaggccccgggagagcagctctaccagcaaagccgggcctacgtggctgccaaccagcggctgcagcaggcgggcaacgtgctgaggcagaggtgtgagctcctgcagcgagccggcgaggacctggagcgggaggtggcccagatgaagcaggcagcattaccggcagccgaggctgcctcctcaggctgacctctcggggcctgcaggcttgggcagcgcacaaggtggcctgcacccaggctttccctgggggtccgtcggccccagactggcattcacggggtcccagcccacgtgggtgttgacacaggcgcccctcctgatgctggggctgcggttcatccgtcgtctcattcatgccgagttggtgggacccacccagctggctccgtcctgcgtgacctgagggccccactggggttctggaagaggatagggacattattgctgtactgtgattctgtcgtcagctcacagtggccgtgctctgcagtggggcccctgggagcaggtgccacctccttcctctcccggggcaggcactcgcctgtccacttctgagtccaggtgttgggatcgaggtgttaactgtgattccatccagcgagtgcccacccaatgtcagagcagcccgagggccagcctgagcccctgaccccacttccttctgggccccgggctcctcccacaagccacgttgatcttcacaacgaccctgggccgctggggtcacccaagagaagcagccctgagacccagccaggctgggcctagctccacggcacgggtgtctcccagccactgcccttgctggaggaccgctgtgagtcactggccaggagcccagggtgtcctgagtctcatagccaccctgccagctgcagcaggtcctgggcctgcttccctgcgggttctggccctgggggagggggcgttagtgcggcggagggtcttgccaaaggcttttcatcctaaatagcaacttgagtggaaacctgggcaaggcggcccagaggctgggccctgcacataaagctttcgtgtgtgtctggccgtctgaatggtgcctctgtgagcggctccgtcccggggccccggaagctggggagggatgggtaccggcgaccccgggaaccctgctcagtcctgccgggcactgcatgcagggaccgtccgcctgacccagagacctggggctgcctcaccctctctccagacccacagccagctttgtttcttgaatgtggaagatgtttcttattccctgaagaaagggggcctgccacacacagcctgggaggcgcctcatccagaaactgggacttggctagcccggcctgggccctagggacttctcactggtcatgcttctgaagctgctcacctggccgagggaggtcccggcagtgtcccagggtggaaggtggggagggggccggctcctgccatcccttcccaccctgcacttctgtgctgcttgcagtcatagctttccttgtccccccagctgggccagggctgtgctccctgaagtggctttgacgtggggccgtcccagctcccgcagcccctgtccaccattgactctccccggtagtggctgctgtggctgccccatcccagctgttgcaccagccacagctcctagtggctcatgggtgcctcctgccccacactggggcctgccataataactggcccaggtaccaatgcccaggttggaccccctgtctggggtgctgtgcaccccctggagcctgccctcccttgggaccagggggagactcctggcctcagccagtgcctccccggcccatctgggtggggtgcccacaaaccctgtgcccccagtttctgctttctggctctgcttccagggatctaacctggggggtctcagcaattctgtggcagcacatagacagcgatgaacctacccgcccacagcccattttgaggaagaggtgatggcggcaggcaatgcaagagctcagtttattaaatgtgtgcgagtcggaca

SEQ ID NO: 282820 - DNA, 527 bp, Homo sapiens
agcaatcttcccatctgacagagaatcaacaagatcctgaaattctgcaggaacatctgcttgcttccagcgctcattgtctaagaggaggctagtccacagtaaggagaaaagaagtcatgggcaaccacaactgcagacctcaatctactatacacatcaaggaattaaactttttactgtaaatgtcatgacttctctctgcttcttgggagtacttccagcatcaccagtgaacttagtatgggtcccatggtgttatttaaggtgtatagtatgtattaaagacaataaaaaccatgcaaaaactataagagatcaccttttactgtgatactcaatttactggagagaggaactgctcaaacatagatgactagcatcacttcagctcaccacagtagcaacaggaggtggttatgaaattattacagtggtacaatatgtaccacagttagttttctgcagttatgatttaatactgcatgagtggggccatatacagtctgtgtgcaagtttggataaa

SEQ ID NO: 282821 - DNA, 356 bp, Homo sapiens
agcaatcttcccatctgacagagaatcaacaagatcctgaaattctgcaggaacatctgcttgcttccagcgctcattgtctaagaggaggctagtccacagtaaggagaaaagaagtcatgggcaaccacaactgcagacctcaatctactatacacatcaaggaattaaactttttactgtaaatgtcatgacttctctctgcttcttgggagtacttccagcatcaccagtgaacttagtatgggtcccatggtgttatttaaggtgtatagtatgtattaaagacaataaatagccgcaactggccgcgccctttcctgttcacttcaaccaccagtcgctcgccgcgttac

SEQ ID NO: 282822 - DNA, 655 bp, Homo sapiens
  misc_feature (33)..(33): n is a, c, g, or t
  misc_feature (35)..(35): n is a, c, g, or t
agcagccaatcacaagactcttgcgtagcaccngnaaagaggactagctgcaaagactctcttattattccccgctacaggacacagacagaattatttgttcaactaacattcttcataaaactgatcagacactccgaaggattgtatctcagacaatgaaggaagcaaaagatgaacaagtgcttcctcacaacttgaagcttctagcagaagaacttaacaagctcaaagcagagtttttggaagacctaaaacaaggaaacaaaaaatatctgtgctttcagcaaaccattgacataccagatgtcatttctttttttcattatgagaaagataatattgtacagaagtatttttcaaagcagcattaaaatttctgaactgccaatatgagaacgcatatgggcttccagatgacgctcataagcagatgcaaatggacaaagatgacatcgatgaggtttttcacctgtttcaaaagaaaaatgatggagaaactacaagagtagttcatttatggaaagttttgcttgtccattcattggacaactggaaattgatcaaaaagaaaatgctttcagaaagtcatatttgcatagcatatgagattgttaaaatttgtaaataaacccacaaattgaaataaagctta

SEQ ID NO: 282823 - DNA, 754 bp, Homo sapiens
ggagactatgcgcaggcgcggtgcactgcgcgccggcacgagggtgttttcgacgttggctgtggggaaacagcaagcggcgtggacgaccgttgctgagctggtgtggaacgtctgtgatcagattcgttgggcttttgccagctctttttagattgtcctcttgagacctgtttacagaggaatggccagaggccacaggcactgcctcctgagaccatccacctgatgggaagaaagctagaaaagcccaaccctgagaaaaatgcttgggaacacaacagcctcacaattccgagtccagcatgtgcttcggaggccaggtattccactcaatcatccctccctggatgctcccctgtgccagcctggaagtgactgatttattgctcactgctttggaaaatccagtaaaatatgctgaggacaatatggaacaaaaggacacagacagaattatttgttcaactaacattcttcataaaactgatcagacactccgaaggattgtatctcagacaatgaaggaagcaaaagatgaacaagtgcttcctcacaacttgaagcttctagcagaagaacttaacaagctcaaagcagagtttttggaagacctaaaacaaggaaacaaaaaatatctgtgctttcagcaaaccattgacataccagatgtcatttctttttttcattatgagaaagataatattgtacagaagtatttttcaaagcagcattaaaatttctgaactgccaa

SEQ ID NO: 282824 - DNA, 463 bp, Homo sapiens
aagtccctttcaggttagtcttttctgctcacacgtttcctaacaagttatttaaattctttgacgtgtttcagatgatttttgagtatcacattgagaccttttttctatatattacactaactcaattgtgattgtttatagaatctaactggtttgtttaatcaaattaatttcctaatgtcattagacaccccggattactttaatttacaccagtaatttgagaatatctttttattttagatgaacaagtgcttcctcacaacttgaagcttctagcagaagaacttaacaagctcaaagcagagtttttggaagacctaaaacaaggaaacaaaaaatatctgtgctttcagcaaaccattgacataccagatgtcatttctttttttcattatgagaaagataatattgtacagaagtatttttcaaagcagcattaaaatttctgaactgccaa

SEQ ID NO: 282825 - DNA, 391 bp, Homo sapiens
  misc_feature (33)..(33): n is a, c, g, or t
  misc_feature (35)..(35): n is a, c, g, or t
agcagccaatcacaagactcttgcgtagcaccngnaaagaggactagctgcaaagactctcttattattccccgctacaggacacagacagaattatttgttcaactaacattcttcataaaactgatcagacactccgaaggattgtatctcagacaatgaaggaagcaaaagatgaacaagtgcttcctcacaacttgaagcttctagcagaagaacttaacaagctcaaagcagagtttttggaagacctaaaacaaggaaacaaaaaatatctgtgctttcagcaaaccattgacataccagatgtcatttctttttttcattatgagaaagataatattgtacagaagtatttttcaaagcagcattaaaatttctgaactgccaa

SEQ ID NO: 282826 - DNA, 727 bp, Homo sapiens
aagtccctttcaggttagtcttttctgctcacacgtttcctaacaagttatttaaattctttgacgtgtttcagatgatttttgagtatcacattgagaccttttttctatatattacactaactcaattgtgattgtttatagaatctaactggtttgtttaatcaaattaatttcctaatgtcattagacaccccggattactttaatttacaccagtaatttgagaatatctttttattttagatgaacaagtgcttcctcacaacttgaagcttctagcagaagaacttaacaagctcaaagcagagtttttggaagacctaaaacaaggaaacaaaaaatatctgtgctttcagcaaaccattgacataccagatgtcatttctttttttcattatgagaaagataatattgtacagaagtatttttcaaagcagcattaaaatttctgaactgccaatatgagaacgcatatgggcttccagatgacgctcataagcagatgcaaatggacaaagatgacatcgatgaggtttttcacctgtttcaaaagaaaaatgatggagaaactacaagagtagttcatttatggaaagttttgcttgtccattcattggacaactggaaattgatcaaaaagaaaatgctttcagaaagtcatatttgcatagcatatgagattgttaaaatttgtaaataaacccacaaattgaaataaagctta

SEQ ID NO: 282827 - DNA, 503 bp, Homo sapiens
ggagactatgcgcaggcgcggtgcactgcgcgccggcacgagggtgttttcgacgttggctgtggggaaacagcaagcggcgtggacgaccgttgctgagctggggtggaagggattccccagcatagcacagctgctctacaaaaacatggccagactttttgcaaagatctgtgagagaagtgtgggtttccaatcctgtttctcctttctgggtgggacctcccagctggggtctccagccacccctgccagtcagagttttgaaacctccctgggactaagcttccagaaggaagggcaagctgccatctttgctgtttaggtgacttagccattccagccttcatgccaaccacagggtagaagcggtacccaacaggcccaggtgtggctcatgataccattctggaggttacaaactgtaaactttggtggcatctacatggtactaattctgcaggtacacagaatgtaagaactgtggagacatgtcttccttc

SEQ ID NO: 282828 - DNA, 1590 bp, Homo sapiens
ggtggtcggactgtcagcctcgccttctattctttgatttccagtaacttattttcgaaagattgctggagggaaaggctcaacgtctcttttgggattttcctaagcagaaagacctcatcctaacaaaactgaggcgccaatcctactggctggcaactttcggcagggagggtgattctatttgaagatcaatcctaactctgggaccccttgggaatgtccaggagctaggaacgcagcgccgcggtctctccagcctctggtccctgggagcaagcagggcaccggtggagcaggtgcctctggggccgcacggaaacccagctaggccagttcctccactgcgccggtaggcggcggagacgctgcgcgtgcgcgcagggcagacggtagagcggagacgacgctcccagactcctccggtctccccgggcagcatgaagaccgccgagaacatcagaggaaccggcagcgacgggccgcggaaacgaggcctctgcgtcctctgtggcctccccgcggcaggaaaatcgactttcgcgcgcgccctcgcccaccggctgcagcaggagcagggttgggccatcggtgttgtcgcgtatgatgacgtcatgcccgacgcgtttctcgccggggcaagagcgcgaccggcgccatcccaatggaaattgcttcgacaggaactgttgaagtacctggaatacttcttgatggctgtcattaatgggtgtcagatgtctgtcccacccaacaggactgaagccatgtgggaagattttataacctgcttaaaggatcaagatctgatattttctgcagcatttgaggcccagtcttgctacctcttaacaaaaactgctgtttctagacctttgtttttggttttggatgacaatttttattatcagagtatgagatatgaagtctaccagctggctcggaaatattcgttgggcttttgccagctctttttagattgtcctcttgagacctgtttacagaggaatggccagaggccacaggcactgcctcctgagaccatccacctgatgggaagaaagctagaaaagcccaaccctgagaaaaatgcttgggaacacaacagcctcacaattccgagtccagcatgtgcttcggaggccagcctggaagtgactgatttattgctcactgctttggaaaatccagtaaaatatgctgaggacaatatggaacaaaaggacacagacagaattatttgttcaactaacattcttcataaaactgatcagacactccgaaggattgtatctcagacaatgaaggaagcaaaagatgaacaagtgcttcctcacaacttgaagcttctagcagaagaacttaacaagctcaaagcagagtttttggaagacctaaaacaaggaaacaaaaaatatctgtgctttcagcaaaccattgacataccagatgtcatttctttttttcattatgagaaagataatattgtacagaagtatttttcaaagcagcattaaaatttctgaactgccaaaaaacaagatgcggccgaacctctcccgaatccttccgacgcgcgttaacccacaa

SEQ ID NO: 282829 - DNA, 1941 bp, Homo sapiens
ggtggtcggactgtcagcctcgccttctattctttgatttccagtaacttattttcgaaagattgctggagggaaaggctcaacgtctcttttgggattttcctaagcagaaagacctcatcctaacaaaactgaggcgccaatcctactggctggcaactttcggcagggagggtgattctatttgaagatcaatcctaactctgggaccccttgggaatgtccaggagctaggaacgcagcgccgcggtctctccagcctctggtccctgggagcaagcagggcaccggtggagcaggtgcctctggggccgcacggaaacccagctaggccagttcctccactgcgccggtaggcggcggagacgctgcgcgtgcgcgcagggcagacggtagagcggagacgacgctcccagactcctccggtctccccgggcagcatgaagaccgccgagaacatcagaggaaccggcagcgacgggccgcggaaacgaggcctctgcgtcctctgtggcctccccgcggcaggaaaatcgactttcgcgcgcgccctcgcccaccggctgcagcaggagcagggttgggccatcggtgttgtcgcgtatgatgacgtcatgcccgacgcgtttctcgccggggcaagagcgcgaccggcgccatcccaatggaaattgcttcgacaggaactgttgaagtacctggaatacttcttgatggctgtcattaatgggtgtcagatgtctgtcccacccaacaggactgaagccatgtgggaagattttataacctgcttaaaggatcaagatctgatattttctgcagcatttgaggcccagtcttgctacctcttaacaaaaactgctgtttctagacctttgtttttggttttggatgacaatttttattatcagagtatgagatatgaagtctaccagctggctcggaaatattcgttgggcttttgccagctctttttagattgtcctcttgagacctgtttacagaggaatggccagaggccacaggcactgcctcctgagaccatccacctgatgggaagaaagctagaaaagcccaaccctgagaaaaatgcttgggaacacaacagcctcacaattccgagtccagcatgtgcttcggaggccagcctggaagtgactgatttattgctcactgctttggaaaatccagtaaaatatgctgaggacaatatggaacaaaaggacacagacagaattatttgttcaactaacattcttcataaaactgatcagacactccgaaggattgtatctcagacaatgaaggaagcaaaagatgaacaagtgcttcctcacaacttgaagcttctagcagaagaacttaacaagctcaaagcagagtttttggaagacctaaaacaaggaaacaaaaaatatctgtgctttcagcaaaccattgacataccagatgtcatttctttttttcattatgagaaagataatattgtacagaagtatttttcaaagcagcattaaaatttctgaactgccaaaaagaaactgaagagacctgatgctcataatcaggaaaatcggcaaatggctgggactacaaccctggtctcttgaatcctgtttggaaatctgtgcgttaggagggaaatttccattcctacagcttcatgggaaaaggtctactccatttcaggaggtaacagtcctggcatgcacaattcaagccccctgcttcaccggttcctcactcctcactaggagaagtgattctgctggttgagacaagaccaatatccaagagggctacactgcattcgagggacaaggctcagtgtcttcctctctcccactgctttcccaagccagtcactatcacattttaatgtgtatgtgaattacttgggggatcttattaaaacacagattataattcagtagatctggg

SEQ ID NO: 282830 - DNA, 1798 bp, Homo sapiens
ggtggtcggactgtcagcctcgccttctattctttgatttccagtaacttattttcgaaagattgctggagggaaaggctcaacgtctcttttgggattttcctaagcagaaagacctcatcctaacaaaactgaggcgccaatcctactggctggcaactttcggcagggagggtgattctatttgaagatcaatcctaactctgggaccccttgggaatgtccaggagctaggaacgcagcgccgcggtctctccagcctctggtccctgggagcaagcagggcaccggtggagcaggtgcctctggggccgcacggaaacccagctaggccagttcctccactgcgccggtaggcggcggagacgctgcgcgtgcgcgcagggcagacggtagagcggagacgacgctcccagactcctccggtctccccgggcagcatgaagaccgccgagaacatcagaggaaccggcagcgacgggccgcggaaacgaggcctctgcgtcctctgtggcctccccgcggcaggaaaatcgactttcgcgcgcgccctcgcccaccggctgcagcaggagcagggttgggccatcggtgttgtcgcgtatgatgacgtcatgcccgacgcgtttctcgccggggcaagagcgcgaccggcgccatcccaatggaaattgcttcgacaggaactgttgaagtacctggaatacttcttgatggctgtcattaatgggtgtcagatgtctgtcccacccaacaggactgaagccatgtgggaagattttataacctgcttaaaggatcaagatctgatattttctgcagcatttgaggcccagtcttgctacctcttaacaaaaactgctgtttctagacctttgtttttggttttggatgacaatttttattatcagagtatgagatatgaagtctaccagctggctcggaaatattcgttgggcttttgccagctctttttagattgtcctcttgagacctgtttacagaggaatggccagaggccacaggcactgcctcctgagaccatccacctgatgggaagaaagctagaaaagcccaaccctgagaaaaatgcttgggaacacaacagcctcacaattccgagtccagcatgtgcttcggaggccagcctggaagtgactgatttattgctcactgctttggaaaatccagtaaaatatgctgaggacaatatggaacaaaaggacacagacagaattatttgttcaactaacattcttcataaaactgatcagacactccgaaggattgtatctcagacaatgaaggaagcaaaagatgaacaagtgcttcctcacaacttgaagcttctagcagaagaacttaacaagctcaaagcagagtttttggaagacctaaaacaaggaaacaaaaaatatctgtgctttcagcaaaccattgacataccagatgtcatttctttttttcattatgagaaagataatattgtacagaagtatttttcaaagcagcattaaaatttctgaactgccaatatgagaacgcatatgggcttccagatgacgctcataagcagatgcaaatggacaaagatgacatcgatgaggtttttcacctgtttcaaaagaaaaatgatggagaaactacaagagtagttcatttatggaaagttttgcttgtccattcattggacaactggaaattgatcaaaaagaaaatgctttcagaaagtcatatttgcatagcatatgagattgttaaaatttgtaaataaacccacaaattgaaataaagctta

SEQ ID NO: 282831 - DNA, 1534 bp, Homo sapiens
ggtggtcggactgtcagcctcgccttctattctttgatttccagtaacttattttcgaaagattgctggagggaaaggctcaacgtctcttttgggattttcctaagcagaaagacctcatcctaacaaaactgaggcgccaatcctactggctggcaactttcggcagggagggtgattctatttgaagatcaatcctaactctgggaccccttgggaatgtccaggagctaggaacgcagcgccgcggtctctccagcctctggtccctgggagcaagcagggcaccggtggagcaggtgcctctggggccgcacggaaacccagctaggccagttcctccactgcgccggtaggcggcggagacgctgcgcgtgcgcgcagggcagacggtagagcggagacgacgctcccagactcctccggtctccccgggcagcatgaagaccgccgagaacatcagaggaaccggcagcgacgggccgcggaaacgaggcctctgcgtcctctgtggcctccccgcggcaggaaaatcgactttcgcgcgcgccctcgcccaccggctgcagcaggagcagggttgggccatcggtgttgtcgcgtatgatgacgtcatgcccgacgcgtttctcgccggggcaagagcgcgaccggcgccatcccaatggaaattgcttcgacaggaactgttgaagtacctggaatacttcttgatggctgtcattaatgggtgtcagatgtctgtcccacccaacaggactgaagccatgtgggaagattttataacctgcttaaaggatcaagatctgatattttctgcagcatttgaggcccagtcttgctacctcttaacaaaaactgctgtttctagacctttgtttttggttttggatgacaatttttattatcagagtatgagatatgaagtctaccagctggctcggaaatattcgttgggcttttgccagctctttttagattgtcctcttgagacctgtttacagaggaatggccagaggccacaggcactgcctcctgagaccatccacctgatgggaagaaagctagaaaagcccaaccctgagaaaaatgcttgggaacacaacagcctcacaattccgagtccagcatgtgcttcggaggccagcctggaagtgactgatttattgctcactgctttggaaaatccagtaaaatatgctgaggacaatatggaacaaaaggacacagacagaattatttgttcaactaacattcttcataaaactgatcagacactccgaaggattgtatctcagacaatgaaggaagcaaaagatgaacaagtgcttcctcacaacttgaagcttctagcagaagaacttaacaagctcaaagcagagtttttggaagacctaaaacaaggaaacaaaaaatatctgtgctttcagcaaaccattgacataccagatgtcatttctttttttcattatgagaaagataatattgtacagaagtatttttcaaagcagcattaaaatttctgaactgccaa

SEQ ID NO: 282832 - DNA, 1705 bp, Homo sapiens
ggtggtcggactgtcagcctcgccttctattctttgatttccagtaacttattttcgaaagattgctggagggaaaggctcaacgtctcttttgggattttcctaagcagaaagacctcatcctaacaaaactgaggcgccaatcctactggctggcaactttcggcagggagggtgattctatttgaagatcaatcctaactctgggaccccttgggaatgtccaggagctaggaacgcagcgccgcggtctctccagcctctggtccctgggagcaagcagggcaccggtggagcaggtgcctctggggccgcacggaaacccagctaggccagttcctccactgcgccggtaggcggcggagacgctgcgcgtgcgcgcagggcagacggtagagcggagacgacgctcccagactcctccggtctccccgggcagcatgaagaccgccgagaacatcagaggaaccggcagcgacgggccgcggaaacgaggcctctgcgtcctctgtggcctccccgcggcaggaaaatcgactttcgcgcgcgccctcgcccaccggctgcagcaggagcagggttgggccatcggtgttgtcgcgtatgatgacgtcatgcccgacgcgtttctcgccggggcaagagcgcgaccggcgccatcccaatggaaattgcttcgacaggaactgttgaagtacctggaatacttcttgatggctgtcattaatgggtgtcagatgtctgtcccacccaacaggactgaagccatgtgggaagattttataacctgcttaaaggatcaagatctgatattttctgcagcatttgaggcccagtcttgctacctcttaacaaaaactgctgtttctagacctttgtttttggttttggatgacaatttttattatcagagtatgagatatgaagtctaccagctggctcggaaatattcgttgggcttttgccagctctttttagattgtcctcttgagacctgtttacagaggaatggccagaggccacaggcactgcctcctgagaccatccacctgatgggaagaaagctagaaaagcccaaccctgagaaaaatgcttgggaacacaacagcctcacaattccgagtccagcatgtgcttcggaggccagcctggaagtgactgatttattgctcactgctttggaaaatccagtaaaatatgctgaggacaatatggaacaaaaggacacagacagaattatttgttcaactaacattcttcataaaactgatcagacactccgaaggattgtatctcagacaatgaaggaagcaaaaggtaatcaggaagccttctcagagatgacatttaagcaaagatgggtaagagcgaaccatgcagctatctggaggatcattctaggcaatgaacacatcaagtgcagaagcgcaaaggttggctggttgcagtgttgcagaatcgagaagaggccattgagcacggggtgagatgaacaagtgcttcctcacaacttgaagcttctagcagaagaacttaacaagctcaaagcagagtttttggaagacctaaaacaaggaaacaaaaaatatctgtgctttcagcaaaccattgacataccagatgtcatttctttttttcattatgagaaagataatattgtacagaagtatttttcaaagcagcattaaaatttctgaactgccaa

SEQ ID NO: 282833 - DNA, 894 bp, Homo sapiens
aacctctctttccagccctgaccagagctccagacctctgggtccaactgccttatggatccctctccctgaatgtcacataggagaggggacaggggttggccacacacctggaaatggagttctctgatgcaatgtcctttggggtccggactgtggtgaaggttcgtccagctccacgcccacccactggccgctggcaaactccgtggtcccacagaaccgcagtgtgcccgtctggggagagaagggaggcgatggctaaggaaggaatgctgggaggccaacgtggagtgcccacacacgggcagcaagaaaagaagagagggcaatgcaaccatggaggcagagactggagagatgtggccacaagccaagcactgcctgcagccaccaggaaccggaacaggcaaagaagagattctcccccagaacctccagaggagtacagccctgccgacaccttggttttggcccaggaaagccgatttggactcctggcctctagaactgttagaaaataatttgtcttgttttaagccaccaagtttgttagagcagcatgggaaactaatagtgtaataaagggagaaataagaatgtctttcacatttgctggtatttatataaagaaactatggtaatgtggtttggctctgtgtccccacccaaatctcatcttgaactgtaatccccatgtgtcaagggagggacatgatgggaggtgactggatcatgggggatgtttcccccatgctgttcccatgatagtgagtgagttctcatgagatctgatggtttaaaagtggcagttcccctcttgctctctctctctcctgcccccatgtaagatgtttgcttttcctttgccttgcaccatgattgtaagtttcc

SEQ ID NO: 282834 - DNA, 768 bp, Homo sapiens
cggcctcccaatgtgctgaaattacaggcgtgaaccactgtgccaggcctgaatattaccttatatgacaaaagatgtgattaagttaaggatcttgagatggggagattatcctgggtcatccgggttggccctaaatgccactacaagtatccttttaataagagggaggagaatatattaccacagaaaagaagagagggcaatgcaaccatggaggcagagactggagagatgtggccacaagccaagcactgcctgcagccaccaggaaccggaacaggcaaagaagagattctcccccagaacctccagaggagtacagccctgccgacaccttggttttggcccaggaaagccgatttggactcctggcctctagaactgttagaaaataatttgtcttgttttaagccaccaagtttgttagagcagcatgggaaactaatagtgtaataaagggagaaataagaatgtctttcacatttgctggtatttatataaagaaactatggtaatgtggtttggctctgtgtccccacccaaatctcatcttgaactgtaatccccatgtgtcaagggagggacatgatgggaggtgactggatcatgggggatgtttcccccatgctgttcccatgatagtgagtgagttctcatgagatctgatggtttaaaagtggcagttcccctcttgctctctctctctcctgcccccatgtaagatgtttgcttttcctttgccttgcaccatgattgtaagtttcc

SEQ ID NO: 282835 - DNA, 375 bp, Homo sapiens
tggccctgggaggctacagggactcaaggacttcatcatcaaagtcctgtgccggctagcttccagttgtattgagtcaatggagaatctggcagattggaggaaggagaaggtcatgatcatctggcaattaaagaaatggccagactgcctcccactctgaggacccttggctacctgacacgtaattccagagaccacagtagtcagtgctggcaagattccagagcccagaagaaggagcaatcttttgaaaatctccttggaaggcacactcaattcaaagatgaccatgggaatgattgacctagcttccaagagattcatttgatgtttagttacaggatatccatcgatgacaacactaacaaggaa

SEQ ID NO: 282836 - DNA, 5787 bp, Homo sapiens
  misc_feature (591)..(591): n is a, c, g, or t
  misc_feature (824)..(824): n is a, c, g, or t
ttcctccgcgaaggctcctttgatattaatagtgttggtgtcttgaaactgacgtaatgcgcggagactgaggtcctgacaagcgataacatttctgataaagacccgatcttactgcaatctctagcgtcctcttttttggtgctgctggtttctccagacctcgcgtcctctcgattgctctctcgccttcctatttcttttttttttttttaaacaaaaaacaacaccccctcccctctcccacccggcaccgggcacatccttgctctatttcctttctctttctctctctctctctctcttttttaataagggtgggggagggaaaggggggggaggcaggaaagacctttttctctcccccccgcaataatccaagatcaactctgcaaacaacagaagacggttcatggctttggccgccgcgccaccatctttcgggctgccgagggtgttcttgacgattaatcaacagatatggtccggaaaaagaacccccctctgagaaacgttgcaagtgaaggcgagggccagatcctggagcctataggtacagaaagcaaggtatctggaaagaacaaagaattntctgcagatcagatgtcagaaaatacggatcagagtgatgctgcagaactaaatcataaggaggaacatagcttgcatgttcaagatccatcttctagcagtaagaaggacttgaaaagcgcagttctgagtgagaaggctggcttcaattatgaaagccccagtaagggaggaaactttccctcctttccgcatgatgaggtgacagacagaaatatgttggctttctcatntccagctgctgggggagtctgtgagcccttgaagtctccgcaaagagcagaggcagatgaccctcaagatatggcctgcaccccctcaggggactcactggagacaaaggaagatcagaagatgtcaccaaaggctacagaggaaacagggcaagcacagagtggtcaagccaattgtcaaggtttgagcccagtttcagtggcctcaaaaaacccacaagtgccttcagatgggggtgtaagactgaataaatccaaaactgacttactggtgaatgacaacccagacccggcacctctgtctccagagcttcaggactttaaatgcaatatctgtggatatggttactacggcaacgaccccacagatctgattaagcacttccgaaagtatcacttaggactgcataaccgcaccaggcaagatgctgagctggacagcaaaatcttggcccttcataacatggtgcagttcagccattccaaagacttccagaaggtcaaccgttctgtgttttctggtgtgctgcaggacatcaattcttcaaggcctgttttactaaatgggacctatgatgtgcaggtgacttcaggtggaacattcattggcattggacggaaaacaccagattgccaagggaacaccaagtatttccgctgtaaattctgcaatttcacttatatgggcaactcatccaccgaattagaacaacattttcttcagactcacccaaacaaaataaaagcttctctcccctcctctgaggttgcaaaaccttcagagaaaaactctaacaagtccatccctgcacttcaatccagtgattctggagacttgggaaaatggcaggacaagataacagtcaaagcaggagatgacactcctgttgggtactcagtgcccataaagcccctcgattcctctagacaaaatggtacagaggccaccagttactactggtgtaaattttgtagtttcagctgtgagtcatctagctcacttaaactgctagaacattatggcaagcagcacggagcagtgcagtcaggcggccttaatccagagttaaatgataagctttccaggggctctgtcattaatcagaatgatctagccaaaagttcagaaggagagacaatgaccaagacagacaagagctcgagtggggctaaaaagaaggacttctccagcaagggagccgaggataatatggtaacgagctataattgtcagttctgtgacttccgatattccaaaagccatggccctgatgtaattgtagtggggccacttctccgtcattatcaacagctccataacattcacaagtgtaccattaaacactgtccattctgtcccagaggactttgcagcccagaaaagcaccttggagaaattacttatccgtttgcttgtagaaaaagtaattgttcccactgtgcactcttgcttctgcacttgtctcctggggcggctggaagctcgcgagtcaaacatcagtgccatcagtgttcattcaccacccctgacgtagatgtactcctctttcactatgaaagtgtgcatgagtcccaagcatcggatgtcaaacaagaagcaaatcacctgcaaggatcggatgggcagcagtctgtcaaggaaagcaaagaacactcatgtaccaaatgtgattttattacccaagtggaagaagagatttcccgacactacaggagagcacacagctgctacaaatgccgtcagtgcagttttacagctgccgatactcagtcactactggagcacttcaacactgttcactgccaggaacaggacatcactacagccaacggcgaagaggacggtcatgccatatccaccatcaaagaggagcccaaaattgacttcagggtctacaatctgctaactccagactctaaaatgggagagccagtttctgagagtgtggtgaagagagagaagctggaagagaaggacgggctcaaagagaaagtttggaccgagagttccagtgatgaccttcgcaatgtgacttggagaggggcagacatcctgcgggggagtccgtcatacacccaagcaagcctggggctgctgacgcctgtgtctggcacccaagagcagacaaagactctaagggatagtcccaatgtggaggccgcccatctggcgcgacctatttatggcttggctgtggaaaccaagggattcctgcagggggcgccagctggcggagagaagtctggggccctcccccagcagtatcctgcatcgggagaaaacaagtccaaggatgaatcccagtccctgttacggaggcgtagaggctccggtgttttttgtgccaattgcctgaccacaaagacctctctctggcgaaagaatgcaaatggcggatatgtatgcaacgcgtgtggcctctaccagaagcttcactcgactcccaggcctttaaacatcattaaacaaaacaacggtgagcagattattaggaggagaacaagaaagcgccttaacccagaggcacttcaggctgagcagctcaacaaacagcagaggggcagcaatgaggagcaagtcaatggaagcccgttagagaggaggtcagaagatcatctaactgaaagtcaccagagagaaattccactccccagcctaagtaaatacgaagcccagggttcattgactaaaagccattctgctcagcagccagtcctggtcagccaaactctggatattcacaaaaggatgcaacctttgcacattcagataaaaagtcctcaggaaagtactggagatccaggaaatagttcatccgtatctgaagggaaaggaagttctgagagaggcagtcctatagaaaagtacatgagacctgcgaaacacccaaattattcaccaccaggcagccctattgaaaagtaccagtacccactttttggacttccctttgtacataatgacttccagagtgaagctgattggctgcggttctggagtaaatataagctctccgttcctgggaatccgcactacttgagtcacgtgcctggcctaccaaatccttgccaaaactatgtgccttatcccaccttcaatctgcctcctcatttttcagctgttggatcagacaatgacattcctctagatttggcgatcaagcattccagacctgggccaactgcaaacggtgcctccaaggagaaaacgaaggcaccaccaaatgtaaaaaatgaaggtcccttgaatgtagtaaaaacagagaaagttgatagaagtactcaagatgaactttcaacaaaatgtgtgcactgtggcattgtctttctggatgaagtgatgtatgctttgcatatgagttgccatggtgacagtggacctttccagtgcagcatatgccagcatctttgcacggacaaatatgacttcacaacacatatccagaggggcctgcataggaacaatgcacaagtggaaaaaaatggaaaacctaaagagtaaaaccttagcacttagcacaattaaatagaaataggttttcttgatgggaattcaatagcttgtaatgtcttatgaagacctattaaaaaaatacttcatagagcctgccttatccaacatgaaattcccttcttttgttattctttcttttgatgagtaggttaccaagattaaaaagtgagataaatggtcaatgagaaagaatggaagatggtaaacaatcactttttaaaacctgttaagtcaaaaccatcttggctaatatgtactggggaaataatccataagagatatcaccagactagaattaatatatttataaagaaagagaccaaaactgtctagaatttgaaagggtttacatattattatactaaagcagtactggactggccattggaccatttgttccaaaacccataaattgttgcctaaatttataatgatcatgaaaccctaggcagaggaggagaaattgaaggtccagggcaatgaaagaaaaatggcgccctctcaatttagtcttctctcattggccatgtttcagattttgacctagaaatgcgagctgtggttaggcttggttagagtgcagcaagcaacatgacagatggtggcacgctgtttttacccagccctgcctgtacatacacatgcacaccctctctgatatttttgtcctttagatgttcaaatactcagtagtccttttgtttgcggtttagattcattttgtccacacatgtacccattttaaaaaacaatgtcctcgatgcttctgtagtgatttcattttagccaggtatttctttcttgtgtgtgatgaaccagtatggatttgcttttctaagcctcctgttggttactaatctcacttggcacattataactaaaggaatcccctcaattcaaaagcatagatggatacaaatgtcagaccgtgggtttaatttgtttagaacacatggcatttcttcacaaggtaacctgctgtatttatttattttcttttggttaaatataatttccaaactttgtggtcaggcagcgtctaaggttacgttaccacagactgacagttggtatatgtaccagccaatcccttcattaaatgtatacagatttagttaagtagcattaaataggattcttagaagtatgtcctcatagaacttttaatacttaaggctttgtaaaaactatccatgaagggaaagctcctcagcataactgctcagggaaatagggctaaataactgaacattaaataattggttaaaggtgctgttagtcgagcctcaatgcttgctacaaggatgtatgtacaaggactgactttaataatttgcattatattgtcccaaccagtagtttattttttgccacggagatgtagaagatattacaagctactggatgcactgtcagattaacttatttcattaaagaagttgggagaac

SEQ ID NO: 282837 - DNA, 3384 bp, Homo sapiens
tagaggatcccctgtcctactagtccaaacaacaatatttaattttcttagtaaaaagaataacagaatgcatcgtggcaatccttaagcaacattatctatgtggactgcttaaatcagcaaaacaccagaagtttggttaacttgggcaatatgacaagtattactttttgggcaaaactactcattaagcaatttctctagtgtgtcggacacaaataggttctttatttttggcatgtatgcctttttattttcattcaattttttttttttctcagacagacatagtagtaacgactagcattggaaaatacatatcactattcttggaatatttatggtcagtctactttttagtagaatatttttggatagcgttgacacgatagatcttattccatacttctttattattgataattttattttcattttttgctttcattattatacatattttggtggagaagaggttgggcttttttgaaagagacaaaaatttattataacactaaacactccttttttgacatattaaagcctttattccatctctcaagatatattataaaatttatttttttaatttaagatttctgaattattttatcttaaattgtgattttaaacgagctattatggtacggaactttttttaatgaggaatttcatgatgatttaggaattttctctcttggaaaaggcttcccctgtgatgaaaatgatgtgccagctaaaattgtgtgccatttaaaaactgaaaatattttaaaattatttgtctatattctaaattgagctttggatcaaactttaggccaggaccagctcatgcgttctcattcttccttttctcactctttctctcatcactcacctctgtattcattctgttgtttgggatagaaaaatcataaagagccaacccatctcagaacgttgtggattgagagagacactacatgactccaagtatatgagaaaaggacagagctctaattgataactctgtagttcaaaaggaaaagagtatgcccaattctctctacatgacatattgagattttttttaatcaacttttaagatagtgatgttctgttctaaactgttctgttttagtgaaggtagatttttataaaacaagcatggggattcttttctaaggtaatattaatgagaagggaaaaaagtatctttaacagctctttgttgaagcctgtggtagcacattatgtttataattgcacatgtgcacataatctattatgatccaatgcaaatacagctccaaaaatattaaatgtatatatattttaaaatgcctgaggaaatacatttttcttaataaactgaagagtctcagtatggctattaaaataattattagcctcctgttgtgtggctgcaaaacatcacaaagtgaccggtcttgagacctgtgaactgctgccctgtttagtaaataaaattaatgcatttctagagggggaatatctgccatccagtggtggaaatgtggagtaaagaagctggtggtctgcttctgtgctgtatgccagccttttgccttaagttgagaggaggtcaactttagctactgtctttggtttgagagccatggcaaaaaaaaaaaaagaaaaaaaagatcaagtcgtctttggtgagccagtaaggtgaaagcttgctgactgtccaaggcacaagagaaaattgaggaattgaaatgcaacctgagtatcaaactaaatattctaatcaaaggtaggtactgttaggtggaattctatcagcaggcaactgcaaatgagaagaagatagaaggacgcccgtcgggactttggagggcattgttattttcccaaagaaagacggccaagggcagaggcatggattctttgcagagcacttccttttggtttttcagtactgtttcatagacagtgggctcacatgttcctgatagtgctgcagttgcttagaaagcatcccagttaattgcagtaattagaacttctggaatatgctagggcagaagtatgtcaagtatgtcacatgaagaaaatgtgaaattcaagagtaatccacacgtgagaaactagacaatgtacattcatgtgttctcttgaaaggaaagggagagctgtaagcttcactctgtcctacaccggagaaaagcaggaataactttaccgtggaaataatgtttagcttttatcagagaaaattgtccttctagagcatagagtcccaaaactcaattctggttttcccctgttttttttttttttttttttcccaacatatgaactgcagcatatcactttttctttttgtgcctcaggttcctcacctgtaaaattgaaaaatatatgtattaataatattattaataataataatggtaatgtagtacttgtttgtaaagcactttgagatccttggttgaaaggcaccataggagtgccaagtattattatgtggccaagggggttatttaaactgtcagttcccaaaggccaggaaaggttggggtcatttttcttaaagacgagctgtaaatatcaactaggcagccaatagtgttgactatgaagatgcaaaactattactaggctgataaaatcatagtttcttaatggctaccaataaggcaaatatcacaataataaacgccaaattccttagggcggactatttgacaaccacatggaaaactttgggggaggcatgaggggggaacatctcaaaatgccaatgtaaaatttaacttacagcaatattcaccagcagaaaatgtctttcatatggaatgatttcatgttgctaagaaaaagaattcaatttgtagtcctgatttgaatactagaatgttggctataatagttctgttcttacaacacatgaaattttttcgttttattttattttgttttcatagtgcatgttcatttctactcacaaacatgttcttggtgtatttcttatgcaaacaatcttcaggcagcaaagatgtctgttacatctaaacttgaataataaagttttaccaccagttacacataacggcgttggtatggtttatatggattcactttcatccttctagcaataggaaatacagatcattgtaatatatatatatatatatatatatatatatatatatatatatatatatatacaggctctgctgaattgaaatggtgaaatcaaatcaccattctaaaaaattattacttatattgataaagcctggactctctcaacttgttgtgctttgattttttttcttaaacaaacactctctcactgatatattttgtgtaaaaagatatatactactttctccagagagataacataaaaatgtgtttatttca

SEQ ID NO: 282838 - DNA, 3384 bp, Homo sapiens
atcctcctgtaatccaagcagtcgccaaacaacaatatttaattttcttagtaaaaagaataacagaatgcatcgtggcaatccttaagcaacattatctatgtggactgcttaaatcagcaaaacaccagaagtttggttaacttgggcaatatgacaagtattactttttgggcaaaactactcattaagcaatttctctagtgtgtcggacacaaataggttctttatttttggcatgtatgcctttttattttcattcaattttttttttttctcagacagacatagtagtaacgactagcattggaaaatacatatcactattcttggaatatttatggtcagtctactttttagtagaatatttttggatagcgttgacacgatagatcttattccatacttctttattattgataattttattttcattttttgctttcattattatacatattttggtggagaagaggttgggcttttttgaaagagacaaaaatttattataacactaaacactccttttttgacatattaaagcctttattccatctctcaagatatattataaaatttatttttttaatttaagatttctgaattattttatcttaaattgtgattttaaacgagctattatggtacggaactttttttaatgaggaatttcatgatgatttaggaattttctctcttggaaaaggcttcccctgtgatgaaaatgatgtgccagctaaaattgtgtgccatttaaaaactgaaaatattttaaaattatttgtctatattctaaattgagctttggatcaaactttaggccaggaccagctcatgcgttctcattcttccttttctcactctttctctcatcactcacctctgtattcattctgttgtttgggatagaaaaatcataaagagccaacccatctcagaacgttgtggattgagagagacactacatgactccaagtatatgagaaaaggacagagctctaattgataactctgtagttcaaaaggaaaagagtatgcccaattctctctacatgacatattgagattttttttaatcaacttttaagatagtgatgttctgttctaaactgttctgttttagtgaaggtagatttttataaaacaagcatggggattcttttctaaggtaatattaatgagaagggaaaaaagtatctttaacagctctttgttgaagcctgtggtagcacattatgtttataattgcacatgtgcacataatctattatgatccaatgcaaatacagctccaaaaatattaaatgtatatatattttaaaatgcctgaggaaatacatttttcttaataaactgaagagtctcagtatggctattaaaataattattagcctcctgttgtgtggctgcaaaacatcacaaagtgaccggtcttgagacctgtgaactgctgccctgtttagtaaataaaattaatgcatttctagagggggaatatctgccatccagtggtggaaatgtggagtaaagaagctggtggtctgcttctgtgctgtatgccagccttttgccttaagttgagaggaggtcaactttagctactgtctttggtttgagagccatggcaaaaaaaaaaaaagaaaaaaaagatcaagtcgtctttggtgagccagtaaggtgaaagcttgctgactgtccaaggcacaagagaaaattgaggaattgaaatgcaacctgagtatcaaactaaatattctaatcaaaggtaggtactgttaggtggaattctatcagcaggcaactgcaaatgagaagaagatagaaggacgcccgtcgggactttggagggcattgttattttcccaaagaaagacggccaagggcagaggcatggattctttgcagagcacttccttttggtttttcagtactgtttcatagacagtgggctcacatgttcctgatagtgctgcagttgcttagaaagcatcccagttaattgcagtaattagaacttctggaatatgctagggcagaagtatgtcaagtatgtcacatgaagaaaatgtgaaattcaagagtaatccacacgtgagaaactagacaatgtacattcatgtgttctcttgaaaggaaagggagagctgtaagcttcactctgtcctacaccggagaaaagcaggaataactttaccgtggaaataatgtttagcttttatcagagaaaattgtccttctagagcatagagtcccaaaactcaattctggttttcccctgttttttttttttttttttttcccaacatatgaactgcagcatatcactttttctttttgtgcctcaggttcctcacctgtaaaattgaaaaatatatgtattaataatattattaataataataatggtaatgtagtacttgtttgtaaagcactttgagatccttggttgaaaggcaccataggagtgccaagtattattatgtggccaagggggttatttaaactgtcagttcccaaaggccaggaaaggttggggtcatttttcttaaagacgagctgtaaatatcaactaggcagccaatagtgttgactatgaagatgcaaaactattactaggctgataaaatcatagtttcttaatggctaccaataaggcaaatatcacaataataaacgccaaattccttagggcggactatttgacaaccacatggaaaactttgggggaggcatgaggggggaacatctcaaaatgccaatgtaaaatttaacttacagcaatattcaccagcagaaaatgtctttcatatggaatgatttcatgttgctaagaaaaagaattcaatttgtagtcctgatttgaatactagaatgttggctataatagttctgttcttacaacacatgaaattttttcgttttattttattttgttttcatagtgcatgttcatttctactcacaaacatgttcttggtgtatttcttatgcaaacaatcttcaggcagcaaagatgtctgttacatctaaacttgaataataaagttttaccaccagttacacataacggcgttggtatggtttatatggattcactttcatccttctagcaataggaaatacagatcattgtaatatatatatatatatatatatatatatatatatatatatatatatatatacaggctctgctgaattgaaatggtgaaatcaaatcaccattctaaaaaattattacttatattgataaagcctggactctctcaacttgttgtgctttgattttttttcttaaacaaacactctctcactgatatattttgtgtaaaaagatatatactactttctccagagagataacataaaaatgtgtttatttca

SEQ ID NO: 282839 - DNA, 8325 bp, Homo sapiens
aatgaagaacagctggaagatatgagacaggaacttgtacgacaataccaagaacatcaacaggcaacggaattgttaaggcaagcacatatgcggcagcagaaggagagacaatgaccaagacagacaagagctcgagtggggctaaaaagaaggacttctccagcaagggagccgaggataatatggtaacgagctataattgtcagttctgtgacttccgatattccaaaagccatggccctgatgtaattgtagtggggccacttctccgtcattatcaacagctccataacattcacaagtgtaccattaaacactgtccattctgtcccagaggactttgcagcccagaaaagcaccttggagaaattacttatccgtttgcttgtagaaaaagtaattgttcccactgtgcactcttgcttctgcacttgtctcctggggcggctggaagctcgcgagtcaaacatcagtgccatcagtgttcattcaccacccctgacgtagatgtactcctctttcactatgaaagtgtgcatgagtcccaagcatcggatgtcaaacaagaagcaaatcacctgcaaggatcggatgggcagcagtctgtcaaggaaagcaaagaacactcatgtaccaaatgtgattttattacccaagtggaagaagagatttcccgacactacaggagagcacacagctgctacaaatgccgtcagtgcagttttacagctgccgatactcagtcactactggagcacttcaacactgttcactgccaggaacaggacatcactacagccaacggcgaagaggacggtcatgccatatccaccatcaaagaggagcccaaaattgacttcagggtctacaatctgctaactccagactctaaaatgggagagccagtttctgagagtgtggtgaagagagagaagctggaagagaaggacgggctcaaagagaaagtttggaccgagagttccagtgatgaccttcgcaatgtgacttggagaggggcagacatcctgcgggggagtccgtcatacacccaagcaagcctggggctgctgacgcctgtgtctggcacccaagagcagacaaagactctaagggatagtcccaatgtggaggccgcccatctggcgcgacctatttatggcttggctgtggaaaccaagggattcctgcagggggcgccagctggcggagagaagtctggggccctcccccagcagtatcctgcatcgggagaaaacaagtccaaggatgaatcccagtccctgttacggaggcgtagaggctccggtgttttttgtgccaattgcctgaccacaaagacctctctctggcgaaagaatgcaaatggcggatatgtatgcaacgcgtgtggcctctaccagaagcttcactcgactcccaggcctttaaacatcattaaacaaaacaacggtgagcagattattaggaggagaacaagaaagcgccttaacccagaggcacttcaggctgagcagctcaacaaacagcagaggggcagcaatgaggagcaagtcaatggaagcccgttagagaggaggtcagaagatcatctaactgaaagtcaccagagagaaattccactccccagcctaagtaaatacgaagcccagggttcattgactaaaagccattctgctcagcagccagtcctggtcagccaaactctggatattcacaaaaggatgcaacctttgcacattcagataaaaagtcctcaggaaagtactggagatccaggaaatagttcatccgtatctgaagggaaaggaagttctgagagaggcagtcctatagaaaagtacatgagacctgcgaaacacccaaattattcaccaccaggcagccctattgaaaagtaccagtacccactttttggacttccctttgtacataatgacttccagagtgaagctgattggctgcggttctggagtaaatataagctctccgttcctgggaatccgcactacttgagtcacgtgcctggcctaccaaatccttgccaaaactatgtgccttatcccaccttcaatctgcctcctcatttttcagctgttggatcagacaatgacattcctctagatttggcgatcaagcattccagacctgggccaactgcaaacggtgcctccaaggagaaaacgaaggcaccaccaaatgtaaaaaatgaaggtcccttgaatgtagtaaaaacagagaaagttgatagaagtactcaagatgaactttcaacaaaatgtgtgcactgtggcattgtctttctggatgaagtgatgtatgctttgcatatgagttgccatggtgacagtggacctttccagtgcagcatatgccagcatctttgcacggacaaatatgacttcacaacacatatccagaggggcctgcataggaacaatgcacaagtggaaaaaaatggaaaacctaaagagtaaaaccttagcacttagcacaattaaatagaaataggttttcttgatgggaattcaatagcttgtaatgtcttatgaagacctattaaaaaaatacttcatagagcctgccttatccaacatgaaattcccttcttttgttattctttcttttgatgagtaggttaccaagattaaaaagtgagataaatggtcaatgagaaagaatggaagatggtaaacaatcactttttaaaacctgttaagtcaaaaccatcttggctaatatgtactggggaaataatccataagagatatcaccagactagaattaatatatttataaagaaagagaccaaaactgtctagaatttgaaagggtttacatattattatactaaagcagtactggactggccattggaccatttgttccaaaacccataaattgttgcctaaatttataatgatcatgaaaccctaggcagaggaggagaaattgaaggtccagggcaatgaaagaaaaatggcgccctctcaatttagtcttctctcattggccatgtttcagattttgacctagaaatgcgagctgtggttaggcttggttagagtgcagcaagcaacatgacagatggtggcacgctgtttttacccagccctgcctgtacatacacatgcacaccctctctgatatttttgtcctttagatgttcaaatactcagtagtccttttgtttgcggtttagattcattttgtccacacatgtacccattttaaaaaacaatgtcctcgatgcttctgtagtgatttcattttagccaggtatttctttcttgtgtgtgatgaaccagtatggatttgcttttctaagcctcctgttggttactaatctcacttggcacattataactaaaggaatcccctcaattcaaaagcatagatggatacaaatgtcagaccgtgggtttaatttgtttagaacacatggcatttcttcacaaggtaacctgctgtatttatttattttcttttggttaaatataatttccaaactttgtggtcaggcagcgtctaaggttacgttaccacagactgacagttggtatatgtaccagccaatcccttcattaaatgtatacagatttagttaagtagcattaaataggattcttagaagtatgtcctcatagaacttttaatacttaaggctttgtaaaaactatccatgaagggaaagctcctcagcataactgctcagggaaatagggctaaataactgaacattaaataattggttaaaggtgctgttagtcgagcctcaatgcttgctacaaggatgtatgtacaaggactgactttaataatttgcattatattgtcccaaccagtagtttattttttgccacggagatgtagaagatattacaagctactggatgcactgtcagattaacttatttcattaaagaagttgggagaacaaataggaaaaaaaaaacttatttttctagtaaatattaatgtattacatttcaaataatggtgcctgacatattgaataattattttctacagtgtacgtatgcaacaaagatattccatcatgcattagagtcagttctggctctgcctagctgtttacatttgcaaatgtagcaaacaaggtaatgaagcaactatttctattgcagtagatatccttttgtgtgtgtgtgtgtgcattaaagttgtaaacggtaacatgaaacaaatgaaagttcttgctataatggtatggaaaacaagaaggaaatgaaaatatttttatgcctacttaggaaaaaaagggtagcacttattcattccaagtacttttttttttttaatttttaagctcttaactcacattgttatgcttaagatgataaacatatatcctctttttattgctttgtctatgtttcatatgaaacatttcagaaattattttgataagtgttgctggaatctgcaacgctgatttttttttgcattctgtagtcgcatttgcactccatttttacattaattcgcagttgctttgtatcattgttttgtttgggttttgtttctttttcacagtgccgggtcttcgtttcttaaagttggatggcaggtagagttcaaccagttcgtgactgttgtagcgaatgaagttaaaaaaatgtctttctgatgttgtgttgtcattttcatttttgcatttttttgtttgcatattaaaaaaagagaaaagagaaagcaagagacagaaatcaggactaagtcctctgcttcagtttcattgttaacgggccttattctgatctcacctgtcgcgtagctctaatattcacataaactgaaataaagaagtggaatgaggagctttgacattcaaattatgtgatgtaatttatcttccttaggaattttgatggatgcatctcaaaatgtatagccagacttgagaggtgacaattaaagatctaaaaaagagaggagattcccccaaacaacaatatttaattttcttagtaaaaagaataacagaatgcatcgtggcaatccttaagcaacattatctatgtggactgcttaaatcagcaaaacaccagaagtttggttaacttgggcaatatgacaagtattactttttgggcaaaactactcattaagcaatttctctagtgtgtcggacacaaataggttctttatttttggcatgtatgcctttttattttcattcaattttttttttttctcagacagacatagtagtaacgactagcattggaaaatacatatcactattcttggaatatttatggtcagtctactttttagtagaatatttttggatagcgttgacacgatagatcttattccatacttctttattattgataattttattttcattttttgctttcattattatacatattttggtggagaagaggttgggcttttttgaaagagacaaaaatttattataacactaaacactccttttttgacatattaaagcctttattccatctctcaagatatattataaaatttatttttttaatttaagatttctgaattattttatcttaaattgtgattttaaacgagctattatggtacggaactttttttaatgaggaatttcatgatgatttaggaattttctctcttggaaaaggcttcccctgtgatgaaaatgatgtgccagctaaaattgtgtgccatttaaaaactgaaaatattttaaaattatttgtctatattctaaattgagctttggatcaaactttaggccaggaccagctcatgcgttctcattcttccttttctcactctttctctcatcactcacctctgtattcattctgttgtttgggatagaaaaatcataaagagccaacccatctcagaacgttgtggattgagagagacactacatgactccaagtatatgagaaaaggacagagctctaattgataactctgtagttcaaaaggaaaagagtatgcccaattctctctacatgacatattgagattttttttaatcaacttttaagatagtgatgttctgttctaaactgttctgttttagtgaaggtagatttttataaaacaagcatggggattcttttctaaggtaatattaatgagaagggaaaaaagtatctttaacagctctttgttgaagcctgtggtagcacattatgtttataattgcacatgtgcacataatctattatgatccaatgcaaatacagctccaaaaatattaaatgtatatatattttaaaatgcctgaggaaatacatttttcttaataaactgaagagtctcagtatggctattaaaataattattagcctcctgttgtgtggctgcaaaacatcacaaagtgaccggtcttgagacctgtgaactgctgccctgtttagtaaataaaattaatgcatttctagagggggaatatctgccatccagtggtggaaatgtggagtaaagaagctggtggtctgcttctgtgctgtatgccagccttttgccttaagttgagaggaggtcaactttagctactgtctttggtttgagagccatggcaaaaaaaaaaaaagaaaaaaaagatcaagtcgtctttggtgagccagtaaggtgaaagcttgctgactgtccaaggcacaagagaaaattgaggaattgaaatgcaacctgagtatcaaactaaatattctaatcaaaggtaggtactgttaggtggaattctatcagcaggcaactgcaaatgagaagaagatagaaggacgcccgtcgggactttggagggcattgttattttcccaaagaaagacggccaagggcagaggcatggattctttgcagagcacttccttttggtttttcagtactgtttcatagacagtgggctcacatgttcctgatagtgctgcagttgcttagaaagcatcccagttaattgcagtaattagaacttctggaatatgctagggcagaagtatgtcaagtatgtcacatgaagaaaatgtgaaattcaagagtaatccacacgtgagaaactagacaatgtacattcatgtgttctcttgaaaggaaagggagagctgtaagcttcactctgtcctacaccggagaaaagcaggaataactttaccgtggaaataatgtttagcttttatcagagaaaattgtccttctagagcatagagtcccaaaactcaattctggttttcccctgttttttttttttttttttttcccaacatatgaactgcagcatatcactttttctttttgtgcctcaggttcctcacctgtaaaattgaaaaatatatgtattaataatattattaataataataatggtaatgtagtacttgtttgtaaagcactttgagatccttggttgaaaggcaccataggagtgccaagtattattatgtggccaagggggttatttaaactgtcagttcccaaaggccaggaaaggttggggtcatttttcttaaagacgagctgtaaatatcaactaggcagccaatagtgttgactatgaagatgcaaaactattactaggctgataaaatcatagtttcttaatggctaccaataaggcaaatatcacaataataaacgccaaattccttagggcggactatttgacaaccacatggaaaactttgggggaggcatgaggggggaacatctcaaaatgccaatgtaaaatttaacttacagcaatattcaccagcagaaaatgtctttcatatggaatgatttcatgttgctaagaaaaagaattcaatttgtagtcctgatttgaatactagaatgttggctataatagttctgttcttacaacacatgaaattttttcgttttattttattttgttttcatagtgcatgttcatttctactcacaaacatgttcttggtgtatttcttatgcaaacaatcttcaggcagcaaagatgtctgttacatctaaacttgaataataaagttttaccaccagttacacataacggcgttggtatggtttatatggattcactttcatccttctagcaataggaaatacagatcattgtaatatatatatatatatatatatatatatatatatatatatatatatatatacaggctctgctgaattgaaatggtgaaatcaaatcaccattctaaaaaattattacttatattgataaagcctggactctctcaacttgttgtgctttgattttttttcttaaacaaacactctctcactgatatattttgtgtaaaaagatatatactactttctccagagagataacataaaaatgtgtttatttca

SEQ ID NO: 282840 - DNA, 8292 bp, Homo sapiens
tgctatgcggtcgatctggcaaacggcggttcgactctgactacgcggctcgatctgactacgcggcagaaggagagacaatgaccaagacagacaagagctcgagtggggctaaaaagaaggacttctccagcaagggagccgaggataatatggtaacgagctataattgtcagttctgtgacttccgatattccaaaagccatggccctgatgtaattgtagtggggccacttctccgtcattatcaacagctccataacattcacaagtgtaccattaaacactgtccattctgtcccagaggactttgcagcccagaaaagcaccttggagaaattacttatccgtttgcttgtagaaaaagtaattgttcccactgtgcactcttgcttctgcacttgtctcctggggcggctggaagctcgcgagtcaaacatcagtgccatcagtgttcattcaccacccctgacgtagatgtactcctctttcactatgaaagtgtgcatgagtcccaagcatcggatgtcaaacaagaagcaaatcacctgcaaggatcggatgggcagcagtctgtcaaggaaagcaaagaacactcatgtaccaaatgtgattttattacccaagtggaagaagagatttcccgacactacaggagagcacacagctgctacaaatgccgtcagtgcagttttacagctgccgatactcagtcactactggagcacttcaacactgttcactgccaggaacaggacatcactacagccaacggcgaagaggacggtcatgccatatccaccatcaaagaggagcccaaaattgacttcagggtctacaatctgctaactccagactctaaaatgggagagccagtttctgagagtgtggtgaagagagagaagctggaagagaaggacgggctcaaagagaaagtttggaccgagagttccagtgatgaccttcgcaatgtgacttggagaggggcagacatcctgcgggggagtccgtcatacacccaagcaagcctggggctgctgacgcctgtgtctggcacccaagagcagacaaagactctaagggatagtcccaatgtggaggccgcccatctggcgcgacctatttatggcttggctgtggaaaccaagggattcctgcagggggcgccagctggcggagagaagtctggggccctcccccagcagtatcctgcatcgggagaaaacaagtccaaggatgaatcccagtccctgttacggaggcgtagaggctccggtgttttttgtgccaattgcctgaccacaaagacctctctctggcgaaagaatgcaaatggcggatatgtatgcaacgcgtgtggcctctaccagaagcttcactcgactcccaggcctttaaacatcattaaacaaaacaacggtgagcagattattaggaggagaacaagaaagcgccttaacccagaggcacttcaggctgagcagctcaacaaacagcagaggggcagcaatgaggagcaagtcaatggaagcccgttagagaggaggtcagaagatcatctaactgaaagtcaccagagagaaattccactccccagcctaagtaaatacgaagcccagggttcattgactaaaagccattctgctcagcagccagtcctggtcagccaaactctggatattcacaaaaggatgcaacctttgcacattcagataaaaagtcctcaggaaagtactggagatccaggaaatagttcatccgtatctgaagggaaaggaagttctgagagaggcagtcctatagaaaagtacatgagacctgcgaaacacccaaattattcaccaccaggcagccctattgaaaagtaccagtacccactttttggacttccctttgtacataatgacttccagagtgaagctgattggctgcggttctggagtaaatataagctctccgttcctgggaatccgcactacttgagtcacgtgcctggcctaccaaatccttgccaaaactatgtgccttatcccaccttcaatctgcctcctcatttttcagctgttggatcagacaatgacattcctctagatttggcgatcaagcattccagacctgggccaactgcaaacggtgcctccaaggagaaaacgaaggcaccaccaaatgtaaaaaatgaaggtcccttgaatgtagtaaaaacagagaaagttgatagaagtactcaagatgaactttcaacaaaatgtgtgcactgtggcattgtctttctggatgaagtgatgtatgctttgcatatgagttgccatggtgacagtggacctttccagtgcagcatatgccagcatctttgcacggacaaatatgacttcacaacacatatccagaggggcctgcataggaacaatgcacaagtggaaaaaaatggaaaacctaaagagtaaaaccttagcacttagcacaattaaatagaaataggttttcttgatgggaattcaatagcttgtaatgtcttatgaagacctattaaaaaaatacttcatagagcctgccttatccaacatgaaattcccttcttttgttattctttcttttgatgagtaggttaccaagattaaaaagtgagataaatggtcaatgagaaagaatggaagatggtaaacaatcactttttaaaacctgttaagtcaaaaccatcttggctaatatgtactggggaaataatccataagagatatcaccagactagaattaatatatttataaagaaagagaccaaaactgtctagaatttgaaagggtttacatattattatactaaagcagtactggactggccattggaccatttgttccaaaacccataaattgttgcctaaatttataatgatcatgaaaccctaggcagaggaggagaaattgaaggtccagggcaatgaaagaaaaatggcgccctctcaatttagtcttctctcattggccatgtttcagattttgacctagaaatgcgagctgtggttaggcttggttagagtgcagcaagcaacatgacagatggtggcacgctgtttttacccagccctgcctgtacatacacatgcacaccctctctgatatttttgtcctttagatgttcaaatactcagtagtccttttgtttgcggtttagattcattttgtccacacatgtacccattttaaaaaacaatgtcctcgatgcttctgtagtgatttcattttagccaggtatttctttcttgtgtgtgatgaaccagtatggatttgcttttctaagcctcctgttggttactaatctcacttggcacattataactaaaggaatcccctcaattcaaaagcatagatggatacaaatgtcagaccgtgggtttaatttgtttagaacacatggcatttcttcacaaggtaacctgctgtatttatttattttcttttggttaaatataatttccaaactttgtggtcaggcagcgtctaaggttacgttaccacagactgacagttggtatatgtaccagccaatcccttcattaaatgtatacagatttagttaagtagcattaaataggattcttagaagtatgtcctcatagaacttttaatacttaaggctttgtaaaaactatccatgaagggaaagctcctcagcataactgctcagggaaatagggctaaataactgaacattaaataattggttaaaggtgctgttagtcgagcctcaatgcttgctacaaggatgtatgtacaaggactgactttaataatttgcattatattgtcccaaccagtagtttattttttgccacggagatgtagaagatattacaagctactggatgcactgtcagattaacttatttcattaaagaagttgggagaacaaataggaaaaaaaaaacttatttttctagtaaatattaatgtattacatttcaaataatggtgcctgacatattgaataattattttctacagtgtacgtatgcaacaaagatattccatcatgcattagagtcagttctggctctgcctagctgtttacatttgcaaatgtagcaaacaaggtaatgaagcaactatttctattgcagtagatatccttttgtgtgtgtgtgtgtgcattaaagttgtaaacggtaacatgaaacaaatgaaagttcttgctataatggtatggaaaacaagaaggaaatgaaaatatttttatgcctacttaggaaaaaaagggtagcacttattcattccaagtacttttttttttttaatttttaagctcttaactcacattgttatgcttaagatgataaacatatatcctctttttattgctttgtctatgtttcatatgaaacatttcagaaattattttgataagtgttgctggaatctgcaacgctgatttttttttgcattctgtagtcgcatttgcactccatttttacattaattcgcagttgctttgtatcattgttttgtttgggttttgtttctttttcacagtgccgggtcttcgtttcttaaagttggatggcaggtagagttcaaccagttcgtgactgttgtagcgaatgaagttaaaaaaatgtctttctgatgttgtgttgtcattttcatttttgcatttttttgtttgcatattaaaaaaagagaaaagagaaagcaagagacagaaatcaggactaagtcctctgcttcagtttcattgttaacgggccttattctgatctcacctgtcgcgtagctctaatattcacataaactgaaataaagaagtggaatgaggagctttgacattcaaattatgtgatgtaatttatcttccttaggaattttgatggatgcatctcaaaatgtatagccagacttgagaggtgacaattaaagatctaaaaaagagaggagattcccccaaacaacaatatttaattttcttagtaaaaagaataacagaatgcatcgtggcaatccttaagcaacattatctatgtggactgcttaaatcagcaaaacaccagaagtttggttaacttgggcaatatgacaagtattactttttgggcaaaactactcattaagcaatttctctagtgtgtcggacacaaataggttctttatttttggcatgtatgcctttttattttcattcaattttttttttttctcagacagacatagtagtaacgactagcattggaaaatacatatcactattcttggaatatttatggtcagtctactttttagtagaatatttttggatagcgttgacacgatagatcttattccatacttctttattattgataattttattttcattttttgctttcattattatacatattttggtggagaagaggttgggcttttttgaaagagacaaaaatttattataacactaaacactccttttttgacatattaaagcctttattccatctctcaagatatattataaaatttatttttttaatttaagatttctgaattattttatcttaaattgtgattttaaacgagctattatggtacggaactttttttaatgaggaatttcatgatgatttaggaattttctctcttggaaaaggcttcccctgtgatgaaaatgatgtgccagctaaaattgtgtgccatttaaaaactgaaaatattttaaaattatttgtctatattctaaattgagctttggatcaaactttaggccaggaccagctcatgcgttctcattcttccttttctcactctttctctcatcactcacctctgtattcattctgttgtttgggatagaaaaatcataaagagccaacccatctcagaacgttgtggattgagagagacactacatgactccaagtatatgagaaaaggacagagctctaattgataactctgtagttcaaaaggaaaagagtatgcccaattctctctacatgacatattgagattttttttaatcaacttttaagatagtgatgttctgttctaaactgttctgttttagtgaaggtagatttttataaaacaagcatggggattcttttctaaggtaatattaatgagaagggaaaaaagtatctttaacagctctttgttgaagcctgtggtagcacattatgtttataattgcacatgtgcacataatctattatgatccaatgcaaatacagctccaaaaatattaaatgtatatatattttaaaatgcctgaggaaatacatttttcttaataaactgaagagtctcagtatggctattaaaataattattagcctcctgttgtgtggctgcaaaacatcacaaagtgaccggtcttgagacctgtgaactgctgccctgtttagtaaataaaattaatgcatttctagagggggaatatctgccatccagtggtggaaatgtggagtaaagaagctggtggtctgcttctgtgctgtatgccagccttttgccttaagttgagaggaggtcaactttagctactgtctttggtttgagagccatggcaaaaaaaaaaaaagaaaaaaaagatcaagtcgtctttggtgagccagtaaggtgaaagcttgctgactgtccaaggcacaagagaaaattgaggaattgaaatgcaacctgagtatcaaactaaatattctaatcaaaggtaggtactgttaggtggaattctatcagcaggcaactgcaaatgagaagaagatagaaggacgcccgtcgggactttggagggcattgttattttcccaaagaaagacggccaagggcagaggcatggattctttgcagagcacttccttttggtttttcagtactgtttcatagacagtgggctcacatgttcctgatagtgctgcagttgcttagaaagcatcccagttaattgcagtaattagaacttctggaatatgctagggcagaagtatgtcaagtatgtcacatgaagaaaatgtgaaattcaagagtaatccacacgtgagaaactagacaatgtacattcatgtgttctcttgaaaggaaagggagagctgtaagcttcactctgtcctacaccggagaaaagcaggaataactttaccgtggaaataatgtttagcttttatcagagaaaattgtccttctagagcatagagtcccaaaactcaattctggttttcccctgttttttttttttttttttttcccaacatatgaactgcagcatatcactttttctttttgtgcctcaggttcctcacctgtaaaattgaaaaatatatgtattaataatattattaataataataatggtaatgtagtacttgtttgtaaagcactttgagatccttggttgaaaggcaccataggagtgccaagtattattatgtggccaagggggttatttaaactgtcagttcccaaaggccaggaaaggttggggtcatttttcttaaagacgagctgtaaatatcaactaggcagccaatagtgttgactatgaagatgcaaaactattactaggctgataaaatcatagtttcttaatggctaccaataaggcaaatatcacaataataaacgccaaattccttagggcggactatttgacaaccacatggaaaactttgggggaggcatgaggggggaacatctcaaaatgccaatgtaaaatttaacttacagcaatattcaccagcagaaaatgtctttcatatggaatgatttcatgttgctaagaaaaagaattcaatttgtagtcctgatttgaatactagaatgttggctataatagttctgttcttacaacacatgaaattttttcgttttattttattttgttttcatagtgcatgttcatttctactcacaaacatgttcttggtgtatttcttatgcaaacaatcttcaggcagcaaagatgtctgttacatctaaacttgaataataaagttttaccaccagttacacataacggcgttggtatggtttatatggattcactttcatccttctagcaataggaaatacagatcattgtaatatatatatatatatatatatatatatatatatatatatatatatatatacaggctctgctgaattgaaatggtgaaatcaaatcaccattctaaaaaattattacttatattgataaagcctggactctctcaacttgttgtgctttgattttttttcttaaacaaacactctctcactgatatattttgtgtaaaaagatatatactactttctccagagagataacataaaaatgtgtttatttca

SEQ ID NO: 282841 - DNA, 7067 bp, Homo sapiens
caagagcactgtcacccctctgattctgcctaagaggcgtagaggctccggtgttttttgtgccaattgcctgaccacaaagacctctctctggcgaaagaatgcaaatggcggatatgtatgcaacgcgtgtggcctctaccagaagcttcactcgactcccaggcctttaaacatcattaaacaaaacaacggtgagcagattattaggaggagaacaagaaagcgccttaacccagaggcacttcaggctgagcagctcaacaaacagcagaggggcagcaatgaggagcaagtcaatggaagcccgttagagaggaggtcagaagatcatctaactgaaagtcaccagagagaaattccactccccagcctaagtaaatacgaagcccagggttcattgactaaaagccattctgctcagcagccagtcctggtcagccaaactctggatattcacaaaaggatgcaacctttgcacattcagataaaaagtcctcaggaaagtactggagatccaggaaatagttcatccgtatctgaagggaaaggaagttctgagagaggcagtcctatagaaaagtacatgagacctgcgaaacacccaaattattcaccaccaggcagccctattgaaaagtaccagtacccactttttggacttccctttgtacataatgacttccagagtgaagctgattggctgcggttctggagtaaatataagctctccgttcctgggaatccgcactacttgagtcacgtgcctggcctaccaaatccttgccaaaactatgtgccttatcccaccttcaatctgcctcctcatttttcagctgttggatcagacaatgacattcctctagatttggcgatcaagcattccagacctgggccaactgcaaacggtgcctccaaggagaaaacgaaggcaccaccaaatgtaaaaaatgaaggtcccttgaatgtagtaaaaacagagaaagttgatagaagtactcaagatgaactttcaacaaaatgtgtgcactgtggcattgtctttctggatgaagtgatgtatgctttgcatatgagttgccatggtgacagtggacctttccagtgcagcatatgccagcatctttgcacggacaaatatgacttcacaacacatatccagaggggcctgcataggaacaatgcacaagtggaaaaaaatggaaaacctaaagagtaaaaccttagcacttagcacaattaaatagaaataggttttcttgatgggaattcaatagcttgtaatgtcttatgaagacctattaaaaaaatacttcatagagcctgccttatccaacatgaaattcccttcttttgttattctttcttttgatgagtaggttaccaagattaaaaagtgagataaatggtcaatgagaaagaatggaagatggtaaacaatcactttttaaaacctgttaagtcaaaaccatcttggctaatatgtactggggaaataatccataagagatatcaccagactagaattaatatatttataaagaaagagaccaaaactgtctagaatttgaaagggtttacatattattatactaaagcagtactggactggccattggaccatttgttccaaaacccataaattgttgcctaaatttataatgatcatgaaaccctaggcagaggaggagaaattgaaggtccagggcaatgaaagaaaaatggcgccctctcaatttagtcttctctcattggccatgtttcagattttgacctagaaatgcgagctgtggttaggcttggttagagtgcagcaagcaacatgacagatggtggcacgctgtttttacccagccctgcctgtacatacacatgcacaccctctctgatatttttgtcctttagatgttcaaatactcagtagtccttttgtttgcggtttagattcattttgtccacacatgtacccattttaaaaaacaatgtcctcgatgcttctgtagtgatttcattttagccaggtatttctttcttgtgtgtgatgaaccagtatggatttgcttttctaagcctcctgttggttactaatctcacttggcacattataactaaaggaatcccctcaattcaaaagcatagatggatacaaatgtcagaccgtgggtttaatttgtttagaacacatggcatttcttcacaaggtaacctgctgtatttatttattttcttttggttaaatataatttccaaactttgtggtcaggcagcgtctaaggttacgttaccacagactgacagttggtatatgtaccagccaatcccttcattaaatgtatacagatttagttaagtagcattaaataggattcttagaagtatgtcctcatagaacttttaatacttaaggctttgtaaaaactatccatgaagggaaagctcctcagcataactgctcagggaaatagggctaaataactgaacattaaataattggttaaaggtgctgttagtcgagcctcaatgcttgctacaaggatgtatgtacaaggactgactttaataatttgcattatattgtcccaaccagtagtttattttttgccacggagatgtagaagatattacaagctactggatgcactgtcagattaacttatttcattaaagaagttgggagaacaaataggaaaaaaaaaacttatttttctagtaaatattaatgtattacatttcaaataatggtgcctgacatattgaataattattttctacagtgtacgtatgcaacaaagatattccatcatgcattagagtcagttctggctctgcctagctgtttacatttgcaaatgtagcaaacaaggtaatgaagcaactatttctattgcagtagatatccttttgtgtgtgtgtgtgtgcattaaagttgtaaacggtaacatgaaacaaatgaaagttcttgctataatggtatggaaaacaagaaggaaatgaaaatatttttatgcctacttaggaaaaaaagggtagcacttattcattccaagtacttttttttttttaatttttaagctcttaactcacattgttatgcttaagatgataaacatatatcctctttttattgctttgtctatgtttcatatgaaacatttcagaaattattttgataagtgttgctggaatctgcaacgctgatttttttttgcattctgtagtcgcatttgcactccatttttacattaattcgcagttgctttgtatcattgttttgtttgggttttgtttctttttcacagtgccgggtcttcgtttcttaaagttggatggcaggtagagttcaaccagttcgtgactgttgtagcgaatgaagttaaaaaaatgtctttctgatgttgtgttgtcattttcatttttgcatttttttgtttgcatattaaaaaaagagaaaagagaaagcaagagacagaaatcaggactaagtcctctgcttcagtttcattgttaacgggccttattctgatctcacctgtcgcgtagctctaatattcacataaactgaaataaagaagtggaatgaggagctttgacattcaaattatgtgatgtaatttatcttccttaggaattttgatggatgcatctcaaaatgtatagccagacttgagaggtgacaattaaagatctaaaaaagagaggagattcccccaaacaacaatatttaattttcttagtaaaaagaataacagaatgcatcgtggcaatccttaagcaacattatctatgtggactgcttaaatcagcaaaacaccagaagtttggttaacttgggcaatatgacaagtattactttttgggcaaaactactcattaagcaatttctctagtgtgtcggacacaaataggttctttatttttggcatgtatgcctttttattttcattcaattttttttttttctcagacagacatagtagtaacgactagcattggaaaatacatatcactattcttggaatatttatggtcagtctactttttagtagaatatttttggatagcgttgacacgatagatcttattccatacttctttattattgataattttattttcattttttgctttcattattatacatattttggtggagaagaggttgggcttttttgaaagagacaaaaatttattataacactaaacactccttttttgacatattaaagcctttattccatctctcaagatatattataaaatttatttttttaatttaagatttctgaattattttatcttaaattgtgattttaaacgagctattatggtacggaactttttttaatgaggaatttcatgatgatttaggaattttctctcttggaaaaggcttcccctgtgatgaaaatgatgtgccagctaaaattgtgtgccatttaaaaactgaaaatattttaaaattatttgtctatattctaaattgagctttggatcaaactttaggccaggaccagctcatgcgttctcattcttccttttctcactctttctctcatcactcacctctgtattcattctgttgtttgggatagaaaaatcataaagagccaacccatctcagaacgttgtggattgagagagacactacatgactccaagtatatgagaaaaggacagagctctaattgataactctgtagttcaaaaggaaaagagtatgcccaattctctctacatgacatattgagattttttttaatcaacttttaagatagtgatgttctgttctaaactgttctgttttagtgaaggtagatttttataaaacaagcatggggattcttttctaaggtaatattaatgagaagggaaaaaagtatctttaacagctctttgttgaagcctgtggtagcacattatgtttataattgcacatgtgcacataatctattatgatccaatgcaaatacagctccaaaaatattaaatgtatatatattttaaaatgcctgaggaaatacatttttcttaataaactgaagagtctcagtatggctattaaaataattattagcctcctgttgtgtggctgcaaaacatcacaaagtgaccggtcttgagacctgtgaactgctgccctgtttagtaaataaaattaatgcatttctagagggggaatatctgccatccagtggtggaaatgtggagtaaagaagctggtggtctgcttctgtgctgtatgccagccttttgccttaagttgagaggaggtcaactttagctactgtctttggtttgagagccatggcaaaaaaaaaaaaagaaaaaaaagatcaagtcgtctttggtgagccagtaaggtgaaagcttgctgactgtccaaggcacaagagaaaattgaggaattgaaatgcaacctgagtatcaaactaaatattctaatcaaaggtaggtactgttaggtggaattctatcagcaggcaactgcaaatgagaagaagatagaaggacgcccgtcgggactttggagggcattgttattttcccaaagaaagacggccaagggcagaggcatggattctttgcagagcacttccttttggtttttcagtactgtttcatagacagtgggctcacatgttcctgatagtgctgcagttgcttagaaagcatcccagttaattgcagtaattagaacttctggaatatgctagggcagaagtatgtcaagtatgtcacatgaagaaaatgtgaaattcaagagtaatccacacgtgagaaactagacaatgtacattcatgtgttctcttgaaaggaaagggagagctgtaagcttcactctgtcctacaccggagaaaagcaggaataactttaccgtggaaataatgtttagcttttatcagagaaaattgtccttctagagcatagagtcccaaaactcaattctggttttcccctgttttttttttttttttttttcccaacatatgaactgcagcatatcactttttctttttgtgcctcaggttcctcacctgtaaaattgaaaaatatatgtattaataatattattaataataataatggtaatgtagtacttgtttgtaaagcactttgagatccttggttgaaaggcaccataggagtgccaagtattattatgtggccaagggggttatttaaactgtcagttcccaaaggccaggaaaggttggggtcatttttcttaaagacgagctgtaaatatcaactaggcagccaatagtgttgactatgaagatgcaaaactattactaggctgataaaatcatagtttcttaatggctaccaataaggcaaatatcacaataataaacgccaaattccttagggcggactatttgacaaccacatggaaaactttgggggaggcatgaggggggaacatctcaaaatgccaatgtaaaatttaacttacagcaatattcaccagcagaaaatgtctttcatatggaatgatttcatgttgctaagaaaaagaattcaatttgtagtcctgatttgaatactagaatgttggctataatagttctgttcttacaacacatgaaattttttcgttttattttattttgttttcatagtgcatgttcatttctactcacaaacatgttcttggtgtatttcttatgcaaacaatcttcaggcagcaaagatgtctgttacatctaaacttgaataataaagttttaccaccagttacacataacggcgttggtatggtttatatggattcactttcatccttctagcaataggaaatacagatcattgtaatatatatatatatatatatatatatatatatatatatatatatatatatacaggctctgctgaattgaaatggtgaaatcaaatcaccattctaaaaaattattacttatattgataaagcctggactctctcaacttgttgtgctttgattttttttcttaaacaaacactctctcactgatatattttgtgtaaaaagatatatactactttctccagagagataacataaaaatgtgtttatttca

SEQ ID NO: 282842 - DNA, 2593 bp, Homo sapiens
aatgaagaacagctggaagatatgagacaggaacttgtacgacaataccaagaacatcaacaggcaacggaattgttaaggcaagcacatatgcggcagcagaaggagagacaatgaccaagacagacaagagctcgagtggggctaaaaagaaggacttctccagcaagggagccgaggataatatggtaacgagctataattgtcagttctgtgacttccgatattccaaaagccatggccctgatgtaattgtagtggggccacttctccgtcattatcaacagctccataacattcacaagtgtaccattaaacactgtccattctgtcccagaggactttgcagcccagaaaagcaccttggagaaattacttatccgtttgcttgtagaaaaagtaattgttcccactgtgcactcttgcttctgcacttgtctcctggggcggctggaagctcgcgagtcaaacatcagtgccatcagtgttcattcaccacccctgacgtagatgtactcctctttcactatgaaagtgtgcatgagtcccaagcatcggatgtcaaacaagaagcaaatcacctgcaaggatcggatgggcagcagtctgtcaaggaaagcaaagaacactcatgtaccaaatgtgattttattacccaagtggaagaagagatttcccgacactacaggagagcacacagctgctacaaatgccgtcagtgcagttttacagctgccgatactcagtcactactggagcacttcaacactgttcactgccaggaacaggacatcactacagccaacggcgaagaggacggtcatgccatatccaccatcaaagaggagcccaaaattgacttcagggtctacaatctgctaactccagactctaaaatgggagagccagtttctgagagtgtggtgaagagagagaagctggaagagaaggacgggctcaaagagaaagtttggaccgagagttccagtgatgaccttcgcaatgtgacttggagaggggcagacatcctgcgggggagtccgtcatacacccaagcaagcctggggctgctgacgcctgtgtctggcacccaagagcagacaaagactctaagggatagtcccaatgtggaggccgcccatctggcgcgacctatttatggcttggctgtggaaaccaagggattcctgcagggggcgccagctggcggagagaagtctggggccctcccccagcagtatcctgcatcgggagaaaacaagtccaaggatgaatcccagtccctgttacggaggcgtagaggctccggtgttttttgtgccaattgcctgaccacaaagacctctctctggcgaaagaatgcaaatggcggatatgtatgcaacgcgtgtggcctctaccagaagcttcactcgactcccaggcctttaaacatcattaaacaaaacaacggtgagcagattattaggaggagaacaagaaagcgccttaacccagaggcacttcaggctgagcagctcaacaaacagcagaggggcagcaatgaggagcaagtcaatggaagcccgttagagaggaggtcagaagatcatctaactgaaagtcaccagagagaaattccactccccagcctaagtaaatacgaagcccagggttcattgactaaaagccattctgctcagcagccagtcctggtcagccaaactctggatattcacaaaaggatgcaacctttgcacattcagataaaaagtcctcaggaaagtactggagatccaggaaatagttcatccgtatctgaagggaaaggaagttctgagagaggcagtcctatagaaaagtacatgagacctgcgaaacacccaaattattcaccaccaggcagccctattgaaaagtaccagtacccactttttggacttccctttgtacataatgacttccagagtgaagctgattggctgcggttctggagtaaatataagctctccgttcctgggaatccgcactacttgagtcacgtgcctggcctaccaaatccttgccaaaactatgtgccttatcccaccttcaatctgcctcctcatttttcagctgttggatcagacaatgacattcctctagatttggcgatcaagcattccagacctgggccaactgcaaacggtgcctccaaggagaaaacgaaggcaccaccaaatgtaaaaaatgaaggtcccttgaatgtagtaaaaacagagaaagttgatagaagtactcaagatgaactttcaacaaaatgtgtgcactgtggcattgtctttctggatgaagtgatgtatgctttgcatatgagttgccatggtgacagtggacctttccagtgcagcatatgccagcatctttgcacggacaaatatgacttcacaacacatatccagaggggcctgcataggaacaatgcacaagtggaaaaaaatggaaaacctaaagagtaaaaccttagcacttagcacaattaaatagaaataggttttcttgatgggaattcaatagcttgtaatgtcttatgaagacctattaaaaaaatacttcatagagcctgccttatcca

SEQ ID NO: 282843 - DNA, 10332 bp, Homo sapiens
  misc_feature (749)..(749): n is a, c, g, or t
  misc_feature (982)..(982): n is a, c, g, or t
ttcctccgcgaaggctcctttgatattaatagtgttggtgtcttgaaactgacgtaatgcgcggagactgaggtcctgacaagcgataacatttctgataaagacccgatcttactgcaatctctagcgtcctcttttttggtgctgctggtttctccagacctcgcgtcctctcgattgctctctcgccttcctatttcttttttttttttttaaacaaaaaacaacaccccctcccctctcccacccggcaccgggcacatccttgctctatttcctttctctttctctctctctctctctcttttttaataagggtgggggagggaaaggggggggaggcaggaaagacctttttctctcccccccgcaataatccaagatcaactctgcaaacaacagaagacggttcatggctttggccgccgcgccaccatctttcgggctgccgagggtgttcttgacgattaatcaacagatgtacagatcagctctcaaaatgtcttctgtgtcttctgagcgtcttctaagacaattgcattagcctcctgctagttgactaatagaattaataattgtaaaaagcactctaaagccacatgccttatgaagtcaatgctgggtatgattttacaaatatggtccggaaaaagaacccccctctgagaaacgttgcaagtgaaggcgagggccagatcctggagcctataggtacagaaagcaaggtatctggaaagaacaaagaattntctgcagatcagatgtcagaaaatacggatcagagtgatgctgcagaactaaatcataaggaggaacatagcttgcatgttcaagatccatcttctagcagtaagaaggacttgaaaagcgcagttctgagtgagaaggctggcttcaattatgaaagccccagtaagggaggaaactttccctcctttccgcatgatgaggtgacagacagaaatatgttggctttctcatntccagctgctgggggagtctgtgagcccttgaagtctccgcaaagagcagaggcagatgaccctcaagatatggcctgcaccccctcaggggactcactggagacaaaggaagatcagaagatgtcaccaaaggctacagaggaaacagggcaagcacagagtggtcaagccaattgtcaaggtttgagcccagtttcagtggcctcaaaaaacccacaagtgccttcagatgggggtgtaagactgaataaatccaaaactgacttactggtgaatgacaacccagacccggcacctctgtctccagagcttcaggactttaaatgcaatatctgtggatatggttactacggcaacgaccccacagatctgattaagcacttccgaaagtatcacttaggactgcataaccgcaccaggcaagatgctgagctggacagcaaaatcttggcccttcataacatggtgcagttcagccattccaaagacttccagaaggtcaaccgttctgtgttttctggtgtgctgcaggacatcaattcttcaaggcctgttttactaaatgggacctatgatgtgcaggtgacttcaggtggaacattcattggcattggacggaaaacaccagattgccaagggaacaccaagtatttccgctgtaaattctgcaatttcacttatatgggcaactcatccaccgaattagaacaacattttcttcagactcacccaaacaaaataaaagcttctctcccctcctctgaggttgcaaaaccttcagagaaaaactctaacaagtccatccctgcacttcaatccagtgattctggagacttgggaaaatggcaggacaagataacagtcaaagcaggagatgacactcctgttgggtactcagtgcccataaagcccctcgattcctctagacaaaatggtacagaggccaccagttactactggtgtaaattttgtagtttcagctgtgagtcatctagctcacttaaactgctagaacattatggcaagcagcacggagcagtgcagtcaggcggccttaatccagagttaaatgataagctttccaggggctctgtcattaatcagaatgatctagccaaaagttcagaaggagagacaatgaccaagacagacaagagctcgagtggggctaaaaagaaggacttctccagcaagggagccgaggataatatggtaacgagctataattgtcagttctgtgacttccgatattccaaaagccatggccctgatgtaattgtagtggggccacttctccgtcattatcaacagctccataacattcacaagtgtaccattaaacactgtccattctgtcccagaggactttgcagcccagaaaagcaccttggagaaattacttatccgtttgcttgtagaaaaagtaattgttcccactgtgcactcttgcttctgcacttgtctcctggggcggctggaagctcgcgagtcaaacatcagtgccatcagtgttcattcaccacccctgacgtagatgtactcctctttcactatgaaagtgtgcatgagtcccaagcatcggatgtcaaacaagaagcaaatcacctgcaaggatcggatgggcagcagtctgtcaaggaaagcaaagaacactcatgtaccaaatgtgattttattacccaagtggaagaagagatttcccgacactacaggagagcacacagctgctacaaatgccgtcagtgcagttttacagctgccgatactcagtcactactggagcacttcaacactgttcactgccaggaacaggacatcactacagccaacggcgaagaggacggtcatgccatatccaccatcaaagaggagcccaaaattgacttcagggtctacaatctgctaactccagactctaaaatgggagagccagtttctgagagtgtggtgaagagagagaagctggaagagaaggacgggctcaaagagaaagtttggaccgagagttccagtgatgaccttcgcaatgtgacttggagaggggcagacatcctgcgggggagtccgtcatacacccaagcaagcctggggctgctgacgcctgtgtctggcacccaagagcagacaaagactctaagggatagtcccaatgtggaggccgcccatctggcgcgacctatttatggcttggctgtggaaaccaagggattcctgcagggggcgccagctggcggagagaagtctggggccctcccccagcagtatcctgcatcgggagaaaacaagtccaaggatgaatcccagtccctgttacggaggcgtagaggctccggtgttttttgtgccaattgcctgaccacaaagacctctctctggcgaaagaatgcaaatggcggatatgtatgcaacgcgtgtggcctctaccagaagcttcactcgactcccaggcctttaaacatcattaaacaaaacaacggtgagcagattattaggaggagaacaagaaagcgccttaacccagaggcacttcaggctgagcagctcaacaaacagcagaggggcagcaatgaggagcaagtcaatggaagcccgttagagaggaggtcagaagatcatctaactgaaagtcaccagagagaaattccactccccagcctaagtaaatacgaagcccagggttcattgactaaaagccattctgctcagcagccagtcctggtcagccaaactctggatattcacaaaaggatgcaacctttgcacattcagataaaaagtcctcaggaaagtactggagatccaggaaatagttcatccgtatctgaagggaaaggaagttctgagagaggcagtcctatagaaaagtacatgagacctgcgaaacacccaaattattcaccaccaggcagccctattgaaaagtaccagtacccactttttggacttccctttgtacataatgacttccagagtgaagctgattggctgcggttctggagtaaatataagctctccgttcctgggaatccgcactacttgagtcacgtgcctggcctaccaaatccttgccaaaactatgtgccttatcccaccttcaatctgcctcctcatttttcagctgttggatcagacaatgacattcctctagatttggcgatcaagcattccagacctgggccaactgcaaacggtgcctccaaggagaaaacgaaggcaccaccaaatgtaaaaaatgaaggtcccttgaatgtagtaaaaacagagaaagttgatagaagtactcaagatgaactttcaacaaaatgtgtgcactgtggcattgtctttctggatgaagtgatgtatgctttgcatatgagttgccatggtgacagtggacctttccagtgcagcatatgccagcatctttgcacggacaaatatgacttcacaacacatatccagaggggcctgcataggaacaatgcacaagtggaaaaaaatggaaaacctaaagagtaaaaccttagcacttagcacaattaaatagaaataggttttcttgatgggaattcaatagcttgtaatgtcttatgaagacctattaaaaaaatacttcatagagcctgccttatccaacatgaaattcccttcttttgttattctttcttttgatgagtaggttaccaagattaaaaagtgagataaatggtcaatgagaaagaatggaagatggtaaacaatcactttttaaaacctgttaagtcaaaaccatcttggctaatatgtactggggaaataatccataagagatatcaccagactagaattaatatatttataaagaaagagaccaaaactgtctagaatttgaaagggtttacatattattatactaaagcagtactggactggccattggaccatttgttccaaaacccataaattgttgcctaaatttataatgatcatgaaaccctaggcagaggaggagaaattgaaggtccagggcaatgaaagaaaaatggcgccctctcaatttagtcttctctcattggccatgtttcagattttgacctagaaatgcgagctgtggttaggcttggttagagtgcagcaagcaacatgacagatggtggcacgctgtttttacccagccctgcctgtacatacacatgcacaccctctctgatatttttgtcctttagatgttcaaatactcagtagtccttttgtttgcggtttagattcattttgtccacacatgtacccattttaaaaaacaatgtcctcgatgcttctgtagtgatttcattttagccaggtatttctttcttgtgtgtgatgaaccagtatggatttgcttttctaagcctcctgttggttactaatctcacttggcacattataactaaaggaatcccctcaattcaaaagcatagatggatacaaatgtcagaccgtgggtttaatttgtttagaacacatggcatttcttcacaaggtaacctgctgtatttatttattttcttttggttaaatataatttccaaactttgtggtcaggcagcgtctaaggttacgttaccacagactgacagttggtatatgtaccagccaatcccttcattaaatgtatacagatttagttaagtagcattaaataggattcttagaagtatgtcctcatagaacttttaatacttaaggctttgtaaaaactatccatgaagggaaagctcctcagcataactgctcagggaaatagggctaaataactgaacattaaataattggttaaaggtgctgttagtcgagcctcaatgcttgctacaaggatgtatgtacaaggactgactttaataatttgcattatattgtcccaaccagtagtttattttttgccacggagatgtagaagatattacaagctactggatgcactgtcagattaacttatttcattaaagaagttgggagaacaaataggaaaaaaaaaacttatttttctagtaaatattaatgtattacatttcaaataatggtgcctgacatattgaataattattttctacagtgtacgtatgcaacaaagatattccatcatgcattagagtcagttctggctctgcctagctgtttacatttgcaaatgtagcaaacaaggtaatgaagcaactatttctattgcagtagatatccttttgtgtgtgtgtgtgtgcattaaagttgtaaacggtaacatgaaacaaatgaaagttcttgctataatggtatggaaaacaagaaggaaatgaaaatatttttatgcctacttaggaaaaaaagggtagcacttattcattccaagtacttttttttttttaatttttaagctcttaactcacattgttatgcttaagatgataaacatatatcctctttttattgctttgtctatgtttcatatgaaacatttcagaaattattttgataagtgttgctggaatctgcaacgctgatttttttttgcattctgtagtcgcatttgcactccatttttacattaattcgcagttgctttgtatcattgttttgtttgggttttgtttctttttcacagtgccgggtcttcgtttcttaaagttggatggcaggtagagttcaaccagttcgtgactgttgtagcgaatgaagttaaaaaaatgtctttctgatgttgtgttgtcattttcatttttgcatttttttgtttgcatattaaaaaaagagaaaagagaaagcaagagacagaaatcaggactaagtcctctgcttcagtttcattgttaacgggccttattctgatctcacctgtcgcgtagctctaatattcacataaactgaaataaagaagtggaatgaggagctttgacattcaaattatgtgatgtaatttatcttccttaggaattttgatggatgcatctcaaaatgtatagccagacttgagaggtgacaattaaagatctaaaaaagagaggagattcccccaaacaacaatatttaattttcttagtaaaaagaataacagaatgcatcgtggcaatccttaagcaacattatctatgtggactgcttaaatcagcaaaacaccagaagtttggttaacttgggcaatatgacaagtattactttttgggcaaaactactcattaagcaatttctctagtgtgtcggacacaaataggttctttatttttggcatgtatgcctttttattttcattcaattttttttttttctcagacagacatagtagtaacgactagcattggaaaatacatatcactattcttggaatatttatggtcagtctactttttagtagaatatttttggatagcgttgacacgatagatcttattccatacttctttattattgataattttattttcattttttgctttcattattatacatattttggtggagaagaggttgggcttttttgaaagagacaaaaatttattataacactaaacactccttttttgacatattaaagcctttattccatctctcaagatatattataaaatttatttttttaatttaagatttctgaattattttatcttaaattgtgattttaaacgagctattatggtacggaactttttttaatgaggaatttcatgatgatttaggaattttctctcttggaaaaggcttcccctgtgatgaaaatgatgtgccagctaaaattgtgtgccatttaaaaactgaaaatattttaaaattatttgtctatattctaaattgagctttggatcaaactttaggccaggaccagctcatgcgttctcattcttccttttctcactctttctctcatcactcacctctgtattcattctgttgtttgggatagaaaaatcataaagagccaacccatctcagaacgttgtggattgagagagacactacatgactccaagtatatgagaaaaggacagagctctaattgataactctgtagttcaaaaggaaaagagtatgcccaattctctctacatgacatattgagattttttttaatcaacttttaagatagtgatgttctgttctaaactgttctgttttagtgaaggtagatttttataaaacaagcatggggattcttttctaaggtaatattaatgagaagggaaaaaagtatctttaacagctctttgttgaagcctgtggtagcacattatgtttataattgcacatgtgcacataatctattatgatccaatgcaaatacagctccaaaaatattaaatgtatatatattttaaaatgcctgaggaaatacatttttcttaataaactgaagagtctcagtatggctattaaaataattattagcctcctgttgtgtggctgcaaaacatcacaaagtgaccggtcttgagacctgtgaactgctgccctgtttagtaaataaaattaatgcatttctagagggggaatatctgccatccagtggtggaaatgtggagtaaagaagctggtggtctgcttctgtgctgtatgccagccttttgccttaagttgagaggaggtcaactttagctactgtctttggtttgagagccatggcaaaaaaaaaaaaagaaaaaaaagatcaagtcgtctttggtgagccagtaaggtgaaagcttgctgactgtccaaggcacaagagaaaattgaggaattgaaatgcaacctgagtatcaaactaaatattctaatcaaaggtaggtactgttaggtggaattctatcagcaggcaactgcaaatgagaagaagatagaaggacgcccgtcgggactttggagggcattgttattttcccaaagaaagacggccaagggcagaggcatggattctttgcagagcacttccttttggtttttcagtactgtttcatagacagtgggctcacatgttcctgatagtgctgcagttgcttagaaagcatcccagttaattgcagtaattagaacttctggaatatgctagggcagaagtatgtcaagtatgtcacatgaagaaaatgtgaaattcaagagtaatccacacgtgagaaactagacaatgtacattcatgtgttctcttgaaaggaaagggagagctgtaagcttcactctgtcctacaccggagaaaagcaggaataactttaccgtggaaataatgtttagcttttatcagagaaaattgtccttctagagcatagagtcccaaaactcaattctggttttcccctgttttttttttttttttttttcccaacatatgaactgcagcatatcactttttctttttgtgcctcaggttcctcacctgtaaaattgaaaaatatatgtattaataatattattaataataataatggtaatgtagtacttgtttgtaaagcactttgagatccttggttgaaaggcaccataggagtgccaagtattattatgtggccaagggggttatttaaactgtcagttcccaaaggccaggaaaggttggggtcatttttcttaaagacgagctgtaaatatcaactaggcagccaatagtgttgactatgaagatgcaaaactattactaggctgataaaatcatagtttcttaatggctaccaataaggcaaatatcacaataataaacgccaaattccttagggcggactatttgacaaccacatggaaaactttgggggaggcatgaggggggaacatctcaaaatgccaatgtaaaatttaacttacagcaatattcaccagcagaaaatgtctttcatatggaatgatttcatgttgctaagaaaaagaattcaatttgtagtcctgatttgaatactagaatgttggctataatagttctgttcttacaacacatgaaattttttcgttttattttattttgttttcatagtgcatgttcatttctactcacaaacatgttcttggtgtatttcttatgcaaacaatcttcaggcagcaaagatgtctgttacatctaaacttgaataataaagttttaccaccagttacacataacggcgttggtatggtttatatggattcactttcatccttctagcaataggaaatacagatcattgtaatatatatatatatatatatatatatatatatatatatatatatatatatacaggctctgctgaattgaaatggtgaaatcaaatcaccattctaaaaaattattacttatattgataaagcctggactctctcaacttgttgtgctttgattttttttcttaaacaaacactctctcactgatatattttgtgtaaaaagatatatactactttctccagagagataacataaaaatgtgtttatttca

SEQ ID NO: 282844 - DNA, 2754 bp, Homo sapiens
aattcggcacgagctctctgaggctgcgccaagacctgaagcggcggaccgagagcccgggtctgagactgagagagcaacggaatggaggcggggtagaggcggaaacacaacctgcagggccagagcgaggcgcgagaaggacggcggcgtgagggggcggggcgcgcagcgcgagaaggcaggcacgaggggcgagcgcgaggcggggcacggcgcgtggcgtgagacggggcggggcgcgcgtatcggcgccgcggccgcgtgacgcgttttcaaatcttcaaccgccgcagcccactcgtttgtgctttgcgccttcctcctccgcgccttggagccggatccggccccggaaacccgacctgcagacgcggtacctctactgcgtagaggccgtagctggcggaaggagagaggcggccgtcctgtcaacaggccgggggaagccgtgctttcgcggctgcccggtgcgacactttctccggacccagcatgtaggtgccgggcgactgccatgaactccggagccatgaggatccacagtaaaggacatttccagggtggaatccaagtcaaaaatgaaaaaaacagaccatctctgaaatctctgaaaactgataacaggccagaaaaatccaaatgtaagccactttggggaaaagtattttaccttgacttaccttctgtcaccatatctgaaaaacttcaaaaggacattaaggatctgggagggcgagttgaagaatttctcagcaaagatatcagttatcttatttcaaataagaaggaagctaaatttgcacaaaccttgggtcgaatttctcctgtaccaagtccagaatctgcatatactgcagaaaccacttcacctcatcccagccatgatggaagttcatttaagtcaccagacacagtgtgtttaagcagaggaaaattattagttgaaaaagctatcaaggaccatgattttattccttcaaatagtatattatcaaatgccttgtcatggggagtaaaaattcttcatattgatgacattagatactacattgaacaaaagaaaaaagagttgtatttactcaagaaatcaagtacttcagtaagagatgggggcaaaagagttggtagtggtgcacaaaaaacaagaacaggaagactcaaaaagccttttgtaaaggtggaagatatgagccaactttataggccattttatcttcagctgaccaatatgccttttataaattattctattcagaagccctgcagtccatttgatgtagacaagccatctagtatgcaaaagcaaactcaggttaaactaagaatccaaacagatggcgataagtatggtggaacctcaattcaactccagttgaaagagaagaagaaaaaaggatattgtgaatgttgcttgcagaaatatgaagatctagaaactcaccttctaagtgagcaacacagaaactttgcacagagtaaccagtatcaagttgttgatgatattgtatctaagttagtttttgactttgtggaatatgaaaaggacacacctaaaaagaaaagaataaaatacagtgttggatccctttctcctgtttctgcaagtgtcctgaaaaagactgaacaaaaggaaaaagtggaattgcaacatatttctcagaaagattgccaggaagatgatacaacagtgaaggagcagaatttcctgtataaagagacccaggaaactgaaaaaaagctcctgtttatttcagagcccatcccccacccttcaaatgaattgagagggcttaatgagaaaatgagtaataaatgttccatgttaagtacagctgaagatgacataagacagaattttacacagctacctctacataaaaacaaacaggaatgcattcttgacatttccgaacacacattaagtgaaaatgacttagaagaactaagggtagatcactataaatgtaacatacaggcatctgtacatgtttctgatttcagtacagataatagtggatctcaaccaaaacagaagtcagatactgtgctttttccagcaaaggatctcaaggaaaaggaccttcattcaatatttactcatgattctggtctgataacaataaacagttcacaagagcacctaactgttcaggcaaaggctccattccatactcctcctgaggaacccaatgaatgtgacttcaagaatatggatagtttaccttctggtaaaatacatcgaaaagtgaaaataatattaggacgaaatagaaaagaaaatctggaaccaaatgctgaatttgataaaagaactgaatttattacacaagaagaaaacagaatttgtagttcaccggtacagtctttactagacttgtttcagactagtgaagagaaatcagaatttttgggtttcacaagctacacagaaaagagtggtatatgcaatgttttagatatttgggaagaggaaaattcagataatctgttaacagcgtttttctcgtccccttcaacttctacatttactggcttttagaatttaaaaaatgcatacttttcagaagtgataaggatcatattcttgaaatttttataaatatgtatggaaattcttaggatttttttaccagctttgtttacagacccaaatgtaaatattaaaaataaatatttgcaattttctacagaattgaatacctgttaaagaaaaattacagaataaacttgtgactggtcttgttttacatt

SEQ ID NO: 282845 - DNA, 1192 bp, Homo sapiens
  misc_feature (1028)..(1028): n is a, c, g, or t
aattcggcacgagctctctgaggctgcgccaagacctgaagcggcggaccgagagcccgggtctgagactgagagagcaacggaatggaggcggggtagaggcggaaacacaacctgcagggccagagcgaggcgcgagaaggacggcggcgtgagggggcggggcgcgcagcgcgagaaggcaggcacgaggggcgagcgcgaggcggggcacggcgcgtggcgtgagacggggcggggcgcgcgtatcggcgccgcggccgcgtgacgcgttttcaaatcttcaaccgccgcagcccactcgtttgtgctttgcgccttcctcctccgcgccttggagccggatccggccccggaaacccgacctgcagacgcggtacctctactgcgtagaggccgtagctggcggaaggagagaggcggccgtcctgtcaacaggccgggggaagccgtgctttcgcggctgcccggtgcgacactttctccggacccagcatgtaggtgccgggcgactgccatgaactccggagccatgaggatccacagtaaaggacatttccagggtggaatccaagtcaaaaatgaaaaaaacagaccatctctgaaatctctgaaaactgataacaggccagaaaaatccaaatcgagttgaagaatttctcagcaaagatatcagttatcttatttcaaataagaaggaagctaaatttgcacaaaccttgggtcgaatttctcctgtaccaagtccagaatctgcatatactgcagaaaccacttcacctcatcccagccatgatggaagttcatttaagtcaccagacacagtgtgtttaagcagaggaaaattattagttgaaaaagctatcaaggaccatgattttattccttcaaatagtatattatcaaatgccttgtcatggggagtaaaaattcttcatattgatgacattagatactacattgaacaaaagaaaaaagagttgtatttactcaagaaatcaagtacttcagtaagagatggggcaaangagtggtagtgggtgcccccaaacaccagaacaggaagactcaaagaggctttgtaaggggcagattgagccaatttatagggcactatacttaggggcaatagctttataatttttatgcagaaccgggtcattggtaacagcttattgaagaactggtacag

SEQ ID NO: 282846 - DNA, 3929 bp, Homo sapiens
  misc_feature (2842)..(2842): n is a, c, g, or t
aattcggcacgagctctctgaggctgcgccaagacctgaagcggcggaccgagagcccgggtctgagactgagagagcaacggaatggaggcggggtagaggcggaaacacaacctgcagggccagagcgaggcgcgagaaggacggcggcgtgagggggcggggcgcgcagcgcgagaaggcaggcacgaggggcgagcgcgaggcggggcacggcgcgtggcgtgagacggggcggggcgcgcgtatcggcgccgcggccgcgtgacgcgttttcaaatcttcaaccgccgcagcccactcgtttgtgctttgcgccttcctcctccgcgccttggagccggatccggccccggaaacccgacctgcagacgcggtacctctactgcgtagaggccgtagctggcggaaggagagaggcggccgtcctgtcaacaggccgggggaagccgtgctttcgcggctgcccggtgcgacactttctccggacccagcatgtaggtgccgggcgactgccatgaactccggagccatgaggatccacagtaaaggacatttccagggtggaatccaagtcaaaaatgaaaaaaacagaccatctctgaaatctctgaaaactgataacaggccagaaaaatccaaatgtaagccactttggggaaaagtattttaccttgacttaccttctgtcaccatatctgaaaaacttcaaaaggacattaaggatctgggagggcgagttgaagaatttctcagcaaagatatcagttatcttatttcaaataagaaggaagctaaatttgcacaaaccttgggtcgaatttctcctgtaccaagtccagaatctgcatatactgcagaaaccacttcacctcatcccagccatgatggaagttcatttaagtcaccagacacagtgtgtttaagcagaggaaaattattagttgaaaaagctatcaaggaccatgattttattccttcaaatagtatattatcaaatgccttgtcatggggagtaaaaattcttcatattgatgacattagatactacattgaacaaaagaaaaaagagttgtatttactcaagaaatcaagtacttcagtaagagatgggggcaaaagagttggtagtggtgcacaaaaaacaagaacaggaagactcaaaaagccttttgtaaaggtggaagatatgagccaactttataggccattttatcttcagctgaccaatatgccttttataaattattctattcagaagccctgcagtccatttgatgtagacaagccatctagtatgcaaaagcaaactcaggttaaactaagaatccaaacagatggcgataagtatggtggaacctcaattcaactccagttgaaagagaagaagaaaaaaggatattgtgaatgttgcttgcagaaatatgaagatctagaaactcaccttctaagtgagcaacacagaaactttgcacagagtaaccagtatcaagttgttgatgatattgtatctaagttagtttttgactttgtggaatatgaaaaggacacacctaaaaagaaaagaataaaatacagtgttggatccctttctcctgtttctgcaagtgtcctgaaaaagactgaacaaaaggaaaaagtggaattgcaacatatttctcagaaagattgccaggaagatgatacaacagtgaaggagcagaatttcctgtataaagagacccaggaaactgaaaaaaagctcctgtttatttcagagcccatcccccacccttcaaatgaattgagagggcttaatgagaaaatgagtaataaatgttccatgttaagtacagctgaagatgacataagacagaattttacacagctacctctacataaaaacaaacaggaatgcattcttgacatttccgaacacacattaagtgaaaatgacttagaagaactaagggtagatcactataaatgtaacatacaggcatctgtacatgtttctgatttcagtacagataatagtggatctcaaccaaaacagaagtcagatactgtgctttttccagcaaaggatctcaaggaaaaggaccttcattcaatatttactcatgattctggtctgataacaataaacagttcacaagagcacctaactgttcaggcaaaggctccattccatactcctcctgaggaacccaatgaatgtgacttcaagaatatggatagtttaccttctggtaaaatacatcgaaaagtgaaaataatattaggacgaaatagaaaagaaaatctggaaccaaatgctgaatttgataaaagaactgaatttattacacaagaagaaaacagaatttgtagttcaccggtacagtctttactagacttgtttcagactagtgaagagaaatcagaatttttgggtttcacaagctacacagaaaagagtggtatatgcaatgttttagatatttgggaagaggaaaattcagataatctgttaacagcgtttttctcgtccccttcaacttctacatttactggcttttagaatttaaaaaatgcatacttttcagaagtgataaggatcatattcttgaaatttttataaatatgtatggaaattcttaggatttttttaccagctttgtttacagacccaaatgtaaatattaaaaataaatatttgcaattttctacagaattgaatacctgttaaagaaaaattacagaataaacttgtgactggtcttgttttacattatatatatgttcgtaattgtttcctgagaattacaatgaataataatttgctttgtcactgaaaaccaccagtgaagtgcaatttggngaatatcaaacttagcattatacatttggatattctagttgtattgtaaattttaaaagattatcaggataacatgaccttgccttgaaaaacctaaatttcatacagaaaggaaaaatacatttctatgcttgaattctggaaatcatcagaaatattgacacttgagggtcactggtggaccatgctagtattttggtgctgagtaattagattatgtataggggtaactggaagccatgaaggaaggacttaaccaggctaccaagtggaatataatttatctgctatttttaattacttaccttgtaaataactttaataatattcaaaagttgactctcctgtggctcatgccacaggatcccagcactttgggaggccgaggcaggctgatcacgaggtcagaagatcaagaccatcctggccaacatggtgaaaccttgtctactaaaaatacaaaaaattagctgggcatggcggcatgcgcctgtagtcccagctactccctccagaggctgagaattgcttgaacctgggaagtgcaggttgcagtgagccaagattgtgccactgtattccagactgggtgacagagtgagactccatctcaaaaaaaaaaaagttgactctaccccctaatttggtaggagatgaaggagaaaaggatggcattgaattatagatacagttttgggatatatacaaggattgccttgatctggcacttactgatacaagcatttggagaagagaaaattcaaatataagaaatttcaatttgaatctgtggatataaggcatttgcctttgagtatgttcttgtaggagtaagactaccaccagtgacattcaattggttctattgcatagtacatgaatctattgtcactaaaaattaggttactaatcttaatttttttgaaatatatgattctcagtacaggactaattcatatgcttttcctgcatacattattttgatcatttggataacatcaatgaacactggctttttaacacctttgtttttcataccagtacctgaagtaggctcaataaaagagtctttacagtgcatacacgc

SEQ ID NO: 282847 - DNA, 3785 bp, Homo sapiens
  misc_feature (2698)..(2698): n is a, c, g, or t
aattcggcacgagctctctgaggctgcgccaagacctgaagcggcggaccgagagcccgggtctgagactgagagagcaacggaatggaggcggggtagaggcggaaacacaacctgcagggccagagcgaggcgcgagaaggacggcggcgtgagggggcggggcgcgcagcgcgagaaggcaggcacgaggggcgagcgcgaggcggggcacggcgcgtggcgtgagacggggcggggcgcgcgtatcggcgccgcggccgcgtgacgcgttttcaaatcttcaaccgccgcagcccactcgtttgtgctttgcgccttcctcctccgcgccttggagccggatccggccccggaaacccgacctgcagacgcggtacctctactgcgtagaggccgtagctggcggaaggagagaggcggccgtcctgtcaacaggccgggggaagccgtgctttcgcggctgcccggtgcgacactttctccggacccagcatgtaggtgccgggcgactgccatgaactccggagccatgaggatccacagtaaaggacatttccagggtggaatccaagtcaaaaatgaaaaaaacagaccatctctgaaatctctgaaaactgataacaggccagaaaaatccaaatgtaagccactttggggaaaagtattttaccttgacttaccttctgtcaccatatctgaaaaacttcaaaaggacattaaggatctgggagggcgagttgaagaatttctcagcaaagatatcagttatcttatttcaaataagaaggaagctaaatttgcacaaaccttgggtcgaatttctcctgtaccaagtccagaatctgcatatactgcagaaaccacttcacctcatcccagccatgatggaagttcatttaagtcaccagacacagtgtgtttaagcagaggaaaattattagttgaaaaagctatcaaggaccatgattttattccttcaaatagtatattatcaaatgccttgtcatggggagtaaaaattcttcatattgatgacattagatactacattgaacaaaagaaaaaagagttgtatttactcaagaaatcaagtacttcagtaagagatgggaagccctgcagtccatttgatgtagacaagccatctagtatgcaaaagcaaactcaggttaaactaagaatccaaacagatggcgataagtatggtggaacctcaattcaactccagttgaaagagaagaagaaaaaaggatattgtgaatgttgcttgcagaaatatgaagatctagaaactcaccttctaagtgagcaacacagaaactttgcacagagtaaccagtatcaagttgttgatgatattgtatctaagttagtttttgactttgtggaatatgaaaaggacacacctaaaaagaaaagaataaaatacagtgttggatccctttctcctgtttctgcaagtgtcctgaaaaagactgaacaaaaggaaaaagtggaattgcaacatatttctcagaaagattgccaggaagatgatacaacagtgaaggagcagaatttcctgtataaagagacccaggaaactgaaaaaaagctcctgtttatttcagagcccatcccccacccttcaaatgaattgagagggcttaatgagaaaatgagtaataaatgttccatgttaagtacagctgaagatgacataagacagaattttacacagctacctctacataaaaacaaacaggaatgcattcttgacatttccgaacacacattaagtgaaaatgacttagaagaactaagggtagatcactataaatgtaacatacaggcatctgtacatgtttctgatttcagtacagataatagtggatctcaaccaaaacagaagtcagatactgtgctttttccagcaaaggatctcaaggaaaaggaccttcattcaatatttactcatgattctggtctgataacaataaacagttcacaagagcacctaactgttcaggcaaaggctccattccatactcctcctgaggaacccaatgaatgtgacttcaagaatatggatagtttaccttctggtaaaatacatcgaaaagtgaaaataatattaggacgaaatagaaaagaaaatctggaaccaaatgctgaatttgataaaagaactgaatttattacacaagaagaaaacagaatttgtagttcaccggtacagtctttactagacttgtttcagactagtgaagagaaatcagaatttttgggtttcacaagctacacagaaaagagtggtatatgcaatgttttagatatttgggaagaggaaaattcagataatctgttaacagcgtttttctcgtccccttcaacttctacatttactggcttttagaatttaaaaaatgcatacttttcagaagtgataaggatcatattcttgaaatttttataaatatgtatggaaattcttaggatttttttaccagctttgtttacagacccaaatgtaaatattaaaaataaatatttgcaattttctacagaattgaatacctgttaaagaaaaattacagaataaacttgtgactggtcttgttttacattatatatatgttcgtaattgtttcctgagaattacaatgaataataatttgctttgtcactgaaaaccaccagtgaagtgcaatttggngaatatcaaacttagcattatacatttggatattctagttgtattgtaaattttaaaagattatcaggataacatgaccttgccttgaaaaacctaaatttcatacagaaaggaaaaatacatttctatgcttgaattctggaaatcatcagaaatattgacacttgagggtcactggtggaccatgctagtattttggtgctgagtaattagattatgtataggggtaactggaagccatgaaggaaggacttaaccaggctaccaagtggaatataatttatctgctatttttaattacttaccttgtaaataactttaataatattcaaaagttgactctcctgtggctcatgccacaggatcccagcactttgggaggccgaggcaggctgatcacgaggtcagaagatcaagaccatcctggccaacatggtgaaaccttgtctactaaaaatacaaaaaattagctgggcatggcggcatgcgcctgtagtcccagctactccctccagaggctgagaattgcttgaacctgggaagtgcaggttgcagtgagccaagattgtgccactgtattccagactgggtgacagagtgagactccatctcaaaaaaaaaaaagttgactctaccccctaatttggtaggagatgaaggagaaaaggatggcattgaattatagatacagttttgggatatatacaaggattgccttgatctggcacttactgatacaagcatttggagaagagaaaattcaaatataagaaatttcaatttgaatctgtggatataaggcatttgcctttgagtatgttcttgtaggagtaagactaccaccagtgacattcaattggttctattgcatagtacatgaatctattgtcactaaaaattaggttactaatcttaatttttttgaaatatatgattctcagtacaggactaattcatatgcttttcctgcatacattattttgatcatttggataacatcaatgaacactggctttttaacacctttgtttttcataccagtacctgaagtaggctcaataaaagagtctttacagtgcatacacgc

SEQ ID NO: 282848 - DNA, 3315 bp, Homo sapiens
  misc_feature (2228)..(2228): n is a, c, g, or t
aattcggcacgagctctctgaggctgcgccaagacctgaagcggcggaccgagagcccgggtctgagactgagagagcaacggaatggaggcggggtagaggcggaaacacaacctgcagggccagagcgaggcgcgagaaggacggcggcgtgagggggcggggcgcgcagcgcgagaaggcaggcacgaggggcgagcgcgaggcggggcacggcgcgtggcgtgagacggggcggggcgcgcgtatcggcgccgcggccgcgtgacgcgttttcaaatcttcaaccgccgcagcccactcgtttgtgctttgcgccttcctcctccgcgccttggagccggatccggccccggaaacccgacctgcagacgcggtacctctactgcgtagaggccgtagctggcggaaggagagaggcggccgtcctgtcaacaggccgggggaagccgtgctttcgcggctgcccggtgcgacactttctccggacccagcatgtaggtgccgggcgactgccatgaactccggagccatgaggatccacagtaaaggacatttccagggtggaatccaagtcaaaaatgaaaaaaacagaccatctctgaaatctctgaaaactgataacaggccagaaaaatccaaataagccctgcagtccatttgatgtagacaagccatctagtatgcaaaagcaaactcaggttaaactaagaatccaaacagatggcgataagtatggtggaacctcaattcaactccagttgaaagagaagaagaaaaaaggatattgtgaatgttgcttgcagaaatatgaagatctagaaactcaccttctaagtgagcaacacagaaactttgcacagagtaaccagtatcaagttgttgatgatattgtatctaagttagtttttgactttgtggaatatgaaaaggacacacctaaaaagaaaagaataaaatacagtgttggatccctttctcctgtttctgcaagtgtcctgaaaaagactgaacaaaaggaaaaagtggaattgcaacatatttctcagaaagattgccaggaagatgatacaacagtgaaggagcagaatttcctgtataaagagacccaggaaactgaaaaaaagctcctgtttatttcagagcccatcccccacccttcaaatgaattgagagggcttaatgagaaaatgagtaataaatgttccatgttaagtacagctgaagatgacataagacagaattttacacagctacctctacataaaaacaaacaggaatgcattcttgacatttccgaacacacattaagtgaaaatgacttagaagaactaagggtagatcactataaatgtaacatacaggcatctgtacatgtttctgatttcagtacagataatagtggatctcaaccaaaacagaagtcagatactgtgctttttccagcaaaggatctcaaggaaaaggaccttcattcaatatttactcatgattctggtctgataacaataaacagttcacaagagcacctaactgttcaggcaaaggctccattccatactcctcctgaggaacccaatgaatgtgacttcaagaatatggatagtttaccttctggtaaaatacatcgaaaagtgaaaataatattaggacgaaatagaaaagaaaatctggaaccaaatgctgaatttgataaaagaactgaatttattacacaagaagaaaacagaatttgtagttcaccggtacagtctttactagacttgtttcagactagtgaagagaaatcagaatttttgggtttcacaagctacacagaaaagagtggtatatgcaatgttttagatatttgggaagaggaaaattcagataatctgttaacagcgtttttctcgtccccttcaacttctacatttactggcttttagaatttaaaaaatgcatacttttcagaagtgataaggatcatattcttgaaatttttataaatatgtatggaaattcttaggatttttttaccagctttgtttacagacccaaatgtaaatattaaaaataaatatttgcaattttctacagaattgaatacctgttaaagaaaaattacagaataaacttgtgactggtcttgttttacattatatatatgttcgtaattgtttcctgagaattacaatgaataataatttgctttgtcactgaaaaccaccagtgaagtgcaatttggngaatatcaaacttagcattatacatttggatattctagttgtattgtaaattttaaaagattatcaggataacatgaccttgccttgaaaaacctaaatttcatacagaaaggaaaaatacatttctatgcttgaattctggaaatcatcagaaatattgacacttgagggtcactggtggaccatgctagtattttggtgctgagtaattagattatgtataggggtaactggaagccatgaaggaaggacttaaccaggctaccaagtggaatataatttatctgctatttttaattacttaccttgtaaataactttaataatattcaaaagttgactctcctgtggctcatgccacaggatcccagcactttgggaggccgaggcaggctgatcacgaggtcagaagatcaagaccatcctggccaacatggtgaaaccttgtctactaaaaatacaaaaaattagctgggcatggcggcatgcgcctgtagtcccagctactccctccagaggctgagaattgcttgaacctgggaagtgcaggttgcagtgagccaagattgtgccactgtattccagactgggtgacagagtgagactccatctcaaaaaaaaaaaagttgactctaccccctaatttggtaggagatgaaggagaaaaggatggcattgaattatagatacagttttgggatatatacaaggattgccttgatctggcacttactgatacaagcatttggagaagagaaaattcaaatataagaaatttcaatttgaatctgtggatataaggcatttgcctttgagtatgttcttgtaggagtaagactaccaccagtgacattcaattggttctattgcatagtacatgaatctattgtcactaaaaattaggttactaatcttaatttttttgaaatatatgattctcagtacaggactaattcatatgcttttcctgcatacattattttgatcatttggataacatcaatgaacactggctttttaacacctttgtttttcataccagtacctgaagtaggctcaataaaagagtctttacagtgcatacacgc

SEQ ID NO: 282849 - DNA, 193 bp, Homo sapiens
tttactaatttaatttctaactactcaggaatttgttttgatagcaattattttaatatttttcttctatttttcctacaaagaataaaatacagtgttggatccctttctcctgtttctgcaagtgtcctgaaaaagactgaacaaaaggaaaaagtggaattgcaacatatttctcagaaagattgccagg

SEQ ID NO: 282850 - DNA, 2693 bp, Homo sapiens
aattcggcacgagctctctgaggctgcgccaagacctgaagcggcggaccgagagcccgggtctgagactgagagagcaacggaatggaggcggggtagaggcggaaacacaacctgcagggccagagcgaggcgcgagaaggacggcggcgtgagggggcggggcgcgcagcgcgagaaggcaggcacgaggggcgagcgcgaggcggggcacggcgcgtggcgtgagacggggcggggcgcgcgtatcggcgccgcggccgcgtgacgcgttttcaaatcttcaaccgccgcagcccactcgtttgtgctttgcgccttcctcctccgcgccttggagccggatccggccccggaaacccgacctgcagacgcggtacctctactgcgtagaggccgtagctggcggaaggagagaggcggccgtcctgtcaacaggccgggggaagccgtgctttcgcggctgcccggtgcgacactttctccggacccagcatgtaggtgccgggcgactgccatgaactccggagccatgaggatccacagtaaaggacatttccagggtggaatccaagtcaaaaatgaaaaaaacagaccatctctgaaatctctgaaaactgataacaggccagaaaaatccaaatgtaagccactttggggaaaagtattttaccttgacttaccttctgtcaccatatctgaaaaacttcaaaaggacattaaggatctgggagggcgagttgaagaatttctcagcaaagatatcagttatcttatttcaaataagaaggaagctaaatttgcacaaaccttgggtcgaatttctcctgtaccaagtccagaatctgcatatactgcagaaaccacttcacctcatcccagccatgatggaagttcatttaagtcaccagacacagtgtgtttaagcagaggaaaattattagttgaaaaagctatcaaggaccatgattttattccttcaaatagtatattatcaaatgccttgtcatggggagtaaaaattcttcatattgatgacattagatactacattgaacaaaagaaaaaagagttgtatttactcaagaaatcaagtacttcagtaagagatgggggcaaaagagttggtagtggtgcacaaaaaacaagaacaggaagactcaaaaagccttttgtaaaggtggaagatatgagccaaagccctgcagtccatttgatgtagacaagccatctagtatgcaaaagcaaactcaggttaaactaagaatccaaacagatggcgataagtatggtggaacctcaattcaactccagttgaaagagaagaagaaaaaaggatattgtgaatgttgcttgcagaaatatgaagatctagaaactcaccttctaagtgagcaacacagaaactttgcacagagtaaccagtatcaagttgttgatgatattgtatctaagttagtttttgactttgtggaatatgaaaaggacacacctaaaaagaaaagaataaaatacagtgttggatccctttctcctgtttctgcaagtgtcctgaaaaagactgaacaaaaggaaaaagtggaattgcaacatatttctcagaaagattgccaggaagatgatacaacagtgaaggagcagaatttcctgtataaagagacccaggaaactgaaaaaaagctcctgtttatttcagagcccatcccccacccttcaaatgaattgagagggcttaatgagaaaatgagtaataaatgttccatgttaagtacagctgaagatgacataagacagaattttacacagctacctctacataaaaacaaacaggaatgcattcttgacatttccgaacacacattaagtgaaaatgacttagaagaactaagggtagatcactataaatgtaacatacaggcatctgtacatgtttctgatttcagtacagataatagtggatctcaaccaaaacagaagtcagatactgtgctttttccagcaaaggatctcaaggaaaaggaccttcattcaatatttactcatgattctggtctgataacaataaacagttcacaagagcacctaactgttcaggcaaaggctccattccatactcctcctgaggaacccaatgaatgtgacttcaagaatatggatagtttaccttctggtaaaatacatcgaaaagtgaaaataatattaggacgaaatagaaaagaaaatctggaaccaaatgctgaatttgataaaagaactgaatttattacacaagaagaaaacagaatttgtagttcaccggtacagtctttactagacttgtttcagactagtgaagagaaatcagaatttttgggtttcacaagctacacagaaaagagtggtatatgcaatgttttagatatttgggaagaggaaaattcagataatctgttaacagcgtttttctcgtccccttcaacttctacatttactggcttttagaatttaaaaaatgcatacttttcagaagtgataaggatcatattcttgaaatttttataaatatgtatggaaattcttaggatttttttaccagctttgtttacagacccaaatgtaaatattaaaaataaatatttgcaattttctacagaattgaatacctgttaaagaaaaattacagaataaacttgtgactggtcttgttttacatt

SEQ ID NO: 282851 - DNA, 2694 bp, Homo sapiens
aattcggcacgagctctctgaggctgcgccaagacctgaagcggcggaccgagagcccgggtctgagactgagagagcaacggaatggaggcggggtagaggcggaaacacaacctgcagggccagagcgaggcgcgagaaggacggcggcgtgagggggcggggcgcgcagcgcgagaaggcaggcacgaggggcgagcgcgaggcggggcacggcgcgtggcgtgagacggggcggggcgcgcgtatcggcgccgcggccgcgtgacgcgttttcaaatcttcaaccgccgcagcccactcgtttgtgctttgcgccttcctcctccgcgccttggagccggatccggccccggaaacccgacctgcagacgcggtacctctactgcgtagaggccgtagctggcggaaggagagaggcggccgtcctgtcaacaggccgggggaagccgtgctttcgcggctgcccggtgcgacactttctccggacccagcatgtaggtgccgggcgactgccatgaactccggagccatgaggatccacagtaaaggacatttccagggtggaatccaagtcaaaaatgaaaaaaacagaccatctctgaaatctctgaaaactgataacaggccagaaaaatccaaatgtaagccactttggggaaaagtattttaccttgacttaccttctgtcaccatatctgaaaaacttcaaaaggacattaaggatctgggagggcgagttgaagaatttctcagcaaagatatcagttatcttatttcaaataagaaggaagctaaatttgcacaaaccttgggtcgaatttctcctgtaccaagtccagaatctgcatatactgcagaaaccacttcacctcatcccagccatgatggaagttcatttaagtcaccagacacagtgtgtttaagcagaggaaaattattagttgaaaaagctatcaaggaccatgattttattccttcaaatagtatattatcaaatgccttgtcatggggagtaaaaattcttcatattgatgacattagatactacattgaacaaaagaaaaaagagttgtatttactcaagaaatcaagtacttcagtaagagatgggggcaaaagagttggtagtggtgcacaaaaaacaagaacaggaagactcaaaaagccttttgtaaaggtggaagatatgagccaactttataggccattttatcttcagctgaccaatatgccttttataaattattctattcagaagccctgcagtccatttgatgtagacaagccatctagtatgcaaaagcaaactcaggttaaactaagaatccaaacagatggcgataagtatggtggaacctcaattcaactccagttgaaagagaagaagaaaaaaggatattgtgaatgttgcttgcagaaatatgaagatctagaaactcaccttctaagtgagcaacacagaaactttgcacagagtaaccagtatcaagttgttgatgatattgtatctaagttagtttttgactttgtggaatatgaaaaggacacacctaaaaagaaaagaataaaatacagtgttggatccctttctcctgtttctgcaagtgtcctgaaaaagactgaacaaaaggaaaaagtggaattgcaacatatttctcagaaagattgccaggaagatgatacaacagtgaaggagcagaatttcctgtataaagagacccaggaaactgaaaaaaagctcctgtttatttcagagcccatcccccacccttcaaatgaattgagagggcttaatgagaaaatgagtaataaatgttccatgttaagtacagctgaagatgacataagacagaattttacacagctacctctacataaaaacaaacaggaatgcattcttgacatttccgaacacacattaagtgaaaatgacttagaagaactaagggtagatcactataaatgtaacatacaggcatctgtacatgtttctgatttcagtacagataatagtggatctcaaccaaaacagaagtcagatactgtgctttttccagcaaaggatctcaaggaaaaggaccttcattcaatatttactcatgattctggtctgataacaataaacagttcacaagagcacctaactgttcaggcaaaggctccattccatactcctcctgaggaacccaatgaatgtgacttcaagaatatggatagtttaccttctggtaaaatacatcgaaaagtgaaaataatattaggacgaaatagaaaagaaaatctggaaccaaatgctgaatttgataaaagaactgaatttattacacaagaagaaaacagaatttgtagttcaccggtacagtctttactagacttgtttcagactagtgaagagaaatcagaatttttgggtttcacaagctacacagaaaagagtggtatatgcaatgttttagatatttgggaagaggaaaattcagataatctgttaacagcgtttttctcgtccccttcaacttctacatttactggcttttagaatttaaaaaatgcatacttttcagaagtgataaggatcatattcttgaaatttttataaatatgtatggaaattcttaggatttttttaccagctttgtttacagacccaaatgtaaatattaaaaataaatatttgcaattttctacaga

SEQ ID NO: 282852 - DNA, 3837 bp, Homo sapiens
  misc_feature (2750)..(2750): n is a, c, g, or t
aattcggcacgagctctctgaggctgcgccaagacctgaagcggcggaccgagagcccgggtctgagactgagagagcaacggaatggaggcggggtagaggcggaaacacaacctgcagggccagagcgaggcgcgagaaggacggcggcgtgagggggcggggcgcgcagcgcgagaaggcaggcacgaggggcgagcgcgaggcggggcacggcgcgtggcgtgagacggggcggggcgcgcgtatcggcgccgcggccgcgtgacgcgttttcaaatcttcaaccgccgcagcccactcgtttgtgctttgcgccttcctcctccgcgccttggagccggatccggccccggaaacccgacctgcagacgcggtacctctactgcgtagaggccgtagctggcggaaggagagaggcggccgtcctgtcaacaggccgggggaagccgtgctttcgcggctgcccggtgcgacactttctccggacccagcatgtaggtgccgggcgactgccatgaactccggagccatgaggatccacagtaaaggacatttccagggtggaatccaagtcaaaaatgaaaaaaacagaccatctctgaaatctctgaaaactgataacaggccagaaaaatccaaatcgagttgaagaatttctcagcaaagatatcagttatcttatttcaaataagaaggaagctaaatttgcacaaaccttgggtcgaatttctcctgtaccaagtccagaatctgcatatactgcagaaaccacttcacctcatcccagccatgatggaagttcatttaagtcaccagacacagtgtgtttaagcagaggaaaattattagttgaaaaagctatcaaggaccatgattttattccttcaaatagtatattatcaaatgccttgtcatggggagtaaaaattcttcatattgatgacattagatactacattgaacaaaagaaaaaagagttgtatttactcaagaaatcaagtacttcagtaagagatgggggcaaaagagttggtagtggtgcacaaaaaacaagaacaggaagactcaaaaagccttttgtaaaggtggaagatatgagccaactttataggccattttatcttcagctgaccaatatgccttttataaattattctattcagaagccctgcagtccatttgatgtagacaagccatctagtatgcaaaagcaaactcaggttaaactaagaatccaaacagatggcgataagtatggtggaacctcaattcaactccagttgaaagagaagaagaaaaaaggatattgtgaatgttgcttgcagaaatatgaagatctagaaactcaccttctaagtgagcaacacagaaactttgcacagagtaaccagtatcaagttgttgatgatattgtatctaagttagtttttgactttgtggaatatgaaaaggacacacctaaaaagaaaagaataaaatacagtgttggatccctttctcctgtttctgcaagtgtcctgaaaaagactgaacaaaaggaaaaagtggaattgcaacatatttctcagaaagattgccaggaagatgatacaacagtgaaggagcagaatttcctgtataaagagacccaggaaactgaaaaaaagctcctgtttatttcagagcccatcccccacccttcaaatgaattgagagggcttaatgagaaaatgagtaataaatgttccatgttaagtacagctgaagatgacataagacagaattttacacagctacctctacataaaaacaaacaggaatgcattcttgacatttccgaacacacattaagtgaaaatgacttagaagaactaagggtagatcactataaatgtaacatacaggcatctgtacatgtttctgatttcagtacagataatagtggatctcaaccaaaacagaagtcagatactgtgctttttccagcaaaggatctcaaggaaaaggaccttcattcaatatttactcatgattctggtctgataacaataaacagttcacaagagcacctaactgttcaggcaaaggctccattccatactcctcctgaggaacccaatgaatgtgacttcaagaatatggatagtttaccttctggtaaaatacatcgaaaagtgaaaataatattaggacgaaatagaaaagaaaatctggaaccaaatgctgaatttgataaaagaactgaatttattacacaagaagaaaacagaatttgtagttcaccggtacagtctttactagacttgtttcagactagtgaagagaaatcagaatttttgggtttcacaagctacacagaaaagagtggtatatgcaatgttttagatatttgggaagaggaaaattcagataatctgttaacagcgtttttctcgtccccttcaacttctacatttactggcttttagaatttaaaaaatgcatacttttcagaagtgataaggatcatattcttgaaatttttataaatatgtatggaaattcttaggatttttttaccagctttgtttacagacccaaatgtaaatattaaaaataaatatttgcaattttctacagaattgaatacctgttaaagaaaaattacagaataaacttgtgactggtcttgttttacattatatatatgttcgtaattgtttcctgagaattacaatgaataataatttgctttgtcactgaaaaccaccagtgaagtgcaatttggngaatatcaaacttagcattatacatttggatattctagttgtattgtaaattttaaaagattatcaggataacatgaccttgccttgaaaaacctaaatttcatacagaaaggaaaaatacatttctatgcttgaattctggaaatcatcagaaatattgacacttgagggtcactggtggaccatgctagtattttggtgctgagtaattagattatgtataggggtaactggaagccatgaaggaaggacttaaccaggctaccaagtggaatataatttatctgctatttttaattacttaccttgtaaataactttaataatattcaaaagttgactctcctgtggctcatgccacaggatcccagcactttgggaggccgaggcaggctgatcacgaggtcagaagatcaagaccatcctggccaacatggtgaaaccttgtctactaaaaatacaaaaaattagctgggcatggcggcatgcgcctgtagtcccagctactccctccagaggctgagaattgcttgaacctgggaagtgcaggttgcagtgagccaagattgtgccactgtattccagactgggtgacagagtgagactccatctcaaaaaaaaaaaagttgactctaccccctaatttggtaggagatgaaggagaaaaggatggcattgaattatagatacagttttgggatatatacaaggattgccttgatctggcacttactgatacaagcatttggagaagagaaaattcaaatataagaaatttcaatttgaatctgtggatataaggcatttgcctttgagtatgttcttgtaggagtaagactaccaccagtgacattcaattggttctattgcatagtacatgaatctattgtcactaaaaattaggttactaatcttaatttttttgaaatatatgattctcagtacaggactaattcatatgcttttcctgcatacattattttgatcatttggataacatcaatgaacactggctttttaacacctttgtttttcataccagtacctgaagtaggctcaataaaagagtctttacagtgcatacacgc

SEQ ID NO: 282853 - DNA, 118 bp, Homo sapiens
tgttaaggtagtgattctttttatgcttccaagtatctttcatgggtacagtcaatgacattttcctttgtttttctatctttagtggagatagtggacccagtggatatctatctta

SEQ ID NO: 282854 - DNA, 478 bp, Homo sapiens
attggatgactgattattggacagaatggcatcttgtcaacacctgcggtctcctgcattatcaggaagatcaaggcagctggtggaatcattctaacagccagccactgccctggaggaccagggggagagtttggagtgaagtttaatgttgccaatggaggtatgtggttcagtatatgccttaataatcacgatttccttcctcttatattattatagtctcacagtgaccctttgatgatagacaagcaaggtgcagaggacctagctcagaaaaatttagtgaggtgcccaaagtgatccaacaaagaagtggcatgatgggctcatgaacccatttgggtggtctcttggtcccctgtactcttcagcataaactattgaatagttgatgcttatctgatatggaaggactctgaattttaacattaaaacataccctgaaggtcgttgtctaaatgacaatgaccctcat

SEQ ID NO: 282855 - DNA, 1970 bp, Homo sapiens
  misc_feature (2)..(2): n is a, c, g, or t
  misc_feature (4)..(4): n is a, c, g, or t
  misc_feature (6)..(6): n is a, c, g, or t
  misc_feature (8)..(8): n is a, c, g, or t
  misc_feature (1338)..(1338): n is a, c, g, or t
  misc_feature (1866)..(1866): n is a, c, g, or t
gnangngngggcggtccccaggcgggcgggcgcagggcgcagggcgccgacctgctggagagggggccccgggcgcgaggcggagtcccggcgcgcagccaggctggtgggggcccccggcaggctgcagattccctccggctccgggagccgcagcaggaccggccaggaggcgccatagaggggagccccatcccggtgctgacagtgcccaccgcgccctacgaggaccagcggccgtccggcggcgggggtctgcggcgacccaccggcctcttcgagggccagcgcaactacctgcccaactttatccagagcgtgctgtcgtccatcgacctgcgcgaccgtcagggctgcaccatggtggtgggcagcgacggcaggtactttagcaggacggccatcgagatcgtggtgcagatggccgcggccaacgggattggatgactgattattggacagaatggcatcttgtcaacacctgcggtctcctgcattatcaggaagatcaaggcagctggtggaatcattctaacagccagccactgccctggaggaccagggggagagtttggagtgaagtttaatgttgccaatggaggtcctgcacccgatgttgtctcagacaaaatctaccaaatcagcaaaacgattgaggaatatgctatatgtcctgatctccaaatcgacctatctcgactaggaagacaagaatttgacctagagaacaaattcaaaccattcagagtggagatagtggacccagtggatatctatcttaacctccttcagaccatctttgactttcatgccatcaagagtttgctgactgggcccagccaactgaagattcgcgttgatgcaatgcatggagttatggaaccttatgtgagaaaagttctgtgtgatgagctgggggccccagccaattctgcaataaactgtgttcccctggaagactttggagggcagcaccctgacccaaacctgacatatgcaatgactcttctggaagcaatgaaaggaggagaatatggatttggagctgcatttgatgctgatggggaccgttatatgatcctaggccaaaatggcttctttgtgagcccttctgactccctggccatcattgctgccaacctctcttgcattccatatttccatcagatgggggtccgcgggtttgggaggagtatgccaaccagcatggccctggacagagagacatctggtgatactatctgttgattgcaaagaaaaatatacccgactaataagaagaaaatgaatggtgcataatgacccaatctcctttggatataataaaactatgcctgntttgtggtcttcatttacatttagaatacctgaaacttggtaatttatgaagaaaaggaattcatttcttacagttatggaggctgagaagtccaaggtccaggggcataacagctcagagtaatttgatcgtctgaagccttctctcagctcttcaaagtcattctccgtccagctttgttccgttgctggtgagcagctgcgttcctctggaggaggagaggcgctctgatttttagagtttccagtttttctgttctgttttttccccatctttgtggttttatctacttttggtctttgatgatggtgatgatgtacagatgggtttttggtgtgtggatgtcctttctgtttgttagttttccttctaacagacaggaccctcagctgtaggtctgttggagtaccctgcagtgtgaggtgtcagtgtgcacctgctggagggtgcctcccagttagaataactaatatagagaagtgcttaaaggagctgatggagctgaaaaccaaggctcgagaactacnggaagaatgcagaagcctcaggagccgatgcgatcaactggaagaaagggtatcagcaatggcagatgaaatgaatgaaatgaagcgagaaggaaagtttagag

SEQ ID NO: 282856 - DNA, 984 bp, Homo sapiens
  misc_feature (19)..(19): n is a, c, g, or t
tccgtacggcagtaccctnggggtaatggtagcgaggctgggtggcgccttcccaggccttcccacgcatcacccagctccttgggctgcccacctaccgctaccacgtcctgctggggctagtcgtgtccctgggcggcttgacggagtcgacgatccggcactccacccagagcctctttgagtacatgaagggcattcagagcgacccgcaggccctgggcagcttcagcgggacccttctgcagatctttgaggacaaccttctgaatgagagggtgtccgtgccgctgctgaagacgctggaccacgtgctcacccacggctgcttcgacatcttcaccacggaggaggaccacccctttgctgtgaagttgcttgcgctctgtaagaaagaaatcaagaattcaaaagatatccagaagctcctgtcaggcatcgcagtgttctgcgggatggtgcagttccccggcgacgtgaggaggcaggccctcctgcagctgtgtctgctcctctgccaccgtttcccgctgatccggaagaccacggccagccaggtgtacgagacattgctcacctacagtgacgtcgtgggcgcggatgtgctggacgaggtggtgactgtgctcagtgacactgcgtgggacgcggagcttgcagtggtgagagagcagcgcaaccgtctgtgtgaccttctgggcgtacccaggccccagctggtgccccagcctggtgcctgctgaagccagtcctggagcccatacctcacccctgcctggtgaggatgtcttgttcctgagggaggccggtgtggaaagcctcgcacagtggtgcctccagctgttgaagggtagcgctggcccttggaggctggcactagctgacagcttttcctctctgcacctgcgctctggtgacttggggtggacgcctctgccttcacttgaacacaaatgtgcttcctataaaatcatgtaccaagaa

SEQ ID NO: 282857 - DNA, 1043 bp, Homo sapiens
  misc_feature (65)..(65): n is a, c, g, or t
gagagaattgaaaatattgttcccagtccgatgggcccccgtgtaactgggaggtgcaccttttncgcagccttccccagcaatatcaccgggccatgctgccccacctttcccgtttacacgggcccgtggctagtcgtgtccctgggcggcttgacggagtcgacggtgaggaggcgtcgggctggctggggcaggaggtggctccaggagtgcctggtgcttccctgtctcttgggagcgtgtatggagctgggccttttcttccattgctttctatctctctcgggcatatttggttagggggtcaggggcccagtgtcttcctcatgacccaggaggcttagggcctgtgggatggttgagtctgatgaaggtgggacagggccagcgccactctcttcctgcggccgcagccttggagctcccagcgtcccctcggggttcaatcctccaggacctgtgtctgatgcctgcatgtgggtacctgggctccatcaggttctagatcggcctccgccctccactttcagggctccaggcccagcttctcatgtctgtggggagggtctccagagccttggtctgtggctgagctgtggaacttgaaggcctctctgcatcttgtcactcgtggcccctgcaccttgggtcatgacctgctttatgtggcaaccctgtgacagctgctaagtcctagaaaacacgtaacaggacgtgaggtgccctctgcgccgtgtgggcgcgtgcggggagacccgggccccaggacgtgaggtgccctctgcgccgtgcgggcgcgtgcggggagacccgggccacatgcgagcggggccccgagacattctgcactcgggaattgcggggattatcaaatcccgcttcagtgggaaacgtgagcgaaacccaaggtgagtggccgcagcctttcgtcacgtgctctcccgcatgtcctaagtgagggctcaggctgagctgccgttgccgagagccttgtgtctgcttcgggtgtctgcactgtgagtggctccgtgctggcgtcc

SEQ ID NO: 282858 - DNA, 979 bp, Homo sapiens
  misc_feature (25)..(25): n is a, c, g, or t
  misc_feature (33)..(33): n is a, c, g, or t
  misc_feature (728)..(728): n is a, c, g, or t
  misc_feature (745)..(745): n is a, c, g, or t
  misc_feature (864)..(864): n is a, c, g, or t
  misc_feature (904)..(904): n is a, c, g, or t
ttaggctagtacgagctgggtgttnaatctggncgaggctgggctctggtccaggctttgtagaccgtgcaggcggctgcatccccgacctgacccaggcctgctcgctctggtgtgcaccgacctgccagctttgtggcactttgtggcatggggctcaggccgatggagggcactttccctcatggtattgatattttgaccacagctgactattttgccgtcggtaacagatccaactgtttcctggttataagggtcatccgagagttggctgcgagggcgctgcacaacctggcccagcaggcacccgagttcagcgccacgcaagtcttcccgaggctgctgtccatgacactgagtccagatcttcacatgaggcatgggtcgattctcgcctgcgcagaagttgcttacgccttgtacaaacttgcagcccaagagaacaggcccgtcacggaccatctggacgagcaggcagtgcagggcctgaagcagattcaccagcagctctatgatcgtcagttatacaggggtctgggaggacagctcatgagacaagcagtgtgtgttttaatagaaaagttgtcactttccaaaatgccctttagaggtgacaccgtaattgatggttggcaatggctgataaatgacactttgagacatctccatctcatctcaagtcactcccgccagcagatgaagatgcagcagtctcgaccctgtgnagctacagaaatgcatnaagccacgtgagtgggcctgttctttctgtcaatcatctggcatagagtatccattttgtgtccatcataggcaagtgcaagccttatataatgttaccaacatagatcacacctcagnatcttgcttgatgtgagtgctcatttttccatcaaacctntccacctacttcctccctccctccctttttgctgtgattcagtccatatattgggcatctagcatattccaggtc

SEQ ID NO: 282859 - DNA, 901 bp, Homo sapiens
cacaggcccctgggttgagaatcggacgaggtggtcataagtgtgtttattgccggctttcctgagtacacgcagccaatgatagaccacctggttaccatgaagatcagccactgggatggggtcatccgagagttggctgcgagggcgctgcacaacctggcccagcaggcacccgagttcagcgccacgcaagtcttcccgaggctgctgtccatgacactgagtccagatcttcacatgaggcatgggtcgattctcgcctgcgcagaagttgcttacgccttgtacaaacttgcagcccaagagaacaggcccgtcacggaccatctggacgagcaggcagtgcagggcctgaagcagattcaccagcagctctatgatcgtcagttatacaggggtctgggaggacagctcatgagacaagcagtgtgtgttttaatagaaaagttgtcactttccaaaatgccctttagaggtgacaccgtaattgatggttggcaatggctgataaatgacactttgagacatctccatctcatctcaagtcactcccgccagcagatgaaggatgcagcagtctcggccctggctgctctatgcagtgaatattacatgaaggagccgggggaggcagatcccgcaattcaggaggagctgatcacgcagtacctggctgagcttcggaaccccgaggagatgactcgctgtggcttctcgttggccttgggcgcccttccaggcttccttctgaaaggccggctccagcagtctcccggttagagcgttcccacattcccgggacgtagtcgtgagtcggagagcggtgagctgcgggtgcggcgtggtgagcggccgaatgggggggcatgtcttgggccgggtgtgtaccggggggcgc

SEQ ID NO: 282860 - DNA, 877 bp, Homo sapiens
ccacactgggctgccagagcacagtgaagggagcccccagggctgtggtgtcccggggctgtctcagcagcctcagaagttaggactttttttttgttaattgaatagccttcacatttgttgcttgtgcaggatctaattgagttaaagatttgggtttatattggtgggagccgggggagaccgtttgaaggaaaagatttaggggtaacaaaagaataaaagtttcccaaaatgtgatgtataaaaatttacagaatgctggtatttccctcaataagagcttacacaatttaacagccatgagaggaaggggccttagacttaacacaacgtggagaatgttcactttggcttttccacagattcctctcaaaggttaccatcgactttaagattagtattaatagaagctgtttttgctgttgtttttgatttcatggtgtttttgattgcctgggtacgctaacttgattttttgacagatggttggcaatggctgataaatgacactttgagacatctccatctcatctcaagtcactcccgccagcagatgaagaggtacagtgagcatgggcgttcccggccggcgctgtggcggtgttagtgtgttagtcacggatggtgtttgtgttggcgactgtgcatcatgaggctgtccctgcagtagcctgataactgacaaatgggggcataattctatttggaatcccggatggtagcgtctacacggtttataaccagaaaatccaatacagccattggaatccgaatgtttaattttttattgcttctggctgttttaattatagttacctttgaaatactttttctgcatcaatagtaactgtgctctgttgagttccgtgtcctg

SEQ ID NO: 282861 - DNA, 4444 bp, Homo sapiens
gggccagcgtcggttgccgccttagcgggcgcctccttttcatccctcatccttcatccctggctttcgcgctctagcggagtgggatctgcgaacacgtgaggcgggggcgcggtccccaggctgccgagatggccctgagcgacgaaccggccgcgggcggccccgaggaggaggcggaggacgagacactggcctttggcgcggcgctggaagcgttcggcgagagcgcggagacccgggcgctgctgggccgcctgcgggaggtgcacggcggcggcgcggagcgcgaggtggccctggagcggttccgcgtaataatggacaaataccaggagcagcctcatctgttggacccgcaccttgaatggatgatgaacttgttgttggacatagtgcaagatcagacatctccagcttcccttgtacatctggcttttaaatttctttacatcatcaccaaggttcgaggctataaaacatttcttcgtttatttcctcatgaagttgccgatgtagagcctgttttagatttggtcacaattcagaatcccaaggaccatgaagcttgggaaacccgctacatgcttttgctctggctctccgtgacctgcctgatcccttttgatttttctcgccttgacgggaacctcctcacccagcctgggcaagcacgaatgtccataatggaccgtattctccaaatagcagagtcctacttgattgtcagtgacaaggcccgagatgcagctgctgtccttgtgtccagatttatcacacgtcctgatgtcaagcaaagcaagatggctgagttcctggactggagcctgtgcaatctggcccgttcctccttccagaccatgcagggggtcatcaccatggatgggacgctgcaggccctggcacaaatatttaaacatggaaaacgtgaagactgtttgccctatgctgccactgtcctcaggtgcctcgatggctgcagactccctgagagcaaccagaccctgctgcggaagctgggggtgaagcttgtgcagcgactggggctgacattcctgaagccgaaggtggcagcatggaggtaccagcgtggctgccgatctttggctgcaaatctgcagctcctcactcagggtcagagtgagcagaagccactcatcctgaccgaagatgacgacgaagatgacgacgtcccagagggggtggagcgtgtgatagagcagctgctggtcgggctgaaggacaaggacacggtcgtgcggtggtctgcagccaagggcatcggtaggatggctggcaggcttcccagagccctggcggatgatgtggtcgggtctgtgctggactgcttcagtttccaggagactgacaaggcgtggcatgggggatgtctggcgctggcagagctgggcaggagaggcctgttgctgccgtctcgactcgtggatgttgtcgccgtgatcctgaaggcgctgacctacgacgagaagcggggtgcctgcagcgtgggcaccaacgtcagggacgccgcctgctacgtgtgctgggccttcgcgcgtgcctatgagcctcaggagctgaagccctttgtgactgcaatctcgagtgcactggtgattgctgcggtgtttgaccgagacataaactgcagaagagcagcctctgccgccttccaggagaatgtggggagacagggcactttccctcatggtattgatattttgaccacagctgactattttgccgtcggtaacagatccaactgtttcctggttataagtgtgtttattgccggctttcctgagtacacgcagccaatgatagaccacctggttaccatgaagatcagccactgggatggggtcatccgagagttggctgcgagggcgctgcacaacctggcccagcaggcacccgagttcagcgccacgcaagtcttcccgaggctgctgtccatgacactgagtccagatcttcacatgaggcatgggtcgattctcgcctgcgcagaagttgcttacgccttgtacaaacttgcagcccaagagaacaggcccgtcacggaccatctggacgagcaggcagtgcagggcctgaagcagattcaccagcagctctatgatcgtcagttatacaggggtctgggaggacagctcatgagacaagcagtgtgtgttttaatagaaaagttgtcactttccaaaatgccctttagaggtgacaccgtaattgatggttggcaatggctgataaatgacactttgagacatctccatctcatctcaagtcactcccgccagcagatgaaggatgcagcagtctcggccctggctgctctatgcagtgaatattacatgaaggagccgggggaggcagatcccgcaattcaggaggagctgatcacgcagtacctggctgagcttcggaaccccgaggagatgactcgctgtggcttctcgttggccttgggcgcccttccaggcttccttctgaaaggccggctccagcaggttctcacaggtttaagagcagttacccacacttcccccgaggacgtaagttttgctgagtccaggagagacggcttgaaggccattgcgaggatttgccagactgttggtgtgaaagcaggagccccagacgaagctgtgtgcggagagaatgtttcccagatttactgtgcgctgctgggctgcatggacgactacaccacggacagcagaggggacgtgggcacctgggtccgcaaggccgccatgaccagtctgatggatctgacacttctgctggctcggagccagcctgagctgatcgaggcccatacctgtgagcgcatcatgtgctgtgtggcccagcaggccagtgagaagattgaccgtttccgtgctcacgccgccagcgtgttcctgacgctcctgcactttgacagccctcccatcccccacgtgccccaccgaggagaactggaaaagctgtttcccaggtccgatgtggcctccgtgaactggagtgcaccttcccaggccttcccacgcatcacccagctccttgggctgcccacctaccgctaccacgtcctgctggggctagtcgtgtccctgggcggcttgacggagtcgacgatccggcactccacccagagcctctttgagtacatgaagggcattcagagcgacccgcaggccctgggcagcttcagcgggacccttctgcagatctttgaggacaaccttctgaatgagagggtgtccgtgccgctgctgaagacgctggaccacgtgctcacccacggctgcttcgacatcttcaccacggaggaggaccacccctttgctgtgaagttgcttgcgctctgtaagaaagaaatcaagaattcaaaagatatccagaagctcctgtcaggcatcgcagtgttctgcgggatggtgcagttccccggcgacgtgaggaggcaggccctcctgcagctgtgtctgctcctctgccaccgtttcccgctgatccggaagaccacggccagccaggtgtacgagacattgctcacctacagtgacgtcgtgggcgcggatgtgctggacgaggtggtgactgtgctcagtgacactgcgtgggacgcggagcttgcagtggtgagagagcagcgcaaccgtctgtgtgaccttctgggcgtacccaggccccagctggtgccccagcctggtgcctgctgaagccagtcctggagcccatacctcacccctgcctggtgaggatgtcttgttcctgagggaggccggtgtggaaagcctcgcacagtggtgcctccagctgttgaagggtagcgctggcccttggaggctggcactagctgacagcttttcctctctgcacctgcgctctggtgacttggggtggacgcctctgccttcacttgaacacaaatgtgcttcctataaaatcatgtaccaagaagaagttcctgccttttgtctctgagcctgatgtgtgtaggggtgatggaaaggctcactgcccaggggtcagccagaggggaggtgggctgcactcctcctgcctggagaccaggcccccttcttgcctggtgctgtccctgctgtgggagacgtctggccacaggcagtgccccacccagtcttggagagagatgaatgttaaatcagaggttcaaatgctagagaactgagaagccctggtggcaggcatggtctggagtgctgggcagatgctgtttctgggcccgtctgcctggtgggggtgctgtcctcccccctgtgcacacgtgagcatcgtgcatgtggcccctctgcagtgcaggagtcactgattgatgggtgtgccgaccagcagcttcacaaatgtctgctgcaaggggaatcgtcagagtccaatgtgtgcctctacagtaatgtcggaaataaataccattcttgaaataaaaaaaaaa

SEQ ID NO: 282862 - DNA, 3951 bp, Homo sapiens
gggccagcgtcggttgccgccttagcgggcgcctccttttcatccctcatccttcatccctggctttcgcgctctagcggagtgggatctgcgaacacgtgaggcgggggcgcggtccccaggctgccgagatggccctgagcgacgaaccggccgcgggcggccccgaggaggaggcggaggacgagacactggcctttggcgcggcgctggaagcgttcggcgagagcgcggagacccgggcgctgctgggccgcctgcgggaggtgcacggcggcggcgcggagcgcgaggtggccctggagcggttccgcgtaataatggacaaataccaggagcagcctcatctgttggacccgcaccttgaatggatgatgaacttgttgttggacatagtgcaagatcagacatctccagcttcccttgtacatctggcttttaaatttctttacatcatcaccaaggttcgaggctataaaacatttcttcgtttatttcctcatgaagttgccgatgtagagcctgttttagatttggtcacaattcagaatcccaaggaccatgaagcttgggaaacccgctacatgcttttgctctggctctccgtgacctgcctgatcccttttgatttttctcgccttgacgggaacctcctcacccagcctgggcaagcacgaatgtccataatggaccgtattctccaaatagcagagtcctacttgattgtcagtgacaaggcccgagatgcagctgctgtccttgtgtccagatttatcacacgtcctgatgtcaagcaaagcaagatggctgagttcctggactggagcctgtgcaatctggcccgttcctccttccagaccatgcagggggtcatcaccatggatgggacgctgcaggccctggcacaaatatttaaacatggaaaacgtgaagactgtttgccctatgctgccactgtcctcaggtgcctcgatggctgcagactccctgagagcaaccagaccctgctgcggaagctgggggtgaagcttgtgcagcgactggggctgacattcctgaagccgaaggtggcagcatggaggtaccagcgtggctgccgatctttggctgcaaatctgcagctcctcactcagggtcagagtgagcagaagccactcatcctgaccgaagatgacgacgaagatgacgacgtcccagagggggtggagcgtgtgatagagcagctgctggtcgggctgaaggacaaggacacggtcgtgcggtggtctgcagccaagggcatcggtaggatggctggcaggcttcccagagccctggcggatgatgtggtcgggtctgtgctggactgcttcagtttccaggagactgacaaggcgtggcatgggggatgtctggcgctggcagagctgggcaggagaggcctgttgctgccgtctcgactcgtggatgttgtcgccgtgatcctgaaggcgctgacctacgacgagaagcggggtgcctgcagcgtgggcaccaacgtcagggacgccgcctgctacgtgtgctgggccttcgcgcgtgcctatgagcctcaggagctgaagccctttgtgactgcaatctcgagtgcactggtgattgctgcggtgtttgaccgagacataaactgcagaagagcagcctctgccgccttccaggagaatgtggggagacagggcactttccctcatggtattgatattttgaccacagctgactattttgccgtcggtaacagatccaactgtttcctggttataagtgtgtttattgccggctttcctgagtacacgcagccaatgatagaccacctggttaccatgaagatcagccactgggatggggtcatccgagagttggctgcgagggcgctgcacaacctggcccagcaggcacccgagttcagcgccacgcaagtcttcccgaggctgctgtccatgacactgagtccagatcttcacatgaggcatgggtcgattctcgcctgcgcagaagttgcttacgccttgtacaaacttgcagcccaagagaacaggcccgtcacggaccatctggacgagcaggcagtgcagggcctgaagcagattcaccagcagctctatgatcgtcagttatacaggggtctgggaggacagctcatgagacaagcagtgtgtgttttaatagaaaagttgtcactttccaaaatgccctttagaggtgacaccgtaattgatggttggcaatggctgataaatgacactttgagacatctccatctcatctcaagtcactcccgccagcagatgaaggatgcagcagtctcggccctggctgctctatgcagtgaatattacatgaaggagccgggggaggcagatcccgcaattcaggaggagctgatcacgcagtacctggctgagcttcggaaccccgaggagatgactcgctgtggcttctcgttggccttgggcgcccttccaggcttccttctgaaaggccggctccagcaggttctcacaggtttaagagcagttacccacacttcccccgaggacgtaagttttgctgagtccaggagagacggcttgaaggccattgcgaggatttgccagactgttggtgtgaaagcaggagccccagacgaagctgtgtgcggagagaatgtttcccagatttactgtgcgctgctgggctgcatggacgactacaccacggacagcagaggggacgtgggcacctgggtccgcaaggccgccatgaccagtctgatggatctgacacttctgctggctcggagccagcctgagctgatcgaggcccatacctgtgagcgcatcatgtgctgtgtggcccagcaggccagtgagaagattgaccgtttccgtgctcacgccgccagcgtgttcctgacgctcctgcactttgacagccctcccatcccccacgtgccccaccgaggagaactggaaaagctgtttcccaggtccgatgtggcctccgtgaactggagtgcaccttcccaggccttcccacgcatcacccagctccttgggctgcccacctaccgctaccacgtcctgctggggctagtcgtgtccctgggcggcttgacggagtcgacgatccggcactccacccagagcctctttgagtacatgaagggcattcagagcgacccgcaggccctgggcagcttcagcgggacccttctgcagatctttgaggacaaccttctgaatgagagggtgtccgtgccgctgctgaagacgctggaccacgtgctcacccacggctgcttcgacatcttcaccacggaggaggaccacccctttgctgtgaagttgcttgcgctctgtaagaaagaaatcaagaattcaaaagatatccagaagctcctgtcaggcatcgcagtgttctgcgggatggtgcagttccccggcgacgtgaggaggcaggccctcctgcagctgtgtctgctcctctgccaccgtttcccgctgatccggaagaccacggccagccaggtgtacgagacattgctcacctacagtgacgtcgtgggcgcggatgtgctggacgaggtggtgactgtgctcagtgacactgcgtgggacgcggagcttgcagtggtgagagagcagcgcaaccgtctgtgtgaccttctgggcgtacccaggccccagctggtgccccagcctggtgcctgctgaagccagtcctggagcccatacctcacccctgcctggtgaggatgtcttgttcctgagggaggccggtgtggaaagcctcgcacagtggtgcctccagctgttgaagggtagcgctggcccttggaggctggcactagctgacagcttttcctctctgcacctgcgctctggtgacttggggtggacgcctctgccttcacttgaacacaaatgtgcttcctataaaatcatgtaccaagaa

SEQ ID NO: 282863 - DNA, 4153 bp, Homo sapiens
  misc_feature (745)..(745): n is a, c, g, or t
cggccagggtgcggctggttcttgggtgtgcctcacagacacaggacactttttagggttgcttttgaatgtgcctgagttgtcgccgtgatcctgaaggcgctgacctacgacgagaagcggggtgcctgcagcgtgggcaccaacgtcagggacgccgcctgctacgtgtgctgggccttcgcgcgtgcctatgagcctcaggagctgaagccctttgtgactgcaatctcgagtgcactggtgattgctgcggtgtttgaccgagacataaactgcagaagagcagcctctgccgccttccaggagaatgtggggagacagggcactttccctcatggtattgatattttgaccacagctgactattttgccgtcggtaacagatccaactgtttcctggttataagtgtgtttattgccggctttcctgagtacacgcagccaatgatagaccacctggttaccatgaagatcagccactgggatggggtcatccgagagttggctgcgagggcgctgcacaacctggcccagcaggcacccgagttcagcgccacgcaagtcttcccgaggctgctgtccatgacactgagtccagatcttcacatgaggcatgggtcgattctcgcctgcgcagaagttgcttacgccttgtacaaacttgcagcccaagagaacaggcccgtcacggaccatctggacgagcaggcagtgcagggcctgaagcagattcaccagcagntctatgatcgtcagttatacaggggtctgggaggacagctcatgagacaagcagtgtgtgttttaatagaaaagttgtcactttccaaaatgccctttagaggtgacaccgtaattgatggttggcaatggctgataaatgacactttgagacatctccaaatagcagagtcctacttgattgtcagtgacaaggcccgagatgcagctgctgtccttgtgtccagatttatcacacgtcctgatgtcaagcaaagcaagatggctgagttcctggactggagcctgtgcaatctggcccgttcctccttccagaccatgcagggggtcatcaccatggatgggacgctgcaggccctggcacaaatatttaaacatggaaaacgtgaagactgtttgccctatgctgccactgtcctcaggtgcctcgatggctgcagactccctgagagcaaccagaccctgctgcggaagctgggggtgaagcttgtgcagcgactggggctgacattcctgaagccgaaggtggcagcatggaggtaccagcgtggctgccgatctttggctgcaaatctgcagctcctcactcagggtcagagtgagcagaagccactcatcctgaccgaagatgacgacgaagatgacgacgtcccagagggggtggagcgtgtgatagagcagctgctggtcgggctgaaggacaaggacacggtcgtgcggtggtctgcagccaagggcatcggtaggatggctggcaggcttcccagagccctggcggatgatgtggtcgggtctgtgctggactgcttcagtttccaggagactgacaaggcgtggcatgggggatgtctggcgctggcagagctgggcaggagaggcctgttgctgccgtctcgactcgtggatgttgtcgccgtgatcctgaaggcgctgacctacgacgagaagcggggtgcctgcagcgtgggcaccaacgtcagggacgccgcctgctacgtgtgctgggccttcgcgcgtgcctatgagcctcaggagctgaagccctttgtgactgcaatctcgagtgcactggtgattgctgcggtgtttgaccgagacataaactgcagaagagcagcctctgccgccttccaggagaatgtggggagacagggcactttccctcatggtattgatattttgaccacagctgactattttgccgtcggtaacagatccaactgtttcctggttataagtgtgtttattgccggctttcctgagtacacgcagccaatgatagaccacctggttaccatgaagatcagccactgggatggggtcatccgagagttggctgcgagggcgctgcacaacctggcccagcaggcacccgagttcagcgccacgcaagtcttcccgaggctgctgtccatgacactgagtccagatcttcacatgaggcatgggtcgattctcgcctgcgcagaagttgcttacgccttgtacaaacttgcagcccaagagaacaggcccgtcacggaccatctggacgagcaggcagtgcagggcctgaagcagattcaccagcagctctatgatcgtcagttatacaggggtctgggaggacagctcatgagacaagcagtgtgtgttttaatagaaaagttgtcactttccaaaatgccctttagaggtgacaccgtaattgatggttggcaatggctgataaatgacactttgagacatctccatctcatctcaagtcactcccgccagcagatgaaggatgcagcagtctcggccctggctgctctatgcagtgaatattacatgaaggagccgggggaggcagatcccgcaattcaggaggagctgatcacgcagtacctggctgagcttcggaaccccgaggagatgactcgctgtggcttctcgttggccttgggcgcccttccaggcttccttctgaaaggccggctccagcaggttctcacaggtttaagagcagttacccacacttcccccgaggacgtaagttttgctgagtccaggagagacggcttgaaggccattgcgaggatttgccagactgttggtgtgaaagcaggagccccagacgaagctgtgtgcggagagaatgtttcccagatttactgtgcgctgctgggctgcatggacgactacaccacggacagcagaggggacgtgggcacctgggtccgcaaggccgccatgaccagtctgatggatctgacacttctgctggctcggagccagcctgagctgatcgaggcccatacctgtgagcgcatcatgtgctgtgtggcccagcaggccagtgagaagattgaccgtttccgtgctcacgccgccagcgtgttcctgacgctcctgcactttgacagccctcccatcccccacgtgccccaccgaggagaactggaaaagctgtttcccaggtccgatgtggcctccgtgaactggagtgcaccttcccaggccttcccacgcatcacccagctccttgggctgcccacctaccgctaccacgtcctgctggggctagtcgtgtccctgggcggcttgacggagtcgacgatccggcactccacccagagcctctttgagtacatgaagggcattcagagcgacccgcaggccctgggcagcttcagcgggacccttctgcagatctttgaggacaaccttctgaatgagagggtgtccgtgccgctgctgaagacgctggaccacgtgctcacccacggctgcttcgacatcttcaccacggaggaggaccacccctttgctgtgaagttgcttgcgctctgtaagaaagaaatcaagaattcaaaagatatccagaagctcctgtcaggcatcgcagtgttctgcgggatggtgcagttccccggcgacgtgaggaggcaggccctcctgcagctgtgtctgctcctctgccaccgtttcccgctgatccggaagaccacggccagccaggtgtacgagacattgctcacctacagtgacgtcgtgggcgcggatgtgctggacgaggtggtgactgtgctcagtgacactgcgtgggacgcggagcttgcagtggtgagagagcagcgcaaccgtctgtgtgaccttctgggcgtacccaggccccagctggtgccccagcctggtgcctgctgaagccagtcctggagcccatacctcacccctgcctggtgaggatgtcttgttcctgagggaggccggtgtggaaagcctcgcacagtggtgcctccagctgttgaagggtagcgctggcccttggaggctggcactagctgacagcttttcctctctgcacctgcgctctggtgacttggggtggacgcctctgccttcacttgaacacaaatgtgcttcctataaaatcatgtaccaagaa

SEQ ID NO: 282864 - DNA, 3767 bp, Homo sapiens
gggccagcgtcggttgccgccttagcgggcgcctccttttcatccctcatccttcatccctggctttcgcgctctagcggagtgggatctgcgaacacgtgaggcgggggcgcggtccccaggctgccgagatggccctgagcgacgaaccggccgcgggcggccccgaggaggaggcggaggacgagacactggcctttggcgcggcgctggaagcgttcggcgagagcgcggagacccgggcgctgctgggccgcctgcgggaggtgcacggcggcggcgcggagcgcgaggtggccctggagcggttccgcgtaataatggacaaataccaggagcagcctcatctgttggacccgcaccttgaatggatgatgaacttgttgttggacatagtgcaagatcagacatctccagcttcccttgtacatctggcttttaaatttctttacatcatcaccaaggttcgaggctataaaacatttcttcgtttatttcctcatgaagttgccgatgtagagcctgttttagatttggtcacaattcagaatcccaaggaccatgaagcttgggaaacccgctacatgcttttgctctggctctccgtgacctgcctgatcccttttgatttttctcgccttgacgggaacctcctcacccagcctgggcaagcacgaatgtccataatggaccgtattctccaaatagcagagtcctacttgattgtcagtgacaaggcccgagatgcagctgctgtccttgtgtccagatttatcacacgtcctgatgtcaagcaaagcaagatggctgagttcctggactggagcctgtgcaatctggcccgttcctccttccagaccatgcagggggtcatcaccatggatgggacgctgcaggccctggcacaaatatttaaacatggaaaacgtgaagactgtttgccctatgctgccactgtcctcaggtgcctcgatggctgcagactccctgagagcaaccagaccctgctgcggaagctgggggtgaagcttgtgcagcgactggggctgacattcctgaagccgaaggtggcagcatggaggtaccagcgtggctgccgatctttggctgcaaatctgcagctcctcactcagggtcagagtgagcagaagccactcatcctgaccgaagatgacgacgaagatgacgacgtcccagagggggtggagcgtgtgatagagcagctgctggtcgggctgaaggacaaggacacggtcgtgcggtggtctgcagccaagggcatcggtaggatggctggcaggcttcccagagccctggcggatgatgtggtcgggtctgtgctggactgcttcagtttccaggagactgacaaggcgtggcatgggggatgtctggcgctggcagagctgggcaggagaggcctgttgctgccgtctcgactcgtggatgttgtcgccgtgatcctgaaggcgctgacctacgacgagaagcggggtgcctgcagcgtgggcaccaacgtcagggacgccgcctgctacgtgtgctgggccttcgcgcgtgcctatgagcctcaggagctgaagccctttgtgactgcaatctcgagtgcactggtgattgctgcggtgtttgaccgagacataaactgcagaagagcagcctctgccgccttccaggagaatgtggggagacagggcactttccctcatggtattgatattttgaccacagctgactattttgccgtcggtaacagatccaactgtttcctggttataagtgtgtttattgccggctttcctgagtacacgcagccaatgatagaccacctggttaccatgaagatcagccactgggatggggtcatccgagagttggctgcgagggcgctgcacaacctggcccagcaggcacccgagttcagcgccacgcaagtcttcccgaggctgctgtccatgacactgagtccagatcttcacatgaggcatgggtcgattctcgcctgcgcagaagttgcttacgccttgtacaaacttgcagcccaagagaacaggcccgtcacggaccatctggacgagcaggcagtgcagggcctgaagcagattcaccagcagctctatgatcgtcagttatacaggggtctgggaggacagctcatgagacaagcagtgtgtgttttaatagaaaagttgtcactttccaaaatgccctttagaggtgacaccgtaattgatggttggcaatggctgataaatgacatcgctgtggcttctcgttggccttgggcgcccttccaggcttccttctgaaaggccggctccagcaggttctcacaggtttaagagcagttacccacacttcccccgaggacgtaagttttgctgagtccaggagagacggcttgaaggccattgcgaggatttgccagactgttggtgtgaaagcaggagccccagacgaagctgtgtgcggagagaatgtttcccagatttactgtgcgctgctgggctgcatggacgactacaccacggacagcagaggggacgtgggcacctgggtccgcaaggccgccatgaccagtctgatggatctgacacttctgctggctcggagccagcctgagctgatcgaggcccatacctgtgagcgcatcatgtgctgtgtggcccagcaggccagtgagaagattgaccgtttccgtgctcacgccgccagcgtgttcctgacgctcctgcactttgacagccctcccatcccccacgtgccccaccgaggagaactggaaaagctgtttcccaggtccgatgtggcctccgtgaactggagtgcaccttcccaggccttcccacgcatcacccagctccttgggctgcccacctaccgctaccacgtcctgctggggctagtcgtgtccctgggcggcttgacggagtcgacgatccggcactccacccagagcctctttgagtacatgaagggcattcagagcgacccgcaggccctgggcagcttcagcgggacccttctgcagatctttgaggacaaccttctgaatgagagggtgtccgtgccgctgctgaagacgctggaccacgtgctcacccacggctgcttcgacatcttcaccacggaggaggaccacccctttgctgtgaagttgcttgcgctctgtaagaaagaaatcaagaattcaaaagatatccagaagctcctgtcaggcatcgcagtgttctgcgggatggtgcagttccccggcgacgtgaggaggcaggccctcctgcagctgtgtctgctcctctgccaccgtttcccgctgatccggaagaccacggccagccaggtgtacgagacattgctcacctacagtgacgtcgtgggcgcggatgtgctggacgaggtggtgactgtgctcagtgacactgcgtgggacgcggagcttgcagtggtgagagagcagcgcaaccgtctgtgtgaccttctgggcgtacccaggccccagctggtgccccagcctggtgcctgctgaagccagtcctggagcccatacctcacccctgcctggtgaggatgtcttgttcctgagggaggccggtgtggaaagcctcgcacagtggtgcctccagctgttgaagggtagcgctggcccttggaggctggcactagctgacagcttttcctctctgcacctgcgctctggtgacttggggtggacgcctctgccttcacttgaacacaaatgtgcttcctataaaatcatgtaccaagaa

SEQ ID NO: 282865 - DNA, 3984 bp, Homo sapiens
gggccagcgtcggttgccgccttagcgggcgcctccttttcatccctcatccttcatccctggctttcgcgctctagcggagtgggatctgcgaacacgtgaggcgggggcgcggtccccaggctgccgagatggccctgagcgacgaaccggccgcgggcggccccgaggaggaggcggaggacgagacactggcctttggcgcggcgctggaagcgttcggcgagagcgcggagacccgggcgctgctgggccgcctgcgggaggtgcacggcggcggcgcggagcgcgaggtggccctggagcggttccgcgtaataatggacaaataccaggagcagcctcatctgttggacccgcaccttgaatggatgatgaacttgttgttggacatagtgcaagatcagacatctccagcttcccttgtacatctggcttttaaatttctttacatcatcaccaaggttcgaggctataaaacatttcttcgtttatttcctcatgaagttgccgatgtagagcctgttttagatttggtcacaattcagaatcccaaggaccatgaagcttgggaaacccgctacatgcttttgctctggctctccgtgacctgcctgatcccttttgatttttctcgccttgacgggaacctcctcacccagcctgggcaagcacgaatgtccataatggaccgtattctccaaatagcagagtcctacttgattgtcagtgacaaggcccgagatgcagctgctgtccttgtgtccagatttatcacacgtcctgatgtcaagcaaagcaagatggctgagttcctggactggagcctgtgcaatctggcccgttcctccttccagaccatgcagggggtcatcaccatggatgggacgctgcaggccctggcacaaatatttaaacatggaaaacgtgaagactgtttgccctatgctgccactgtcctcaggtgcctcgatggctgcagactccctgagagcaaccagaccctgctgcggaagctgggggtgaagcttgtgcagcgactggggctgacattcctgaagccgaaggtggcagcatggaggtaccagcgtggctgccgatctttggctgcaaatctgcagctcctcactcagggtcagagtgagcagaagccactcatcctgaccgaagatgacgacgaagatgacgacgtcccagagggggtggagcgtgtgatagagcagctgctggtcgggctgaaggacaaggacacggtcgtgcggtggtctgcagccaagggcatcggtaggatggctggcaggcttcccagagccctggcggatgatgtggtcgggtctgtgctggactgcttcagtttccaggagactgacaaggcgtggcatgggggatgtctggcgctggcagagctgggcaggagaggcctgttgctgccgtctcgactcgtggatgttgtcgccgtgatcctgaaggcgctgacctacgacgagaagcggggtgcctgcagcgtgggcaccaacgtcagggacgccgcctgctacgtgtgctgggccttcgcgcgtgcctatgagcctcaggagctgaagccctttgtgactgcaatctcgagtgcactggtgattgctgcggtgtttgaccgagacataaactgcagaagagcagcctctgccgccttccaggagaatgtggggagacagggcactttccctcatggtattgatattttgaccacagctgactattttgccgtcggtaacagatccaactgtttcctggttataagtgtgtttattgccggctttcctgagtacacgcagccaatgatagaccacctggttaccatgaagatcagccactgggatggggtcatccgagagttggctgcgagggcgctgcacaacctggcccagcaggcacccgagttcagcgccacgcaagtcttcccgaggctgctgtccatgacactgagtccagatcttcacatgaggcatgggtcgattctcgcctgcgcagaagttgcttacgccttgtacaaacttgcagcccaagagaacaggcccgtcacggaccatctggacgagcaggcagtgcagggcctgaagcagattcaccagcagctctatgatcgtcagttatacaggggtctgggaggacagctcatgagacaagcagtgtgtgttttaatagaaaagttgtcactttccaaaatgccctttagaggtgacaccgtaattgatggttggcaatggctgataaatgacactttgagacatctccatctcatctcaagtcactcccgccagcagatgaaggatgcagcagtctcggccctggctgctctatgcagtgaatattacatgaaggagccgggggaggcagatcccgcaattcaggaggagctgatcacgcagtacctggctgagcttcggaaccccgaggagatgactcgctgtggcttctcgttggccttgggcgcccttccaggcttccttctgaaaggccggctccagcaggttctcacaggtttaagagcagttacccacacttcccccgaggacgtaagttttgctgagtccaggagagacggcttgaaggccattgcgaggatttgccagactgttggtgtgaaagcaggagccccagacgaagctgtgtgcggagagaatgtttcccagatttactgtgcgctgctgggctgcatggacgactacaccacggacagcagaggggacgtgggcacctgggtccgcaaggccgccatgaccagtctgatggatctgacacttctgctggctcggagccagcctgagctgatcgaggcccatacctgtgagcgcatcatgtgctgtgtggcccagcaggccagtgagaagattgaccgtttccgtgctcacgccgccagcgtgttcctgacgctcctgcactttgacagccctcccatcccccacgtgccccaccgaggagaactggaaaagctgtttcccaggtccgatgtggcctccgtgaactggagtgcaccttcccaggccttcccacgcatcacccagctccttgggctgcccacctaccgctaccacgtcctgctggggctagtcgtgtccctgggcggcttgacggagtcgacgatccggcactccacccagagcctctttgagtacatgaagggcattcagagcgacccgcaggccctgggcagcttcagcgggacccttctgcagatctttgaggacaaccttctgaatgagagggtgtccgtgccgctgctgaagacgctggaccacgtgctcacccacggctgcttcgacatcttcaccacggaggaggaccacccctttgctgtgaagttgcttgcgctctgtaagaaagaaatcaagaattcaaaagatatccagaagctcctgtcaggcatcgcagtgttctgcgggatggtgcagttccccggcgacgtgaggaggcaggccctcctgcagctgtgtctgctcctctgccaccgtttcccgctgatccggaagaccacggccagccaggtgtacgagacattgctcacctacagtgacgtcgtgggcgcggatgtgctggacgaggtggtgactgtgctcagtgacactgcgtgggacgcggagcttgcagtggtgagagagcagcgcaaccgtctgtgtgaccttctgggcgtacccaggccccagctggtgccccagcctggtgcctgctgaagccagtcctggagcccatacctcacccctgcctggtgaggatgtcttgttcctgagggaggccggtgtggaaagcctcgcacagtggtgcctccagctgttgaagggtagcgctggcccttggaggctggcactagctgacagcttttcctctctgcacctgcgctctggtgacttggggtggacgcctctgccttcacttgaacacaaatgtgcttcctataaaatcatgtaccaagaaaaaaaaacaaaaaaaacagacaaaaaacaaacc

SEQ ID NO: 282866 - DNA, 2733 bp, Homo sapiens
ggccccgtcaccgtcgaggctgcctggcttggtctcagggtggctgggcccatcctcagaaccttctgtcccagtcttctgtggaacagcagcagcaggttctgcagctcgtggtcgaccggggaaggcaggcctcggagcctgggtgttacaggggtccttcaccgagagattgagtggaaggtcctgcagctctgagaagctggcggtttccgcctgggggctgccttgttgtcgccgtgatcctgaaggcgctgacctacgacgagaagcggggtgcctgcagcgtgggcaccaacgtcagggacgccgcctgctacgtgtgctgggccttcgcgcgtgcctatgagcctcaggagctgaagccctttgtgactgcaatctcgagtgcactggtgattgctgcggtgtttgaccgagacataaactgcagaagagcagcctctgccgccttccaggagaatgtggggagacagggcactttccctcatggtattgatattttgaccacagctgactattttgccgtcggtaacagatccaactgtttcctggttataagtgtgtttattgccggctttcctgagtacacgcagccaatgatagaccacctggttaccatgaagatcagccactgggatggggtcatccgagagttggctgcgagggcgctgcacaacctggcccagcaggcacccgagttcagcgccacgcaagtcttcccgaggctgctgtccatgacactgagtccagatcttcacatgaggcatgggtcgattctcgcctgcgcagaagttgcttacgccttgtacaaacttgcagcccaagagaacaggcccgtcacggaccatctggacgagcaggcagtgcagggcctgaagcagattcaccagcagctctatgatcgtcagttatacaggggtctgggaggacagctcatgagacaagcagtgtgtgttttaatagaaaagttgtcactttccaaaatgccctttagaggtgacaccgtaattgatggttggcaatggctgataaatgacactttgagacatctccatctcatctcaagtcactcccgccagcagatgaaggatgcagcagtctcggccctggctgctctatgcagtgaatattacatgaaggagccgggggaggcagatcccgcaattcaggaggagctgatcacgcagtacctggctgagcttcggaaccccgaggagatgactcgctgtggcttctcgttggccttgggcgcccttccaggcttccttctgaaaggccggctccagcaggttctcacaggtttaagagcagttacccacacttcccccgaggacgtaagttttgctgagtccaggagagacggcttgaaggccattgcgaggatttgccagactgttggtgtgaaagcaggagccccagacgaagctgtgtgcggagagaatgtttcccagatttactgtgcgctgctgggctgcatggacgactacaccacggacagcagaggggacgtgggcacctgggtccgcaaggccgccatgaccagtctgatggatctgacacttctgctggctcggagccagcctgagctgatcgaggcccatacctgtgagcgcatcatgtgctgtgtggcccagcaggccagtgagaagattgaccgtttccgtgctcacgccgccagcgtgttcctgacgctcctgcactttgacagccctcccatcccccacgtgccccaccgaggagaactggaaaagctgtttcccaggtccgatgtggcctccgtgaactggagtgcaccttcccaggccttcccacgcatcacccagctccttgggctgcccacctaccgctaccacgtcctgctggggctagtcgtgtccctgggcggcttgacggagtcgacgatccggcactccacccagagcctctttgagtacatgaagggcattcagagcgacccgcaggccctgggcagcttcagcgggacccttctgcagatctttgaggacaaccttctgaatgagagggtgtccgtgccgctgctgaagacgctggaccacgtgctcacccacggctgcttcgacatcttcaccacggaggaggaccacccctttgctgtgaagttgcttgcgctctgtaagaaagaaatcaagaattcaaaagatatccagaagctcctgtcaggcatcgcagtgttctgcgggatggtgcagttccccggcgacgtgaggaggcaggccctcctgcagctgtgtctgctcctctgccaccgtttcccgctgatccggaagaccacggccagccaggtgtacgagacattgctcacctacagtgacgtcgtgggcgcggatgtgctggacgaggtggtgactgtgctcagtgacactgcgtgggacgcggagcttgcagtggtgagagagcagcgcaaccgtctgtgtgaccttctgggcgtacccaggccccagctggtgccccagcctggtgcctgctgaagccagtcctggagcccatacctcacccctgcctggtgaggatgtcttgttcctgagggaggccggtgtggaaagcctcgcacagtggtgcctccagctgttgaagggtagcgctggcccttggaggctggcactagctgacagcttttcctctctgcacctgcgctctggtgacttggggtggacgcctctgccttcacttgaacacaaatgtgcttcctataaaatcatgtaccaagaa

SEQ ID NO: 282867 - DNA, 2488 bp, Homo sapiens
gaagtcctgtccctccttggggctggacacggtcccttgcccctgaactctagacgccctgcattgccctggtgctcccatgtcaagactggccgcggtcgtccatcccatggtttgtgaccctcccagcaacgctgtgaggaaggtgctgcagctggttctcagcattggcaggagcatggcgactcaggcagtcagtgtgccgccttccaggagaatgtggggagacagggcactttccctcatggtattgatattttgaccacagctgactattttgccgtcggtaacagatccaactgtttcctggttataagtgtgtttattgccggctttcctgagtacacgcagccaatgatagaccacctggttaccatgaagatcagccactgggatggggtcatccgagagttggctgcgagggcgctgcacaacctggcccagcaggcacccgagttcagcgccacgcaagtcttcccgaggctgctgtccatgacactgagtccagatcttcacatgaggcatgggtcgattctcgcctgcgcagaagttgcttacgccttgtacaaacttgcagcccaagagaacaggcccgtcacggaccatctggacgagcaggcagtgcagggcctgaagcagattcaccagcagctctatgatcgtcagttatacaggggtctgggaggacagctcatgagacaagcagtgtgtgttttaatagaaaagttgtcactttccaaaatgccctttagaggtgacaccgtaattgatggttggcaatggctgataaatgacactttgagacatctccatctcatctcaagtcactcccgccagcagatgaaggatgcagcagtctcggccctggctgctctatgcagtgaatattacatgaaggagccgggggaggcagatcccgcaattcaggaggagctgatcacgcagtacctggctgagcttcggaaccccgaggagatgactcgctgtggcttctcgttggccttgggcgcccttccaggcttccttctgaaaggccggctccagcaggttctcacaggtttaagagcagttacccacacttcccccgaggacgtaagttttgctgagtccaggagagacggcttgaaggccattgcgaggatttgccagactgttggtgtgaaagcaggagccccagacgaagctgtgtgcggagagaatgtttcccagatttactgtgcgctgctgggctgcatggacgactacaccacggacagcagaggggacgtgggcacctgggtccgcaaggccgccatgaccagtctgatggatctgacacttctgctggctcggagccagcctgagctgatcgaggcccatacctgtgagcgcatcatgtgctgtgtggcccagcaggccagtgagaagattgaccgtttccgtgctcacgccgccagcgtgttcctgacgctcctgcactttgacagccctcccatcccccacgtgccccaccgaggagaactggaaaagctgtttcccaggtccgatgtggcctccgtgaactggagtgcaccttcccaggccttcccacgcatcacccagctccttgggctgcccacctaccgctaccacgtcctgctggggctagtcgtgtccctgggcggcttgacggagtcgacgatccggcactccacccagagcctctttgagtacatgaagggcattcagagcgacccgcaggccctgggcagcttcagcgggacccttctgcagatctttgaggacaaccttctgaatgagagggtgtccgtgccgctgctgaagacgctggaccacgtgctcacccacggctgcttcgacatcttcaccacggaggaggaccacccctttgctgtgaagttgcttgcgctctgtaagaaagaaatcaagaattcaaaagatatccagaagctcctgtcaggcatcgcagtgttctgcgggatggtgcagttccccggcgacgtgaggaggcaggccctcctgcagctgtgtctgctcctctgccaccgtttcccgctgatccggaagaccacggccagccaggtgtacgagacattgctcacctacagtgacgtcgtgggcgcggatgtgctggacgaggtggtgactgtgctcagtgacactgcgtgggacgcggagcttgcagtggtgagagagcagcgcaaccgtctgtgtgaccttctgggcgtacccaggccccagctggtgccccagcctggtgcctgctgaagccagtcctggagcccatacctcacccctgcctggtgaggatgtcttgttcctgagggaggccggtgtggaaagcctcgcacagtggtgcctccagctgttgaagggtagcgctggcccttggaggctggcactagctgacagcttttcctctctgcacctgcgctctggtgacttggggtggacgcctctgccttcacttgaacacaaatgtgcttcctataaaatcatgtaccaagaa

SEQ ID NO: 282868 - DNA, 2170 bp, Homo sapiens
aaggctaggtagaggcgggggtaatcggccgagccaatgatagaccacctggttaccatgaagatcagccactgggatggggtcatccgagagttggctgcgagggcgctgcacaacctggcccagcaggcacccgagttcagcgccacgcaagtcttcccgaggctgctgtccatgacactgagtccagatcttcacatgaggcatgggtcgattctcgcctgcgcagaagttgcttacgccttgtacaaacttgcagcccaagagaacaggcccgtcacggaccatctggacgagcaggcagtgcagggcctgaagcagattcaccagcagctctatgatcgtcagttatacaggggtctgggaggacagctcatgagacaagcagtgtgtgttttaatagaaaagttgtcactttccaaaatgccctttagaggtgacaccgtaattgatggttggcaatggctgataaatgacactttgagacatctccatctcatctcaagtcactcccgccagcagatgaaggatgcagcagtctcggccctggctgctctatgcagtgaatattacatgaaggagccgggggaggcagatcccgcaattcaggaggagctgatcacgcagtacctggctgagcttcggaaccccgaggagatgactcgctgtggcttctcgttggccttgggcgcccttccaggcttccttctgaaaggccggctccagcaggttctcacaggtttaagagcagttacccacacttcccccgaggacgtaagttttgctgagtccaggagagacggcttgaaggccattgcgaggatttgccagactgttggtgtgaaagcaggagccccagacgaagctgtgtgcggagagaatgtttcccagatttactgtgcgctgctgggctgcatggacgactacaccacggacagcagaggggacgtgggcacctgggtccgcaaggccgccatgaccagtctgatggatctgacacttctgctggctcggagccagcctgagctgatcgaggcccatacctgtgagcgcatcatgtgctgtgtggcccagcaggccagtgagaagattgaccgtttccgtgctcacgccgccagcgtgttcctgacgctcctgcactttgacagccctcccatcccccacgtgccccaccgaggagaactggaaaagctgtttcccaggtccgatgtggcctccgtgaactggagtgcaccttcccaggccttcccacgcatcacccagctccttgggctgcccacctaccgctaccacgtcctgctggggctagtcgtgtccctgggcggcttgacggagtcgacgatccggcactccacccagagcctctttgagtacatgaagggcattcagagcgacccgcaggccctgggcagcttcagcgggacccttctgcagatctttgaggacaaccttctgaatgagagggtgtccgtgccgctgctgaagacgctggaccacgtgctcacccacggctgcttcgacatcttcaccacggaggaggaccacccctttgctgtgaagttgcttgcgctctgtaagaaagaaatcaagaattcaaaagatatccagaagctcctgtcaggcatcgcagtgttctgcgggatggtgcagttccccggcgacgtgaggaggcaggccctcctgcagctgtgtctgctcctctgccaccgtttcccgctgatccggaagaccacggccagccaggtgtacgagacattgctcacctacagtgacgtcgtgggcgcggatgtgctggacgaggtggtgactgtgctcagtgacactgcgtgggacgcggagcttgcagtggtgagagagcagcgcaaccgtctgtgtgaccttctgggcgtacccaggccccagctggtgccccagcctggtgcctgctgaagccagtcctggagcccatacctcacccctgcctggtgaggatgtcttgttcctgagggaggccggtgtggaaagcctcgcacagtggtgcctccagctgttgaagggtagcgctggcccttggaggctggcactagctgacagcttttcctctctgcacctgcgctctggtgacttggggtggacgcctctgccttcacttgaacacaaatgtgcttcctataaaatcatgtaccaagaa

SEQ ID NO: 282869 - DNA, 2347 bp, Homo sapiens
  misc_feature (25)..(25): n is a, c, g, or t
  misc_feature (33)..(33): n is a, c, g, or t
ttaggctagtacgagctgggtgttnaatctggncgaggctgggctctggtccaggctttgtagaccgtgcaggcggctgcatccccgacctgacccaggcctgctcgctctggtgtgcaccgacctgccagctttgtggcactttgtggcatggggctcaggccgatggagggcactttccctcatggtattgatattttgaccacagctgactattttgccgtcggtaacagatccaactgtttcctggttataagggtcatccgagagttggctgcgagggcgctgcacaacctggcccagcaggcacccgagttcagcgccacgcaagtcttcccgaggctgctgtccatgacactgagtccagatcttcacatgaggcatgggtcgattctcgcctgcgcagaagttgcttacgccttgtacaaacttgcagcccaagagaacaggcccgtcacggaccatctggacgagcaggcagtgcagggcctgaagcagattcaccagcagctctatgatcgtcagttatacaggggtctgggaggacagctcatgagacaagcagtgtgtgttttaatagaaaagttgtcactttccaaaatgccctttagaggtgacaccgtaattgatggttggcaatggctgataaatgacactttgagacatctccatctcatctcaagtcactcccgccagcagatgaaggatgcagcagtctcggccctggctgctctatgcagtgaatattacatgaaggagccgggggaggcagatcccgcaattcaggaggagctgatcacgcagtacctggctgagcttcggaaccccgaggagatgactcgctgtggcttctcgttggccttgggcgcccttccaggcttccttctgaaaggccggctccagcaggttctcacaggtttaagagcagttacccacacttcccccgaggacgtaagttttgctgagtccaggagagacggcttgaaggccattgcgaggatttgccagactgttggtgtgaaagcaggagccccagacgaagctgtgtgcggagagaatgtttcccagatttactgtgcgctgctgggctgcatggacgactacaccacggacagcagaggggacgtgggcacctgggtccgcaaggccgccatgaccagtctgatggatctgacacttctgctggctcggagccagcctgagctgatcgaggcccatacctgtgagcgcatcatgtgctgtgtggcccagcaggccagtgagaagattgaccgtttccgtgctcacgccgccagcgtgttcctgacgctcctgcactttgacagccctcccatcccccacgtgccccaccgaggagaactggaaaagctgtttcccaggtccgatgtggcctccgtgaactggagtgcaccttcccaggccttcccacgcatcacccagctccttgggctgcccacctaccgctaccacgtcctgctggggctagtcgtgtccctgggcggcttgacggagtcgacgatccggcactccacccagagcctctttgagtacatgaagggcattcagagcgacccgcaggccctgggcagcttcagcgggacccttctgcagatctttgaggacaaccttctgaatgagagggtgtccgtgccgctgctgaagacgctggaccacgtgctcacccacggctgcttcgacatcttcaccacggaggaggaccacccctttgctgtgaagttgcttgcgctctgtaagaaagaaatcaagaattcaaaagatatccagaagctcctgtcaggcatcgcagtgttctgcgggatggtgcagttccccggcgacgtgaggaggcaggccctcctgcagctgtgtctgctcctctgccaccgtttcccgctgatccggaagaccacggccagccaggtgtacgagacattgctcacctacagtgacgtcgtgggcgcggatgtgctggacgaggtggtgactgtgctcagtgacactgcgtgggacgcggagcttgcagtggtgagagagcagcgcaaccgtctgtgtgaccttctgggcgtacccaggccccagctggtgccccagcctggtgcctgctgaagccagtcctggagcccatacctcacccctgcctggtgaggatgtcttgttcctgagggaggccggtgtggaaagcctcgcacagtggtgcctccagctgttgaagggtagcgctggcccttggaggctggcactagctgacagcttttcctctctgcacctgcgctctggtgacttggggtggacgcctctgccttcacttgaacacaaatgtgcttcctataaaatcatgtaccaagaa

SEQ ID NO: 282870 - DNA, 3997 bp, Homo sapiens
gggccagcgtcggttgccgccttagcgggcgcctccttttcatccctcatccttcatccctggctttcgcgctctagcggagtgggatctgcgaacacgtgaggcgggggcgcggtccccaggctgccgagatggccctgagcgacgaaccggccgcgggcggccccgaggaggaggcggaggacgagacactggcctttggcgcggcgctggaagcgttcggcgagagcgcggagacccgggcgctgctgggccgcctgcgggaggtgcacggcggcggcgcggagcgcgaggtggccctggagcggttccgcgtaataatggacaaataccaggagcagcctcatctgttggacccgcaccttgaatggatgatgaacttgttgttggacatagtgcaagatcagacatctccagcttcccttgtacatctggcttttaaatttctttacatcatcaccaaggttcgaggctataaaacatttcttcgtttatttcctcatgaagttgccgatgtagagcctgttttagatttggtcacaattcagaatcccaaggaccatgaagcttgggaaacccgctacatgcttttgctctggctctccgtgacctgcctgatcccttttgatttttctcgccttgacgggaacctcctcacccagcctgggcaagcacgaatgtccataatggaccgtattctccaaatagcagagtcctacttgattgtcagtgacaaggcccgagatgcagctgctgtccttgtgtccagatttatcacacgtcctgatgtcaagcaaagcaagatggctgagttcctggactggagcctgtgcaatctggcccgttcctccttccagaccatgcagggggtcatcaccatggatgggacgctgcaggccctggcacaaatatttaaacatggaaaacgtgaagactgtttgccctatgctgccactgtcctcaggtgcctcgatggctgcagactccctgagagcaaccagaccctgctgcggaagctgggggtgaagcttgtgcagcgactggggctgacattcctgaagccgaaggtggcagcatggaggtaccagcgtggctgccgatctttggctgcaaatctgcagctcctcactcagggtcagagtgagcagaagccactcatcctgaccgaagatgacgacgaagatgacgacgtcccagagggggtggagcgtgtgatagagcagctgctggtcgggctgaaggacaaggacacggtcgtgcggtggtctgcagccaagggcatcggtaggatggctggcaggcttcccagagccctggcggatgatgtggtcgggtctgtgctggactgcttcagtttccaggagactgacaaggcgtggcatgggggatgtctggcgctggcagagctgggcaggagaggcctgttgctgccgtctcgactcgtggatgttgtcgccgtgatcctgaaggcgctgacctacgacgagaagcggggtgcctgcagcgtgggcaccaacgtcagggacgccgcctgctacgtgtgctgggccttcgcgcgtgcctatgagcctcaggagctgaagccctttgtgactgcaatctcgagtgcactggtgattgctgcggtgtttgaccgagacataaactgcagaagagcagcctctgccgccttccaggagaatgtggggagacagggcactttccctcatggtattgatattttgaccacagctgactattttgccgtcggtaacagatccaactgtttcctggttataagtgtgtttattgccggctttcctgagtacacgcagccaatgatagaccacctggttaccatgaagatcagccactgggatggggtcatccgagagttggctgcgagggcgctgcacaacctggcccagcaggcacccgagttcagcgccacgcaagtcttcccgaggctgctgtccatgacactgagtccagatcttcacatgaggcatgggtcgattctcgcctgcgcagaagttgcttacgccttgtacaaacttgcagcccaagagaacaggcccgtcacggaccatctggacgagcaggcagtgcagggcctgaagcagattcaccagcagctctatgatcgtcagttatacaggggtctgggaggacagctcatgagacaagcagtgtgtgttttaatagaaaagttgtcactttccaaaatgccctttagaggtgacaccgtaattgatggttggcaatggctgataaatgacactttgagacatctccatctcatctcaagtcactcccgccagcagatgaaggatgcagcagtctcggccctggctgctctatgcagtgaatattacatgaaggagccgggggaggcagatcccgcaattcaggaggagctgatcacgcagtacctggctgagcttcggaaccccgaggagatgactcgctgtggcttctcgttggccttgggcgcccttccaggcttccttctgaaaggccggctccagcaggttctcacaggtttaagagcagttacccacacttcccccgaggacgtaagttttgctgagtccaggagagacggcttgaaggccattgcgaggatttgccagactgttggtgtgaaagcaggagccccagacgaagctgtgtgcggagagaatgtttcccagatttactgtgcgctgctgggctgcatggacgactacaccacggacagcagaggggacgtgggcacctgggtccgcaaggccgccatgaccagtctgatggatctgacacttctgctggctcggagccagcctgagctgatcgaggcccatacctgtgagcgcatcatgtgctgtgtggcccagcaggccagtgagaagattgaccgtttccgtgctcacgccgccagcgtgttcctgacgctcctgcactttgacagccctcccatcccccacgtgccccaccgaggagaactggaaaagctgtttcccaggtccgatgtggcctccgtgaactggagtgcaccttcccaggccttcccacgcatcacccagctccttgggctgcccacctaccgctaccacgtcctgctggggctagtcgtgtccctgggcggcttgacggagtcgacggtgaggaggcgtcgggctggctggggcaggaggtggctccaggagtgcctggtgcttccctgtctcttgggagcgtgtatggagctgggccttttcttccattgctttctatctctctcgggcatatttggttagggggtcaggggcccagtgtcttcctcatgacccaggaggcttagggcctgtgggatggttgagtctgatgaaggtgggacagggccagcgccactctcttcctgcggccgcagccttggagctcccagcgtcccctcggggttcaatcctccaggacctgtgtctgatgcctgcatgtgggtacctgggctccatcaggttctagatcggcctccgccctccactttcagggctccaggcccagcttctcatgtctgtggggagggtctccagagccttggtctgtggctgagctgtggaacttgaaggcctctctgcatcttgtcactcgtggcccctgcaccttgggtcatgacctgctttatgtggcaaccctgtgacagctgctaagtcctagaaaacacgtaacaggacgtgaggtgccctctgcgccgtgtgggcgcgtgcggggagacccgggccccaggacgtgaggtgccctctgcgccgtgcgggcgcgtgcggggagacccgggccacatgcgagcggggccccgagacattctgcactcgggaattgcggggattatcaaatcccgcttcagtgggaaacgtgagcgaaacccaaggtgagtggccgcagcctttcgtcacgtgctctcccgcatgtcctaagtgagggctcaggctgagctgccgttgccgagagccttgtgtctgcttcgggtgtctgcactgtgagtggctccgtgctggcgtcc

SEQ ID NO: 282871 - DNA, 3362 bp, Homo sapiens
gggccagcgtcggttgccgccttagcgggcgcctccttttcatccctcatccttcatccctggctttcgcgctctagcggagtgggatctgcgaacacgtgaggcgggggcgcggtccccaggctgccgagatggccctgagcgacgaaccggccgcgggcggccccgaggaggaggcggaggacgagacactggcctttggcgcggcgctggaagcgttcggcgagagcgcggagacccgggcgctgctgggccgcctgcgggaggtgcacggcggcggcgcggagcgcgaggtggccctggagcggttccgcgtaataatggacaaataccaggagcagcctcatctgttggacccgcaccttgaatggatgatgaacttgttgttggacatagtgcaagatcagacatctccagcttcccttgtacatctggcttttaaatttctttacatcatcaccaaggttcgaggctataaaacatttcttcgtttatttcctcatgaagttgccgatgtagagcctgttttagatttggtcacaattcagaatcccaaggaccatgaagcttgggaaacccgctacatgcttttgctctggctctccgtgacctgcctgatcccttttgatttttctcgccttgacgggaacctcctcacccagcctgggcaagcacgaatgtccataatggaccgtattctccaaatagcagagtcctacttgattgtcagtgacaaggcccgagatgcagctgctgtccttgtgtccagatttatcacacgtcctgatgtcaagcaaagcaagatggctgagttcctggactggagcctgtgcaatctggcccgttcctccttccagaccatgcagggggtcatcaccatggatgggacgctgcaggccctggcacaaatatttaaacatggaaaacgtgaagactgtttgccctatgctgccactgtcctcaggtgcctcgatggctgcagactccctgagagcaaccagaccctgctgcggaagctgggggtgaagcttgtgcagcgactggggctgacattcctgaagccgaaggtggcagcatggaggtaccagcgtggctgccgatctttggctgcaaatctgcagctcctcactcagggtcagagtgagcagaagccactcatcctgaccgaagatgacgacgaagatgacgacgtcccagagggggtggagcgtgtgatagagcagctgctggtcgggctgaaggacaaggacacggtcgtgcggtggtctgcagccaagggcatcggtaggatggctggcaggcttcccagagccctggcggatgatgtggtcgggtctgtgctggactgcttcagtttccaggagactgacaaggcgtggcatgggggatgtctggcgctggcagagctgggcaggagaggcctgttgctgccgtctcgactcgtggatgttgtcgccgtgatcctgaaggcgctgacctacgacgagaagcggggtgcctgcagcgtgggcaccaacgtcagggacgccgcctgctacgtgtgctgggccttcgcgcgtgcctatgagcctcaggagctgaagccctttgtgactgcaatctcgagtgcactggtgattgctgcggtgtttgaccgagacataaactgcagaagagcagcctctgccgccttccaggagaatgtggggagacagggcactttccctcatggtattgatattttgaccacagctgactattttgccgtcggtaacagatccaactgtttcctggttataagtgtgtttattgccggctttcctgagtacacgcagccaatgatagaccacctggttaccatgaagatcagccactgggatggggtcatccgagagttggctgcgagggcgctgcacaacctggcccagcaggcacccgagttcagcgccacgcaagtcttcccgaggctgctgtccatgacactgagtccagatcttcacatgaggcatgggtcgattctcgcctgcgcagaagttgcttacgccttgtacaaacttgcagcccaagagaacaggcccgtcacggaccatctggacgagcaggcagtgcagggcctgaagcagattcaccagcagctctatgatcgtcagttatacaggggtctgggaggacagctcatgagacaagcagtgtgtgttttaatagaaaagttgtcactttccaaaatgccctttagaggtgacaccgtaattgatggttggcaatggctgataaatgacactttgagacatctccatctcatctcaagtcactcccgccagcagatgaaggatgcagcagtctcggccctggctgctctatgcagtgaatattacatgaaggagccgggggaggcagatcccgcaattcaggaggagctgatcacgcagtacctggctgagcttcggaaccccgaggagatgactcgctgtggcttctcgttggccttgggcgcccttccaggcttccttctgaaaggccggctccagcaggttctcacaggtttaagagcagttacccacacttcccccgaggacgtaagttttgctgagtccaggagagacggcttgaaggccattgcgaggatttgccagactgttggtgtgaaagcaggagccccagacgaagctgtgtgcggagagaatgtttcccagatttactgtgcgctgctgggctgcatggacgactacaccacggacagcagaggggacgtgggcacctgggtccgcaaggccgccatgaccagtctgatggatctgacacttctgctggctcggagccagcctgagctgatcgaggcccatacctgtgagcgcatcatgtgctgtgtggcccagcaggccagtgagaagattgaccgtttccgtgctcacgccgccagcgtgttcctgacgctcctgcactttgacagccctcccatcccccacgtgccccaccgaggagaactggaaaagctgtttcccaggtccgatgtggcctccgtgaactggagtgcaccttcccaggccttcccacgcatcacccagctccttgggctgcccacctaccgctaccacgtcctgctggggctagtcgtgtccctgggcggcttgacggagtcgacggtgaggaggcgtcgggctggctggggcaggaggtggctccaggagtgcctggtgcttccctgtctcttgggagcgtgtatggagctgggccttttcttccattgctttctatctctctcgggcatatttggttagggggtcaggggcccagtgtcttcctcatgacccaggagctctaggccccatgccatgcatcaggagatccagatggccgccgatccagaagcccaagctgtgcgg

SEQ ID NO: 282872 - DNA, 1820 bp, Homo sapiens
gggccagcgtcggttgccgccttagcgggcgcctccttttcatccctcatccttcatccctggctttcgcgctctagcggagtgggatctgcgaacacgtgaggcgggggcgcggtccccaggctgccgagatggccctgagcgacgaaccggccgcgggcggccccgaggaggaggcggaggacgagacactggcctttggcgcggcgctggaagcgttcggcgagagcgcggagacccgggcgctgctgggccgcctgcgggagtaataatggacaaataccaggagcagcctcatctgttggacccgcaccttgaatggatgatgaacttgttgttggacatagtgcaagatcagacatctccagcttcccttgtacatctggcttttaaatttctttacatcatcaccaaggttcgaggctataaaacatttcttcgtttatttcctcatgaagttgccgatgtagagcctgttttagatttggtcacaattcagaatcccaaggaccatgaagcttgggaaacccgctacatgcttttgctctggctctccgtgacctgcctgatcccttttgatttttctcgccttgacgggaacctcctcacccagcctgggcaagcacgaatgtccataatggacctgacacttctgctggctcggagccagcctgagctgatcgaggcccatacctgtgagcgcatcatgtgctgtgtggcccagcaggccagtgagaagattgaccgtttccgtgctcacgccgccagcgtgttcctgacgctcctgcactttgacagccctcccatcccccacgtgccccaccgaggagaactggaaaagctgtttcccaggtccgatgtggcctccgtgaactggagtgcaccttcccaggccttcccacgcatcacccagctccttgggctgcccacctaccgctaccacgtcctgctggggctagtcgtgtccctgggcggcttgacggagtcgacgatccggcactccacccagagcctctttgagtacatgaagggcattcagagcgacccgcaggccctgggcagcttcagcgggacccttctgcagatctttgaggacaaccttctgaatgagagggtgtccgtgccgctgctgaagacgctggaccacgtgctcacccacggctgcttcgacatcttcaccacggaggaggaccacccctttgctgtgaagttgcttgcgctctgtaagaaagaaatcaagaattcaaaagatatccagaagctcctgtcaggcatcgcagtgttctgcgggatggtgcagttccccggcgacgtgaggaggcaggccctcctgcagctgtgtctgctcctctgccaccgtttcccgctgatccggaagaccacggccagccaggtgtacgagacattgctcacctacagtgacgtcgtgggcgcggatgtgctggacgaggtggtgactgtgctcagtgacactgcgtgggacgcggagcttgcagtggtgagagagcagcgcaaccgtctgtgtgaccttctgggcgtacccaggccccagctggtgccccagcctggtgcctgctgaagccagtcctggagcccatacctcacccctgcctggtgaggatgtcttgttcctgagggaggccggtgtggaaagcctcgcacagtggtgcctccagctgttgaagggtagcgctggcccttggaggctggcactagctgacagcttttcctctctgcacctgcgctctggtgacttggggtggacgcctctgccttcacttgaacacaaatgtgcttcctataaaatcatgtaccaagaa

SEQ ID NO: 282873 - DNA, 3121 bp, Homo sapiens
gggccagcgtcggttgccgccttagcgggcgcctccttttcatccctcatccttcatccctggctttcgcgctctagcggagtgggatctgcgaacacgtgaggcgggggcgcggtccccaggctgccgagatggccctgagcgacgaaccggccgcgggcggccccgaggaggaggcggaggacgagacactggcctttggcgcggcgctggaagcgttcggcgagagcgcggagacccgggcgctgctgggccgcctgcgggaggtgcacggcggcggcgcggagcgcgaggtggccctggagcggttccgcgtaataatggacaaataccaggagcagcctcatctgttggacccgcaccttgaatggatgatgaacttgttgttggacatagtgcaagatcagacatctccagcttcccttgtacatctggcttttaaatttctttacatcatcaccaaggttcgaggctataaaacatttcttcgtttatttcctcatgaagttgccgatgtagagcctgttttagatttggtcacaattcagaatcccaaggaccatgaagcttgggaaacccgctacatgcttttgctctggctctccgtgacctgcctgatcccttttgatttttctcgccttgacgggaacctcctcacccagcctgggcaagcacgaatgtccataatggaccgtattctccaaatagcagagtcctacttgattgtcagtgacaaggcccgagatgcagctgctgtccttgtgtccagatttatcacacgtcctgatgtcaagcaaagcaagatggctgagttcctggactggagcctgtgcaatctggcccgttcctccttccagaccatgcagggggtcatcaccatggatgggacgctgcaggccctggcacaaatatttaaacatggaaaacgtgaagactgtttgccctatgctgccactgtcctcaggtgcctcgatggctgcagactccctgagagcaaccagaccctgctgcggaagctgggggtgaagcttgtgcagcgactggggctgacattcctgaagccgaaggtggcagcatggaggtaccagcgtggctgccgatctttggctgcaaatctgcagctcctcactcagggtcagagtgagcagaagccactcatcctgaccgaagatgacgacgaagatgacgacgtcccagagggggtggagcgtgtgatagagcagctgctggtcgggctgaaggacaaggacacggtcgtgcggtggtctgcagccaagggcatcggtaggatggctggcaggcttcccagagccctggcggatgatgtggtcgggtctgtgctggactgcttcagtttccaggagactgacaaggcgtggcatgggggatgtctggcgctggcagagctgggcaggagaggcctgttgctgccgtctcgactcgtggatgttgtcgccgtgatcctgaaggcgctgacctacgacgagaagcggggtgcctgcagcgtgggcaccaacgtcagggacgccgcctgctacgtgtgctgggccttcgcgcgtgcctatgagcctcaggagctgaagccctttgtgactgcaatctcgagtgcactggtgattgctgcggtgtttgaccgagacataaactgcagaagagcagcctctgccgccttccaggagaatgtggggagacagggcactttccctcatggtattgatattttgaccacagctgactattttgccgtcggtaacagatccaactgtttcctggttataagtgtgtttattgccggctttcctgagtacacgcagccaatgatagaccacctggttaccatgaagatcagccactgggatggggtcatccgagagttggctgcgagggcgctgcacaacctggcccagcaggcacccgagttcagcgccacgcaagtcttcccgaggctgctgtccatgacactgagtccagatcttcacatgaggcatgggtcgattctcgcctgcgcagaagttgcttacgccttgtacaaacttgcagcccaagagaacaggcccgtcacggaccatctggacgagcaggcagtgcagggcctgaagcagattcaccagcagctctatgatcgtcagttatacaggggtctgggaggacagctcatgagacaagcagacttggtcattgtccctcagatgcctccagagcacacggtgcaggggtgtcacctttccgacgtacccatgggtgcccggagttgcctccttagtgggatcaagaccatcccccacatgtcatggacagctggtgacctggtcgctcttggtgtttgagcagtaagtctgcacaggagccactgcccaccatgaaaggggggagttaaaggcgttccgaatccctttggccaacgacggagttgaaggtgttccgagtccccgtggccggcggcgacagagttgaaggcgtttggagtccccgtggctggcggtgatggagttgaaggcgttccgaatccccgtggccggtggtgacggagttgaaggcgttccgagtccctgtagctggcggcgatggagttgaatgcgttccgagtccccaggacgccattttggctgaatttcctttaccctcctgctccgtgaagcggggcccattggggaggtgctgctctgtaatctgctcttcttcttgaatgtgtggttagggcagccacattgatgtcccccaggctccagagtgaccgccccttaggggtcctgctgggcgttggccgctgttggccgcagggcaccgttggcctgtgcattgctgccacctacccatgatgggcagaattgtcacgagctcaggaggaaaccatggaaaaaccgcaggtcctggagcctccgtgtggttgtcgtgggcagctttccacgcgacgtgccctccctgggcgtgaggctgcatttgcacttagcggggagagggggaatgttgtgggttctagttgggctttttgatgatgatatttggaaagacttgagacaaagtagccaccctgtcctgtcccttcctcacccaccacacccactgctccccgctggcaggcactgcaggctgcacaagtaaccgtggaacctaaacactg

SEQ ID NO: 282874 - DNA, 898 bp, Homo sapiens
ttctctttggagaagtgtcttcatttttttctgttctccttccctgactgttgtggtctgatcctcccttgtcacacatgtgacttgagggtgttttctccctgcctgtcctttcacgcaccgagcgggggcctcacactttcctcacgtcccagcatctccccttgttctctgaggcacagatttttctgggtgtccgtgccgctgctgaagacgctggaccacgtgctcacccacggctgcttcgacatcttcaccacggaggaggaccacccctttgctgtgaagttgcttgcgctctgtaagaaagaaatcaagaattcaaaagatatccagaagctcctgtcaggcatcgcagtgttctgcgggatggtgcagttccccggcgacgtgaggaggcaggccctcctgcagctgtgtctgctcctctgccaccgtttcccgctgatccggaagaccacggccagccaggtgtacgagacattgctcacctacagtgacgtcgtgggcgcggatgtgctggacgaggtggtgactgtgctcagtgacactgcgtgggacgcggagcttgcagtggtgagagagcagcgcaaccgtctgtgtgaccttctgggcgtacccaggccccagctggtgccccagcctggtgcctgctgaagccagtcctggagcccatacctcacccctgcctggtgaggatgtcttgttcctgagggaggccggtgtggaaagcctcgcacagtggtgcctccagctgttgaagggtagcgctggcccttggaggctggcactagctgacagcttttcctctctgcacctgcgctctggtgacttggggtggacgcctctgccttcacttgaacacaaatgtgcttcctataaaatcatgtaccaagaa

SEQ ID NO: 282875 - DNA, 2416 bp, Homo sapiens
gggccagcgtcggttgccgccttagcgggcgcctccttttcatccctcatccttcatccctggctttcgcgctctagcggagtgggatctgcgaacacgtgaggcgggggcgcggtccccaggctgccgagatggccctgagcgacgaaccggccgcgggcggccccgaggaggaggcggaggacgagacactggcctttggcgcggcgctggaagcgttcggcgagagcgcggagacccgggcgctgctgggccgcctgcgggaggtgcacggcggcggcgcggagcgcgaggtggccctggagcggttccgcgtaataatggacaaataccaggagcagcctcatctgttggacccgcaccttgaatggatgatgaacttgttgttggacatagtgcaagatcagacatctccagcttcccttgtacatctggcttttaaatttctttacatcatcaccaaggttcgaggctataaaacatttcttcgtttatttcctcatgaagttgccgatgtagagcctgttttagatttggtcacaattcagaatcccaaggaccatgaagcttgggaaacccgctacatgcttttgctctggctctccgtgacctgcctgatcccttttgatttttctcgccttgacgggaacctcctcacccagcctgggcaagcacgaatgtccataatggaccgtattctccaaatagcagagtcctacttgattgtcagtgacaaggcccgagatgcagctgctgtccttgtgtccagatttatcacacgtcctgatgtcaagcaaagcaagatggctgagttcctggactggagcctgtgcaatctggcccgttcctccttccagaccatgcagggggtcatcaccatggatgggacgctgcaggccctggcacaaatatttaaacatggaaaacgtgaagactgtttgccctatgctgccactgtcctcaggtgcctcgatggctgcagactccctgagagcaaccagaccctgctgcggaagctgggggtgaagcttgtgcagcgactggggctgacattcctgaagccgaaggtggcagcatggaggtaccagcgtggctgccgatctttggctgcaaatctgcagctcctcactcagggtcagagtgagcagaagccactcatcctgaccgaagatgacgacgaagatgacgacgtcccagagggggtggagcgtgtgatagagcagctgctggtcgggctgaaggacaaggacacggtcgtgcggtggtctgcagccaagggcatcggtaggatggctggcaggcttcccagagccctggcggatgatgtggtcgggtctgtgctggactgcttcagtttccaggagactgacaaggcgtggcatgggggatgtctggcgctggcagagctgggcaggagaggcctgttgctgccgtctcgactcgtggatgttgtcgccgtgatcctgaaggcgctgacctacgacgagaagcggggtgcctgcagcgtgggcaccaacgtcagggacgccgcctgctacgtgtgctgggccttcgcgcgtgcctatgagcctcaggagctgaagccctttgtgactgcaatctcgagtgcactggtgattgctgcggtgtttgaccgagacataaactgcagaagagcagcctctgccgccttccaggagaatgtggggagacagggcactttccctcatggtattgatattttgaccacagctgactattttgccgtcggtaacagatccaactgtttcctggttataagtgtgtttattgccggctttcctgagtacacgcagccaatgatagaccacctggttaccatgaagatcagccactgggatggggtcatccgagagttggctgcgagggcgctgcacaacctggcccagcaggcacccgagttcagcgccacgcaagtcttcccgaggctgctgtccatgacactgagtccagatcttcacatgaggcatgggtcgattctcgcctgcgcagaagttgcttacgccttgtacaaacttgcagcccaagagaacaggcccgtcacggaccatctggacgagcaggcagtgcagggcctgaagcagattcaccagcagctctatgatcgtcagttatacaggggtctgggaggacagctcatgagacaagcagtgtgtgttttaatagaaaagttgtcactttccaaaatgccctttagaggtgacaccgtaattgatggttggcaatggctgataaatgacactttgagacatctccatctcatctcaagtcactcccgccagcagatgaagcgaccagcagcttcacaaatgtctgctgcaaggggaatcgtcagagtccaatgtgtgcctctacagtaatgtcggaaataaataccattcttgaaataaaaaaaaaa

SEQ ID NO: 282876 - DNA, 1013 bp, Homo sapiens
gccaagcctgaggggtggcaggctcgggggtcccactgccttctgaggtgtctccgtgttgcagatccggcactccacccagagcctctttgagtacatgaagggcattcagagcgacccgcaggccctgggcagcttcagcgggacccttctgcagatctttgaggacaaccttctgaatgagagggtgtccgtgccgctgctgaagacgctggaccacgtgctcacccacggctgcttcgacatcttcaccacggaggaggagtgaggctctgcttttcatgacttcctttccgattaagcctaagtagctcatgtattaaagaaaaagtcatcagacacagagatcagaattccaggaaatgatcttccagtgcgttctggccacccctttgctgtgaagttgcttgcgctctgtaagaaagaaatcaagaattcaaaagatatccagaagctcctgtcaggcatcgcagtgttctgcgggatggtgcagttccccggcgacgtgaggaggcaggccctcctgcagctgtgtctgctcctctgccaccgtttcccgctgatccggaagaccacggccagccaggtgtacgagacattgctcacctacagtgacgtcgtgggcgcggatgtgctggacgaggtggtgactgtgctcagtgacactgcgtgggacgcggagcttgcagtggtgagagagcagcgcaaccgtctgtgtgaccttctgggcgtacccaggccccagctggtgccccagcctggtgcctgctgaagccagtcctggagcccatacctcacccctgcctggtgaggatgtcttgttcctgagggaggccggtgtggaaagcctcgcacagtggtgcctccagctgttgaagggtagcgctggcccttggaggctggcactagctgacagcttttcctctctgcacctgcgctctggtgacttggggtggacgcctctgccttcacttgaacacaaatgtgcttcctataaaatcatgtaccaagaa

SEQ ID NO: 282877 - DNA, 576 bp, Homo sapiens
gtggggctcacctggagccatgtgctgctcccggcaggttctgcgggatggtgcagttccccggcgacgtgaggaggcaggccctcctgcagctgtgtctgctcctctgccaccgtttcccgctgatccggaagaccacggccagccaggtgtacgagacattgctcacctacagtgacgtcgtgggcgcggatgtgctggacgaggtggtgactgtgctcagtgacactgcgtgggacgcggagcttgcagtggtgagagagcagcgcaaccgtctgtgtgaccttctgggcgtacccaggccccagctggtgccccagcctggtgcctgctgaagccagtcctggagcccatacctcacccctgcctggtgaggatgtcttgttcctgagggaggccggtgtggaaagcctcgcacagtggtgcctccagctgttgaagggtagcgctggcccttggaggctggcactagctgacagcttttcctctctgcacctgcgctctggtgacttggggtggacgcctctgccttcacttgaacacaaatgtgcttcctataaaatcatgtaccaagaa

SEQ ID NO: 282878 - DNA, 1684 bp, Homo sapiens
gggccagcgtcggttgccgccttagcgggcgcctccttttcatccctcatccttcatccctggctttcgcgctctagcggagtgggatctgcgaacacgtgaggcgggggcgcggtccccaggctgccgagatggccctgagcgacgaaccggccgcgggcggccccgaggaggaggcggaggacgagacactggcctttggcgcggcgctggaagcgttcggcgagagcgcggagacccgggcgctgctgggccgcctgcgggaggtgcacggcggcggcgcggagcgcgaggtggccctggagcggttccgcgtaataatggacaaataccaggagcagcctcatctgttggacccgcaccttgaatggatgatgaacttgttgttggacatagtgcaagatcagacatctccagcttcccttgtacatctggcttttaaatttctttacatcatcaccaaggttcgaggctataaaacatttcttcgtttatttcctcatgaagttgccgatgtagagcctgttttagatttggtcacaattcagaatcccaaggaccatgaagcttgggaaacccgctacatgcttttgctctggctctccgtgacctgcctgatcccttttgatttttctcgccttgacgggaacctcctcacccagcctgggcaagcacgaatgtccataatggaccgtattctccaaatagcagagtcctacttgattgtcagtgacaaggcccgagatgcagctgctgtccttgtgtccagatttatcacacgtcctgatgtcaagcaaagcaagatggctgagttcctggactggagcctgtgcaatctggcccgttcctccttccagaccatgcagggggtcatcaccatggatgggacgctgcaggccctggcacaaatatttaaacatggaaaacgtgaagactgtttgccctatgctgccactgtcctcaggtgcctcgatggctgcagactccctgagagcaaccagaccctgctgcggaagctgggggtgaagcttgtgcagcgactggggctgacattcctgaagccgaaggtggcagcatggaggtaccagcgtggctgccgatctttggctgcaaatctgcagctcctcactcagggtcagagtgagcagaagccactcatcctgaccgaagatgacgacgaagatgacgacgtcccagagggggtggagcgtgtgatagagcagctgctggtcgggctgaaggacaaggacacggtcgtgcggtggtctgcagccaagggcatcggtaggatggctggcaggcttcccagagccctggcggatgatgtggtcgggtctgtgctggactgcttcagtttccaggagactgacaaggcgtggcatgggggatgtctggcgctggcagagctgggcaggagaggcctgttgctgccgtctcgactcgtggatgttgtcgccgtgatcctgaaggcgctgacctacgacgagaagcggggtgcctgcagcgtgggcaccaacgtcagggacgccgcctgctacgtgtgctgggccttcgcgcgtgcctatgagcctcaggagctgaagccctttgtgactgcaatctcgagtgcactggtgattgctgcggtgtttgaccgagacataaactgcagaagagcagcctcttgggatcctctagaacagcc

SEQ ID NO: 282879 - DNA, 1394 bp, Homo sapiens
cctacccctcctcatctgcttcccatgagtggggccggggctgggtgagaggcccccagaagctgcccctgtgcacctcaccagcccgtcactcttcttctaaagtaacaaaaacaagtacctcagttctcacgggggctggggcccagggttgctgtgctgtctctctagttaccagggttggctccttcctctcagcctccttccggcaggaggttatatctgagagggaggaggagaaccatgtccagatacatgggggcagtggggatgggctgagcatcaggacacagcctcccccatttctgtgtgtgtaaaggctgaactcaacagcagactttggaattaaatgtgctttttacatttttattaggaaaaatttcaaacgtgtgaatgcaggttaagagcagtgcagtgaacctcccttcccgctccccagatggggtgcccttccgaggacacgttagtcatgagcacctgtcagccacatagctcaggctgccgggtgtgtgggaaacggcacaaatggtttcctgcaggaaccgtgtcagtccccacacagggcccagaggggtgagggtcccctggctgggaatggtgtgtgttggagctgaccagcctgagcttgtcttgtctcttcttcagcctggtgcctgctgaagccagtcctggagcccatacctcacccctgcctggtgaggatgtcttgttcctgagggaggccggtgtggaaagcctcgcacagtggtgcctccagctgttgaagggtagcgctggcccttggaggctggcactagctgacagcttttcctctctgcacctgcgctctggtgacttggggtggacgcctctgccttcacttgaacacaaatgtgcttcctataaaatcatgtaccaagaagaagttcctgccttttgtctctgagcctgatgtgtgtaggggtgatggaaaggctcactgcccaggggtcagccagaggggaggtgggctgcactcctcctgcctggagaccaggcccccttcttgcctggtgctgtccctgctgtgggagacgtctggccacaggcagtgccccacccagtcttggagagagatgaatgttaaatcagaggttcaaatgctagagaactgagaagccctggtggcaggcatggtctggagtgctgggcagatgctgtttctgggcccgtctgcctggtgggggtgctgtcctcccccctgtgcacacgtgagcatcgtgcatgtggcccctctgcagtgcaggagtcactgattgatgggtgtgccgaccagcagcttcacaaatgtctgctgcaaggggaatcgtcagagtccaatgtgtgcctctacagtaatgtcggaaataaataccattcttgaaataaaaaaaaaa

SEQ ID NO: 282880 - DNA, 2524 bp, Homo sapiens
  misc_feature (105)..(105): n is a, c, g, or t
ggagtttcggacacacagactggaattgaactaacgggcaccccaggaagactgtggggcgagacgaggaggatggggggaccagccgtcgccccactctcctgntcatcatcacagcctcgttggggtgtaaacgacccccagtaagctggtgcatgttcaatagtgtgtttattgccggctttcctgagtacacgcagccaatgatagaccacctggttaccatgaagatcagccactgggatggggtcatccgagagttggctgcgagggcgctgcacaacctggcccagcaggcacccgagttcagcgccacgcaagtcttcccgaggctgctgtccatgacactgagtccagatcttcacatgaggcatgggtcgattctcgcctgcgcagaagttgcttacgccttgtacaaacttgcagcccaagagaacaggcccgtcacggaccatctggacgagcaggcagtgcagggcctgaagcagattcaccagcagccgtgcatctgcagctggggtctgatgtctcctgaaagtaaagcagaattttgtgtgtgcgtctgtcggatttctctggggagacagtgtgttcatctttctgggctttgagagattctcaaaggcttctgtgacccagagctctatgatcgtcagttatacaggggtctgggaggacagctcatgagacaagcagtgtgtgttttaatagaaaagttgtcactttccaaaatgccctttagaggtgacaccgtaattgatggttggcaatggctgataaatgacactttgagacatctccatctcatctcaagtcactcccgccagcagatgaaggatgcagcagtctcggccctggctgctctatgcagtgaatattacatgaaggagccgggggaggcagatcccgcaattcaggaggagctgatcacgcagtacctggctgagcttcggaaccccgaggagatgactcgctgtggcttctcgttggccttgggcgcccttccaggcttccttctgaaaggccggctccagcaggttctcacaggtttaagagcagttacccacacttcccccgaggacgtaagttttgctgagtccaggagagacggcttgaaggccattgcgaggatttgccagactgttggtgtgaaagcaggagccccagacgaagctgtgtgcggagagaatgtttcccagatttactgtgcgctgctgggctgcatggacgactacaccacggacagcagaggggacgtgggcacctgggtccgcaaggccgccatgaccagtctgatggatctgacacttctgctggctcggagccagcctgagctgatcgaggcccatacctgtgagcgcatcatgtgctgtgtggcccagcaggccagtgagaagattgaccgtttccgtgctcacgccgccagcgtgttcctgacgctcctgcactttgacagccctcccatcccccacgtgccccaccgaggagaactggaaaagctgtttcccaggtccgatgtggcctccgtgaactggagtgcaccttcccaggccttcccacgcatcacccagctccttgggctgcccacctaccgctaccacgtcctgctggggctagtcgtgtccctgggcggcttgacggagtcgacggtgaggaggcgtcgggctggctggggcaggaggtggctccaggagtgcctggtgcttccctgtctcttgggagcgtgtatggagctgggccttttcttccattgctttctatctctctcgggcatatttggttagggggtcaggggcccagtgtcttcctcatgacccaggaggcttagggcctgtgggatggttgagtctgatgaaggtgggacagggccagcgccactctcttcctgcggccgcagccttggagctcccagcgtcccctcggggttcaatcctccaggacctgtgtctgatgcctgcatgtgggtacctgggctccatcaggttctagatcggcctccgccctccactttcagggctccaggcccagcttctcatgtctgtggggagggtctccagagccttggtctgtggctgagctgtggaacttgaaggcctctctgcatcttgtcactcgtggcccctgcaccttgggtcatgacctgctttatgtggcaaccctgtgacagctgctaagtcctagaaaacacgtaacaggacgtgaggtgccctctgcgccgtgtgggcgcgtgcggggagacccgggccccaggacgtgaggtgccctctgcgccgtgcgggcgcgtgcggggagacccgggccacatgcgagcggggccccgagacattctgcactcgggaattgcggggattatcaaatcccgcttcagtgggaaacgtgagcgaaacccaaggtgagtggccgcagcctttcgtcacgtgctctcccgcatgtcctaagtgagggctcaggctgagctgccgttgccgagagccttgtgtctgcttcgggtgtctgcactgtgagtggctccgtgctggcgtcc

SEQ ID NO: 282881 - DNA, 868 bp, Homo sapiens
  misc_feature (772)..(772): n is a, c, g, or t
  misc_feature (775)..(775): n is a, c, g, or t
  misc_feature (783)..(783): n is a, c, g, or t
  misc_feature (787)..(787): n is a, c, g, or t
  misc_feature (868)..(868): n is a, c, g, or t
ttctctttggagaagtgtcttcatttttttctgttctccttccctgactgttgtggtctgatcctcccttgtcacacatgtgacttgagggtgttttctccctgcctgtcctttcacgcaccgagcgggggcctcacactttcctcacgtcccagcatctccccttgttctctgaggcacagatttttctgggtgtccgtgccgctgctgaagacgctggaccacgtgctcacccacggctgcttcgacatcttcaccacggaggaggaccacccctttgctgtgaagttgcttgcgctctgtaagaaagaaatcaagaattcaaaagatatccagaagctcctgtcaggcatcgcagtgttctgcgggatggtgcagttccccggcgacgtgaggaggcaggccctcctgcagctgtgtctgctcctctgccaccgtttcccgctgatccggaagaccacggccagccaggtgtacgagacattgctcacctacagtgacgtcgtgggcgcggatgtgctggacgaggtggtgactgtgctcagtgacactgcgtgggacgcggagcttgcagtggtgagagagcagcgcaaccgtctgtgtgaccttctgggcgtacccaggccccagctggtgccccagcctggtgcctgctgaagccagtcctggagcccatacctcacccctgcctggtgaggatgtcttgttcctgagggaggccggtgtggaaagcctcgcacagtggtgcctccagctgttgaaggttatggtnttncttttttntttnttttttttttattttttttctttttttctctttttttttttttttttgttgtgttcgctttttctttcttttgttcttttn

SEQ ID NO: 282882 - DNA, 827 bp, Homo sapiens
ctcgggtggcagtgagcggacagcgagggggacagacacaggtggaaggaaccacgttgtcgccgtgatcctgaaggcgctgacctacgacgagaagcggggtgcctgcagcgtgggcaccaacgtcagggacgccgcctgctacgtgtgctgggccttcgcgcgtgcctatgagcctcaggagctgaagccctttgtgactgcaatctcgagtgcactggtgattgctgcggtgtttgaccgagacataaactgcagaagagcagcctctgccgccttccaggagaatgtggggagacagggcactttccctcatggtattgatattttgaccacagctgactattttgccgtcggtaacagatccaactgtttcctggttataagtgtgtttattgccggctttcctgagtacacgcagccaatgatagaccacctggttaccatgaagatcagccactgggatggggtcatccgagagttggctgcgagggcgctgcacaacctggcccagcaggcacccgagttcagcgccacgcaagtcttcccgaggctgctgtccatgacactgagtccagatcttcacatgaggcatgggtcgattctcgcctgcgcagaagttgcttacgccttgtacaaacttgcagcccaagagaacaggcccgtcacggaccatctggacgagcaggcagtgcagggcctgaagcagattcaccagcagctctatgatcgtcagttatacaggggtctgggaaggacagtcatgagacaagcagtgtgtgtttaactagaaacagtgtccctttccaaaatgccctttaaggttg

SEQ ID NO: 282883 - DNA, 4437 bp, Homo sapiens
gcgaagacgttaggctaggtacgaggcctgggtggtgcatcatccttcatccctggctttcgcgctctagcggagtgggatctgcgaacacgtgaggcgggggcgcggtccccaggctgccgagatggccctgagcgacgaaccggccgcgggcggccccgaggaggaggcggaggacgagacactggcctttggcgcggcgctggaagcgttcggcgagagcgcggagacccgggcgctgctgggccgcctgcgggaggtgcacggcggcggcgcggagcgcgaggtggccctggagcggttccgcgtaataatggacaaataccaggagcagcctcatctgttggacccgcaccttgaatggatgatgaacttgttgttggacatagtgcaagatcagacatctccagcttcccttgtacatctggcttttaaatttctttacatcatcaccaaggttcgaggctataaaacatttcttcgtttatttcctcatgaagttgccgatgtagagcctgttttagatttggtcacaattcagaatcccaaggaccatgaagcttgggaaacccgctacatgcttttgctctggctctccgtgacctgcctgatcccttttgatttttctcgccttgacgggaacctcctcacccagcctgggcaagcacgaatgtccataatggaccgtattctccaaatagcagagtcctacttgattgtcagtgacaaggcccgagatgcagctgctgtccttgtgtccagatttatcacacgtcctgatgtcaagcaaagcaagatggctgagttcctggactggagcctgtgcaatctggcccgttcctccttccagaccatgcagggggtcatcaccatggatgggacgctgcaggccctggcacaaatatttaaacatggaaaacgtgaagactgtttgccctatgctgccactgtcctcaggtgcctcgatggctgcagactccctgagagcaaccagaccctgctgcggaagctgggggtgaagcttgtgcagcgactggggctgacattcctgaagccgaaggtggcagcatggaggtaccagcgtggctgccgatctttggctgcaaatctgcagctcctcactcagggtcagagtgagcagaagccactcatcctgaccgaagatgacgacgaagatgacgacgtcccagagggggtggagcgtgtgatagagcagctgctggtcgggctgaaggacaaggacacggtcgtgcggtggtctgcagccaagggcatcggtaggatggctggcaggcttcccagagccctggcggatgatgtggtcgggtctgtgctggactgcttcagtttccaggagactgacaaggcgtggcatgggggatgtctggcgctggcagagctgggcaggagaggcctgttgctgccgtctcgactcgtggatgttgtcgccgtgatcctgaaggcgctgacctacgacgagaagcggggtgcctgcagcgtgggcaccaacgtcagggacgccgcctgctacgtgtgctgggccttcgcgcgtgcctatgagcctcaggagctgaagccctttgtgactgcaatctcgagtgcactggtgattgctgcggtgtttgaccgagacataaactgcagaagagcagcctctgccgccttccaggagaatgtggggagacagggcactttccctcatggtattgatattttgaccacagctgactattttgccgtcggtaacagatccaactgtttcctggttataagtgtgtttattgccggctttcctgagtacacgcagccaatgatagaccacctggttaccatgaagatcagccactgggatggggtcatccgagagttggctgcgagggcgctgcacaacctggcccagcaggcacccgagttcagcgccacgcaagtcttcccgaggctgctgtccatgacactgagtccagatcttcacatgaggcatgggtcgattctcgcctgcgcagaagttgcttacgccttgtacaaacttgcagcccaagagaacaggcccgtcacggaccatctggacgagcaggcagtgcagggcctgaagcagattcaccagcagctctatgatcgtcagttatacaggggtctgggaggacagctcatgagacaagcagtgtgtgttttaatagaaaagttgtcactttccaaaatgccctttagaggtgacaccgtaattgatggttggcaatggctgataaatgacactttgagacatctccatctcatctcaagtcactcccgccagcagatgaaggatgcagcagtctcggccctggctgctctatgcagtgaatattacatgaaggagccgggggaggcagatcccgcaattcaggaggagctgatcacgcagtacctggctgagcttcggaaccccgaggagatgactcgctgtggcttctcgttggccttgggcgcccttccaggcttccttctgaaaggccggctccagcaggttctcacaggtttaagagcagttacccacacttcccccgaggacgtaagttttgctgagtccaggagagacggcttgaaggccattgcgaggatttgccagactgttggtgtgaaagcaggagccccagacgaagctgtgtgcggagagaatgtttcccagatttactgtgcgctgctgggctgcatggacgactacaccacggacagcagaggggacgtgggcacctgggtccgcaaggccgccatgaccagtctgatggatctgacacttctgctggctcggagccagcctgagctgatcgaggcccatacctgtgagcgcatcatgtgctgtgtggcccagcaggccagtgagaagattgaccgtttccgtgctcacgccgccagcgtgttcctgacgctcctgcactttgacagccctcccatcccccacgtgccccaccgaggagaactggaaaagctgtttcccaggtccgatgtggcctccgtgaactggagtgcaccttcccaggccttcccacgcatcacccagctccttgggctgcccacctaccgctaccacgtcctgctggggctagtcgtgtccctgggcggcttgacggagtcgacgatccggcactccacccagagcctctttgagtacatgaagggcattcagagcgacccgcaggccctgggcagcttcagcgggacccttctgcagatctttgaggacaaccttctgaatgagagggtgtccgtgccgctgctgaagacgctggaccacgtgctcacccacggctgcttcgacatcttcaccacggaggaggaccacccctttgctgtgaagttgcttgcgctctgtaagaaagaaatcaagaattcaaaagatatccagaagctcctgtcaggcatcgcagtgttctgcgggatggtgcagttccccggcgacgtgaggaggcaggccctcctgcagctgtgtctgctcctctgccaccgtttcccgctgatccggaagaccacggccagccaggtgtacgagacattgctcacctacagtgacgtcgtgggcgcggatgtgctggacgaggtggtgactgtgctcagtgacactgcgtgggacgcggagcttgcagtggtgagagagcagcgcaaccgtctgtgtgaccttctgggcgtacccaggccccagctggtgccccagcctggtgcctgctgaagccagtcctggagcccatacctcacccctgcctggtgaggatgtcttgttcctgagggaggccggtgtggaaagcctcgcacagtggtgcctccagctgttgaagggtagcgctggcccttggaggctggcactagctgacagcttttcctctctgcacctgcgctctggtgacttggggtggacgcctctgccttcacttgaacacaaatgtgcttcctataaaatcatgtaccaagaagaagttcctgccttttgtctctgagcctgatgtgtgtaggggtgatggaaaggctcactgcccaggggtcagccagaggggaggtgggctgcactcctcctgcctggagaccaggcccccttcttgcctggtgctgtccctgctgtgggagacgtctggccacaggcagtgccccacccagtcttggagagagatgaatgttaaatcagaggttcaaatgctagagaactgagaagccctggtggcaggcatggtctggagtgctgggcagatgctgtttctgggcccgtctgcctggtgggggtgctgtcctcccccctgtgcacacgtgagcatcgtgcatgtggcccctctgcagtgcaggagtcactgattgatgggtgtgccgaccagcagcttcacaaatgtctgctgcaaggggaatcgtcagagtccaatgtgtgcctctacagtaatgtcggaaataaataccattcttgaaataaaaaaaaaa

SEQ ID NO: 282884 - DNA, 4065 bp, Homo sapiens
  misc_feature (3436)..(3436): n is a, c, g, or t
  misc_feature (3460)..(3460): n is a, c, g, or t
  misc_feature (3519)..(3519): n is a, c, g, or t
gggccagcgtcggttgccgccttagcgggcgcctccttttcatccctcatccttcatccctggctttcgcgctctagcggagtgggatctgcgaacacgtgaggcgggggcgcggtccccaggctgccgagatggccctgagcgacgaaccggccgcgggcggccccgaggaggaggcggaggacgagacactggcctttggcgcggcgctggaagcgttcggcgagagcgcggagacccgggcgctgctgggccgcctgcgggaggtgcacggcggcggcgcggagcgcgaggtggccctggagcggttccgcgtaataatggacaaataccaggagcagcctcatctgttggacccgcaccttgaatggatgatgaacttgttgttggacatagtgcaagatcagacatctccagcttcccttgtacatctggcttttaaatttctttacatcatcaccaaggttcgaggctataaaacatttcttcgtttatttcctcatgaagttgccgatgtagagcctgttttagatttggtcacaattcagaatcccaaggaccatgaagcttgggaaacccgctacatgcttttgctctggctctccgtgacctgcctgatcccttttgatttttctcgccttgacgggaacctcctcacccagcctgggcaagcacgaatgtccataatggaccgtattctccaaatagcagagtcctacttgattgtcagtgacaaggcccgagatgcagctgctgtccttgtgtccagatttatcacacgtcctgatgtcaagcaaagcaagatggctgagttcctggactggagcctgtgcaatctggcccgttcctccttccagaccatgcagggggtcatcaccatggatgggacgctgcaggccctggcacaaatatttaaacatggaaaacgtgaagactgtttgccctatgctgccactgtcctcaggtgcctcgatggctgcagactccctgagagcaaccagaccctgctgcggaagctgggggtgaagcttgtgcagcgactggggctgacattcctgaagccgaaggtggcagcatggaggtaccagcgtggctgccgatctttggctgcaaatctgcagctcctcactcagggtcagagtgagcagaagccactcatcctgaccgaagatgacgacgaagatgacgacgtcccagagggggtggagcgtgtgatagagcagctgctggtcgggctgaaggacaaggacacggtcgtgcggtggtctgcagccaagggcatcggtaggatggctggcaggcttcccagagccctggcggatgatgtggtcgggtctgtgctggactgcttcagtttccaggagactgacaaggcgtggcatgggggatgtctggcgctggcagagctgggcaggagaggcctgttgctgccgtctcgactcgtggatgttgtcgccgtgatcctgaaggcgctgacctacgacgagaagcggggtgcctgcagcgtgggcaccaacgtcagggacgccgcctgctacgtgtgctgggccttcgcgcgtgcctatgagcctcaggagctgaagccctttgtgactgcaatctcgagtgcactggtgattgctgcggtgtttgaccgagacataaactgcagaagagcagcctctgccgccttccaggagaatgtggggagacagggcactttccctcatggtattgatattttgaccacagctgactattttgccgtcggtaacagatccaactgtttcctggttataagtgtgtttattgccggctttcctgagtacacgcagccaatgatagaccacctggttaccatgaagatcagccactgggatggggtcatccgagagttggctgcgagggcgctgcacaacctggcccagcaggcacccgagttcagcgccacgcaagtcttcccgaggctgctgtccatgacactgagtccagatcttcacatgaggcatgggtcgattctcgcctgcgcagaagttgcttacgccttgtacaaacttgcagcccaagagaacaggcccgtcacggaccatctggacgagcaggcagtgcagggcctgaagcagattcaccagcagctctatgatcgtcagttatacaggggtctgggaggacagctcatgagacaagcagtgtgtgttttaatagaaaagttgtcactttccaaaatgccctttagaggtgacaccgtaattgatggttggcaatggctgataaatgacactttgagacatctccatctcatctcaagtcactcccgccagcagatgaaggatgcagcagtctcggccctggctgctctatgcagtgaatattacatgaaggagccgggggaggcagatcccgcaattcaggaggagctgatcacgcagtacctggctgagcttcggaaccccgaggagatgactcgctgtggcttctcgttggccttgggcgcccttccaggcttccttctgaaaggccggctccagcaggttctcacaggtttaagagcagttacccacacttcccccgaggacgtaagttttgctgagtccaggagagacggcttgaaggccattgcgaggatttgccagactgttggtgtgaaagcaggagccccagacgaagctgtgtgcggagagaatgtttcccagatttactgtgcgctgctgggctgcatggacgactacaccacggacagcagaggggacgtgggcacctgggtccgcaaggccgccatgaccagtctgatggatctgacacttctgctggctcggagccagcctgagctgatcgaggcccatacctgtgagcgcatcatgtgctgtgtggcccagcaggccagtgagaagattgaccgtttccgtgctcacgccgccagcgtgttcctgacgctcctgcactttgacagccctcccatcccccacgtgccccaccgaggagaactggaaaagctgtttcccaggtccgatgtggcctccgtgaactggagtgcaccttcccaggccttcccacgcatcacccagctccttgggctgcccacctaccgctaccacgtcctgctggggctagtcgtgtccctgggcggcttgacggagtcgacgatccggcactccacccagagcctctttgagtacatgaagggcattcagagcgacccgcaggccctgggcagcttcagcgggacccttctgcagatctttgaggacaaccttctgaatgagagggtgtccgtgccgctgctgaagacgctggaccacgtgctcacccacggctgcttcgacatcttcaccacggaggaggaccacccctttgctgtgaagttgcttgcgctctgtaagaaagaaatcaagaattcaaaagatatccagaagctcctgtcaggcatcgcagttgactttccaagtgcgacactcgngtgtgtaggcacagtgcagatgtncgcacacacacacctccggcttggggccccaggcccgcactgtgctcacggatctgctntgcccaggttctgcgggatggtgcagttccccggcgacgtgaggaggcaggccctcctgcagctgtgtctgctcctctgccaccgtttcccgctgatccggaagaccacggccagccaggtgtacgagacattgctcacctacagtgacgtcgtgggcgcggatgtgctggacgaggtggtgactgtgctcagtgacactgcgtgggacgcggagcttgcagtggtgagagagcagcgcaaccgtctgtgtgaccttctgggcgtacccaggccccagctggtgccccagcctggtgcctgctgaagccagtcctggagcccatacctcacccctgcctggtgaggatgtcttgttcctgagggaggccggtgtggaaagcctcgcacagtggtgcctccagctgttgaagggtagcgctggcccttggaggctggcactagctgacagcttttcctctctgcacctgcgctctggtgacttggggtggacgcctctgccttcacttgaacacaaatgtgcttcctataaaatcatgtaccaagaa

SEQ ID NO: 282885 - DNA, 4092 bp, Homo sapiens
gggccagcgtcggttgccgccttagcgggcgcctccttttcatccctcatccttcatccctggctttcgcgctctagcggagtgggatctgcgaacacgtgaggcgggggcgcggtccccaggctgccgagatggccctgagcgacgaaccggccgcgggcggccccgaggaggaggcggaggacgagacactggcctttggcgcggcgctggaagcgttcggcgagagcgcggagacccgggcgctgctgggccgcctgcgggaggtgcacggcggcggcgcggagcgcgaggtggccctggagcggttccgcgtaataatggacaaataccaggagcagcctcatctgttggacccgcaccttgaatggatgatgaacttgttgttggacatagtgcaagatcagacatctccagcttcccttgtacatctggcttttaaatttctttacatcatcaccaaggttcgaggctataaaacatttcttcgtttatttcctcatgaagttgccgatgtagagcctgttttagatttggtcacaattcagaatcccaaggaccatgaagcttgggaaacccgctacatgcttttgctctggctctccgtgacctgcctgatcccttttgatttttctcgccttgacgggaacctcctcacccagcctgggcaagcacgaatgtccataatggaccgtattctccaaatagcagagtcctacttgattgtcagtgacaaggcccgagatgcagctgctgtccttgtgtccagatttatcacacgtcctgatgtcaagcaaagcaagatggctgagttcctggactggagcctgtgcaatctggcccgttcctccttccagaccatgcagggggtcatcaccatggatgggacgctgcaggccctggcacaaatatttaaacatggaaaacgtgaagactgtttgccctatgctgccactgtcctcaggtgcctcgatggctgcagactccctgagagcaaccagaccctgctgcggaagctgggggtgaagcttgtgcagcgactggggctgacattcctgaagccgaaggtggcagcatggaggtaccagcgtggctgccgatctttggctgcaaatctgcagctcctcactcagggtcagagtgagcagaagccactcatcctgaccgaagatgacgacgaagatgacgacgtcccagagggggtggagcgtgtgatagagcagctgctggtcgggctgaaggacaaggacacggtcgtgcggtggtctgcagccaagggcatcggtaggatggctggcaggcttcccagagccctggcggatgatgtggtcgggtctgtgctggactgcttcagtttccaggagactgacaaggcgtggcatgggggatgtctggcgctggcagagctgggcaggagaggcctgttgctgccgtctcgactcgtggatgttgtcgccgtgatcctgaaggcgctgacctacgacgagaagcggggtgcctgcagcgtgggcaccaacgtcagggacgccgcctgctacgtgtgctgggccttcgcgcgtgcctatgagcctcaggagctgaagccctttgtgactgcaatctcgagtgcactggtgattgctgcggtgtttgaccgagacataaactgcagaagagcagcctctgccgccttccaggagaatgtggggagacagggcactttccctcatggtattgatattttgaccacagctgactattttgccgtcggtaacagatccaactgtttcctggttataagtgtgtttattgccggctttcctgagtacacgcagccaatgatagaccacctggttaccatgaagatcagccactgggatggggtcatccgagagttggctgcgagggcgctgcacaacctggcccagcaggcacccgagttcagcgccacgcaagtcttcccgaggctgctgtccatgacactgagtccagatcttcacatgaggcatgggtcgattctcgcctgcgcagaagttgcttacgccttgtacaaacttgcagcccaagagaacaggcccgtcacggaccatctggacgagcaggcagtgcagggcctgaagcagattcaccagcagccgtgcatctgcagctggggtctgatgtctcctgaaagtaaagcagaattttgtgtgtgcgtctgtcggatttctctggggagacagtgtgttcatctttctgggctttgagagattctcaaaggcttctgtgacccagagctctatgatcgtcagttatacaggggtctgggaggacagctcatgagacaagcagtgtgtgttttaatagaaaagttgtcactttccaaaatgccctttagaggtgacaccgtaattgatggttggcaatggctgataaatgacactttgagacatctccatctcatctcaagtcactcccgccagcagatgaaggatgcagcagtctcggccctggctgctctatgcagtgaatattacatgaaggagccgggggaggcagatcccgcaattcaggaggagctgatcacgcagtacctggctgagcttcggaaccccgaggagatgactcgctgtggcttctcgttggccttgggcgcccttccaggcttccttctgaaaggccggctccagcaggttctcacaggtttaagagcagttacccacacttcccccgaggacgtaagttttgctgagtccaggagagacggcttgaaggccattgcgaggatttgccagactgttggtgtgaaagcaggagccccagacgaagctgtgtgcggagagaatgtttcccagatttactgtgcgctgctgggctgcatggacgactacaccacggacagcagaggggacgtgggcacctgggtccgcaaggccgccatgaccagtctgatggatctgacacttctgctggctcggagccagcctgagctgatcgaggcccatacctgtgagcgcatcatgtgctgtgtggcccagcaggccagtgagaagattgaccgtttccgtgctcacgccgccagcgtgttcctgacgctcctgcactttgacagccctcccatcccccacgtgccccaccgaggagaactggaaaagctgtttcccaggtccgatgtggcctccgtgaactggagtgcaccttcccaggccttcccacgcatcacccagctccttgggctgcccacctaccgctaccacgtcctgctggggctagtcgtgtccctgggcggcttgacggagtcgacgatccggcactccacccagagcctctttgagtacatgaagggcattcagagcgacccgcaggccctgggcagcttcagcgggacccttctgcagatctttgaggacaaccttctgaatgagagggtgtccgtgccgctgctgaagacgctggaccacgtgctcacccacggctgcttcgacatcttcaccacggaggaggaccacccctttgctgtgaagttgcttgcgctctgtaagaaagaaatcaagaattcaaaagatatccagaagctcctgtcaggcatcgcagtgttctgcgggatggtgcagttccccggcgacgtgaggaggcaggccctcctgcagctgtgtctgctcctctgccaccgtttcccgctgatccggaagaccacggccagccaggtgtacgagacattgctcacctacagtgacgtcgtgggcgcggatgtgctggacgaggtggtgactgtgctcagtgacactgcgtgggacgcggagcttgcagtggtgagagagcagcgcaaccgtctgtgtgaccttctgggcgtacccaggccccagctggtgccccagcctggtgcctgctgaagccagtcctggagcccatacctcacccctgcctggtgaggatgtcttgttcctgagggaggccggtgtggaaagcctcgcacagtggtgcctccagctgttgaagggtagcgctggcccttggaggctggcactagctgacagcttttcctctctgcacctgcgctctggtgacttggggtggacgcctctgccttcacttgaacacaaatgtgcttcctataaaatcatgtaccaagaa

SEQ ID NO: 282886 - DNA, 4071 bp, Homo sapiens
gggccagcgtcggttgccgccttagcgggcgcctccttttcatccctcatccttcatccctggctttcgcgctctagcggagtgggatctgcgaacacgtgaggcgggggcgcggtccccaggctgccgagatggccctgagcgacgaaccggccgcgggcggccccgaggaggaggcggaggacgagacactggcctttggcgcggcgctggaagcgttcggcgagagcgcggagacccgggcgctgctgggccgcctgcgggaggtgcacggcggcggcgcggagcgcgaggtggccctggagcggttccgcgtaataatggacaaataccaggagcagcctcatctgttggacccgcaccttgaatggatgatgaacttgttgttggacatagtgcaagatcagacatctccagcttcccttgtacatctggcttttaaatttctttacatcatcaccaaggttcgaggctataaaacatttcttcgtttatttcctcatgaagttgccgatgtagagcctgttttagatttggtcacaattcagaatcccaaggaccatgaagcttgggaaacccgctacatgcttttgctctggctctccgtgacctgcctgatcccttttgatttttctcgccttgacgggaacctcctcacccagcctgggcaagcacgaatgtccataatggaccgtattctccaaatagcagagtcctacttgattgtcagtgacaaggcccgagatgcagctgctgtccttgtgtccagatttatcacacgtcctgatgtcaagcaaagcaagatggctgagttcctggactggagcctgtgcaatctggcccgttcctccttccagaccatgcagggggtcatcaccatggatgggacgctgcaggccctggcacaaatatttaaacatggaaaacgtgaagactgtttgccctatgctgccactgtcctcaggtgcctcgatggctgcagactccctgagagcaaccagaccctgctgcggaagctgggggtgaagcttgtgcagcgactggggctgacattcctgaagccgaaggtggcagcatggaggtaccagcgtggctgccgatctttggctgcaaatctgcagctcctcactcagggtcagagtgagcagaagccactcatcctgaccgaagatgacgacgaagatgacgacgtcccagagggggtggagcgtgtgatagagcagctgctggtcgggctgaaggacaaggacacggtcgtgcggtggtctgcagccaagggcatcggtaggatggctggcaggcttcccagagccctggcggatgatgtggtcgggtctgtgctggactgcttcagtttccaggagactgacaaggcgtggcatgggggatgtctggcgctggcagagctgggcaggagaggcctgttgctgccgtctcgactcgtggatgttgtcgccgtgatcctgaaggcgctgacctacgacgagaagcggggtgcctgcagcgtgggcaccaacgtcagggacgccgcctgctacgtgtgctgggccttcgcgcgtgcctatgagcctcaggagctgaagccctttgtgactgcaatctcgagtgcactggtgattgctgcggtgtttgaccgagacataaactgcagaagagcagcctctgccgccttccaggagaatgtggggagacagggcactttccctcatggtattgatattttgaccacagctgactattttgccgtcggtaacagatccaactgtttcctggttataagtgtgtttattgccggctttcctgagtacacgcagccaatgatagaccacctggttaccatgaagatcagccactgggatggggtcatccgagagttggctgcgagggcgctgcacaacctggcccagcaggcacccgagttcagcgccacgcaagtcttcccgaggctgctgtccatgacactgagtccagatcttcacatgaggcatgggtcgattctcgcctgcgcagaagttgcttacgccttgtacaaacttgcagcccaagagaacaggcccgtcacggaccatctggacgagcaggcagtgcagggcctgaagcagattcaccagcagctctatgatcgtcagttatacaggggtctgggaggacagctcatgagacaagcagtgtgtgttttaatagaaaagttgtcactttccaaaatgccctttagaggtgacaccgtaattgatggttggcaatggctgataaatgacactttgagacatctccatctcatctcaagtcactcccgccagcagatgaaggatgcagcagtctcggccctggctgctctatgcagtgaatattacatgaaggagccgggggaggcagatcccgcaattcaggaggagctgatcacgcagtacctggctgagcttcggaaccccgaggagatgactcgctgtggcttctcgttggccttgggcgcccttccaggcttccttctgaaaggccggctccagcaggttctcacaggtttaagagcagttacccacacttcccccgaggacgtaagttttgctgagtccaggagagacggcttgaaggccattgcgaggatttgccagactgttggtgtgaaagcaggagccccagacgaagctgtgtgcggagagaatgtttcccagatttactgtgcgctgctgggctgcatggacgactacaccacggacagcagaggggacgtgggcacctgggtccgcaaggccgccatgaccagtctgatggatctgacacttctgctggctcggagccagcctgagctgatcgaggcccatacctgtgagcgcatcatgtgctgtgtggcccagcaggccagtgagaagattgaccgtttccgtgctcacgccgccagcgtgttcctgacgctcctgcactttgacagccctcccatcccccacgtgccccaccgaggagaactggaaaagctgtttcccaggtccgatgtggcctccgtgaactggagtgcaccttcccaggccttcccacgcatcacccagctccttgggctgcccacctaccgctaccacgtcctgctggggctagtcgtgtccctgggcggcttgacggagtcgacgatccggcactccacccagagcctctttgagtacatgaagggcattcagagcgacccgcaggccctgggcagcttcagcgggacccttctgcagatctttgaggacaaccttctgaatgagagggtgtccgtgccgctgctgaagacgctggaccacgtgctcacccacggctgcttcgacatcttcaccacggaggaggagtgaggctctgcttttcatgacttcctttccgattaagcctaagtagctcatgtattaaagaaaaagtcatcagacacagagatcagaattccaggaaatgatcttccagtgcgttctggccacccctttgctgtgaagttgcttgcgctctgtaagaaagaaatcaagaattcaaaagatatccagaagctcctgtcaggcatcgcagtgttctgcgggatggtgcagttccccggcgacgtgaggaggcaggccctcctgcagctgtgtctgctcctctgccaccgtttcccgctgatccggaagaccacggccagccaggtgtacgagacattgctcacctacagtgacgtcgtgggcgcggatgtgctggacgaggtggtgactgtgctcagtgacactgcgtgggacgcggagcttgcagtggtgagagagcagcgcaaccgtctgtgtgaccttctgggcgtacccaggccccagctggtgccccagcctggtgcctgctgaagccagtcctggagcccatacctcacccctgcctggtgaggatgtcttgttcctgagggaggccggtgtggaaagcctcgcacagtggtgcctccagctgttgaagggtagcgctggcccttggaggctggcactagctgacagcttttcctctctgcacctgcgctctggtgacttggggtggacgcctctgccttcacttgaacacaaatgtgcttcctataaaatcatgtaccaagaa

SEQ ID NO: 282887 - DNA, 2720 bp, Homo sapiens
gtgaggacaaagagtggaggttggagttcagaattgtggacaggctcctgaggaccagcagaggctggaggccagggcttgccgccgggagtgtggctgtggaaagattccagtccacagtgggggctgctgcccagactcaccctgaataaagtgtcttcagagccacctgtcctgcctgttcatggcagtgacccagaaagattcatcagtgggcgttgtcgccgtgatcctgaaggcgctgacctacgacgagaagcggggtgcctgcagcgtgggcaccaacgtcagggacgccgcctgctacgtgtgctgggccttcgcgcgtgcctatgagcctcaggagctgaagccctttgtgactgcaatctcgagtgcactggtgattgctgcggtgtttgaccgagacataaactgcagaagagcagcctctgccgccttccaggagaatgtggggagacagggcactttccctcatggtattgatattttgaccacagctgactattttgccgtcggtaacagatccaactgtttcctggttataagtgtgtttattgccggctttcctgagtacacgcagccaatgatagaccacctggttaccatgaagatcagccactgggatggggtcatccgagagttggctgcgagggcgctgcacaacctggcccagcaggcacccgagttcagcgccacgcaagtcttcccgaggctgctgtccatgacactgagtccagatcttcacatgaggcatgggtcgattctcgcctgcgcagaagttgcttacgccttgtacaaacttgcagcccaagagaacaggcccgtcacggaccatctggacgagcaggcagtgcagggcctgaagcagattcaccagcagctctatgatcgtcagttatacaggggtctgggaggacagctcatgagacaagcagtgtgtgttttaatagaaaagttgtcactttccaaaatgccctttagaggtgacaccgtaattgatggttggcaatggctgataaatgacactttgagacatctccatctcatctcaagtcactcccgccagcagatgaaggatgcagcagtctcggccctggctgctctatgcagtgaatattacatgaaggagccgggggaggcagatcccgcaattcaggaggagctgatcacgcagtacctggctgagcttcggaaccccgaggagatgactcgctgtggcttctcgttggccttgggcgcccttccaggcttccttctgaaaggccggctccagcaggttctcacaggtttaagagcagttacccacacttcccccgaggacgtaagttttgctgagtccaggagagacggcttgaaggccattgcgaggatttgccagactgttggtgtgaaagcaggagccccagacgaagctgtgtgcggagagaatgtttcccagatttactgtgcgctgctgggctgcatggacgactacaccacggacagcagaggggacgtgggcacctgggtccgcaaggccgccatgaccagtctgatggatctgacacttctgctggctcggagccagcctgagctgatcgaggcccatacctgtgagcgcatcatgtgctgtgtggcccagcaggccagtgagaagattgaccgtttccgtgctcacgccgccagcgtgttcctgacgctcctgcactttgacagccctcccatcccccacgtgccccaccgaggagaactggaaaagctgtttcccaggtccgatgtggcctccgtgaactggagtgcaccttcccaggccttcccacgcatcacccagctccttgggctgcccacctaccgctaccacgtcctgctggggctagtcgtgtccctgggcggcttgacggagtcgacgatccggcactccacccagagcctctttgagtacatgaagggcattcagagcgacccgcaggccctgggcagcttcagcgggacccttctgcagatctttgaggacaaccttctgaatgagagggtgtccgtgccgctgctgaagacgctggaccacgtgctcacccacggctgcttcgacatcttcaccacggaggaggaccacccctttgctgtgaagttgcttgcgctctgtaagaaagaaatcaagaattcaaaagatatccagaagctcctgtcaggcatcgcagtgttctgcgggatggtgcagttccccggcgacgtgaggaggcaggccctcctgcagctgtgtctgctcctctgccaccgtttcccgctgatccggaagaccacggccagccaggtgtacgagacattgctcacctacagtgacgtcgtgggcgcggatgtgctggacgaggtggtgactgtgctcagtgacactgcgtgggacgcggagcttgcagtggtgagagagcagcgcaaccgtctgtgtgaccttctgggcgtacccaggccccagctggtgccccagcctggtgcctgctgaagccagtcctggagcccatacctcacccctgcctggtgaggatgtcttgttcctgagggaggccggtgtggaaagcctcgcacagtggtgcctccagctgttgaagggtagcgctggcccttggaggctggcactagctgacagcttttcctctctgcacctgcgctctggtgacttggggtggacgcctctgccttcacttgaacacaaatgtgcttcctataaaatcatgtaccaagaa

SEQ ID NO: 282888 - DNA, 2280 bp, Homo sapiens
gaagaaatgggcaaactggttttgaaagtaactgtgctgaattcccacccacaggcagtgagttctcgttcttccgcgtctcaccacctctccatgctgtcttttccagtgtgtttattgccggctttcctgagtacacgcagccaatgatagaccacctggttaccatgaagatcagccactgggatggggtcatccgagagttggctgcgagggcgctgcacaacctggcccagcaggcacccgagttcagcgccacgcaagtcttcccgaggctgctgtccatgacactgagtccagatcttcacatgaggcatgggtcgattctcgcctgcgcagaagttgcttacgccttgtacaaacttgcagcccaagagaacaggcccgtcacggaccatctggacgagcaggcagtgcagggcctgaagcagattcaccagcagctctatgatcgtcagttatacaggggtctgggaggacagctcatgagacaagcagtgtgtgttttaatagaaaagttgtcactttccaaaatgccctttagaggtgacaccgtaattgatggttggcaatggctgataaatgacactttgagacatctccatctcatctcaagtcactcccgccagcagatgaaggatgcagcagtctcggccctggctgctctatgcagtgaatattacatgaaggagccgggggaggcagatcccgcaattcaggaggagctgatcacgcagtacctggctgagcttcggaaccccgaggagatgactcgctgtggcttctcgttggccttgggcgcccttccaggcttccttctgaaaggccggctccagcaggttctcacaggtttaagagcagttacccacacttcccccgaggacgtaagttttgctgagtccaggagagacggcttgaaggccattgcgaggatttgccagactgttggtgtgaaagcaggagccccagacgaagctgtgtgcggagagaatgtttcccagatttactgtgcgctgctgggctgcatggacgactacaccacggacagcagaggggacgtgggcacctgggtccgcaaggccgccatgaccagtctgatggatctgacacttctgctggctcggagccagcctgagctgatcgaggcccatacctgtgagcgcatcatgtgctgtgtggcccagcaggccagtgagaagattgaccgtttccgtgctcacgccgccagcgtgttcctgacgctcctgcactttgacagccctcccatcccccacgtgccccaccgaggagaactggaaaagctgtttcccaggtccgatgtggcctccgtgaactggagtgcaccttcccaggccttcccacgcatcacccagctccttgggctgcccacctaccgctaccacgtcctgctggggctagtcgtgtccctgggcggcttgacggagtcgacgatccggcactccacccagagcctctttgagtacatgaagggcattcagagcgacccgcaggccctgggcagcttcagcgggacccttctgcagatctttgaggacaaccttctgaatgagagggtgtccgtgccgctgctgaagacgctggaccacgtgctcacccacggctgcttcgacatcttcaccacggaggaggaccacccctttgctgtgaagttgcttgcgctctgtaagaaagaaatcaagaattcaaaagatatccagaagctcctgtcaggcatcgcagtgttctgcgggatggtgcagttccccggcgacgtgaggaggcaggccctcctgcagctgtgtctgctcctctgccaccgtttcccgctgatccggaagaccacggccagccaggtgtacgagacattgctcacctacagtgacgtcgtgggcgcggatgtgctggacgaggtggtgactgtgctcagtgacactgcgtgggacgcggagcttgcagtggtgagagagcagcgcaaccgtctgtgtgaccttctgggcgtacccaggccccagctggtgccccagcctggtgcctgctgaagccagtcctggagcccatacctcacccctgcctggtgaggatgtcttgttcctgagggaggccggtgtggaaagcctcgcacagtggtgcctccagctgttgaagggtagcgctggcccttggaggctggcactagctgacagcttttcctctctgcacctgcgctctggtgacttggggtggacgcctctgccttcacttgaacacaaatgtgcttcctataaaatcatgtaccaagaa

SEQ ID NO: 282889 - DNA, 2428 bp, Homo sapiens
  misc_feature (25)..(25): n is a, c, g, or t
  misc_feature (33)..(33): n is a, c, g, or t
ttaggctagtacgagctgggtgttnaatctggncgaggctgggctctggtccaggctttgtagaccgtgcaggcggctgcatccccgacctgacccaggcctgctcgctctggtgtgcaccgacctgccagctttgtggcactttgtggcatggggctcaggccgatggagggcactttccctcatggtattgatattttgaccacagctgactattttgccgtcggtaacagatccaactgtttcctggttataagtgtgtttattgccggctttcctgagtacacgcagccaatgatagaccacctggttaccatgaagatcagccactgggatggggtcatccgagagttggctgcgagggcgctgcacaacctggcccagcaggcacccgagttcagcgccacgcaagtcttcccgaggctgctgtccatgacactgagtccagatcttcacatgaggcatgggtcgattctcgcctgcgcagaagttgcttacgccttgtacaaacttgcagcccaagagaacaggcccgtcacggaccatctggacgagcaggcagtgcagggcctgaagcagattcaccagcagctctatgatcgtcagttatacaggggtctgggaggacagctcatgagacaagcagtgtgtgttttaatagaaaagttgtcactttccaaaatgccctttagaggtgacaccgtaattgatggttggcaatggctgataaatgacactttgagacatctccatctcatctcaagtcactcccgccagcagatgaaggatgcagcagtctcggccctggctgctctatgcagtgaatattacatgaaggagccgggggaggcagatcccgcaattcaggaggagctgatcacgcagtacctggctgagcttcggaaccccgaggagatgactcgctgtggcttctcgttggccttgggcgcccttccaggcttccttctgaaaggccggctccagcaggttctcacaggtttaagagcagttacccacacttcccccgaggacgtaagttttgctgagtccaggagagacggcttgaaggccattgcgaggatttgccagactgttggtgtgaaagcaggagccccagacgaagctgtgtgcggagagaatgtttcccagatttactgtgcgctgctgggctgcatggacgactacaccacggacagcagaggggacgtgggcacctgggtccgcaaggccgccatgaccagtctgatggatctgacacttctgctggctcggagccagcctgagctgatcgaggcccatacctgtgagcgcatcatgtgctgtgtggcccagcaggccagtgagaagattgaccgtttccgtgctcacgccgccagcgtgttcctgacgctcctgcactttgacagccctcccatcccccacgtgccccaccgaggagaactggaaaagctgtttcccaggtccgatgtggcctccgtgaactggagtgcaccttcccaggccttcccacgcatcacccagctccttgggctgcccacctaccgctaccacgtcctgctggggctagtcgtgtccctgggcggcttgacggagtcgacgatccggcactccacccagagcctctttgagtacatgaagggcattcagagcgacccgcaggccctgggcagcttcagcgggacccttctgcagatctttgaggacaaccttctgaatgagagggtgtccgtgccgctgctgaagacgctggaccacgtgctcacccacggctgcttcgacatcttcaccacggaggaggaccacccctttgctgtgaagttgcttgcgctctgtaagaaagaaatcaagaattcaaaagatatccagaagctcctgtcaggcatcgcagtgttctgcgggatggtgcagttccccggcgacgtgaggaggcaggccctcctgcagctgtgtctgctcctctgccaccgtttcccgctgatccggaagaccacggccagccaggtgtacgagacattgctcacctacagtgacgtcgtgggcgcggatgtgctggacgaggtggtgactgtgctcagtgacactgcgtgggacgcggagcttgcagtggtgagagagcagcgcaaccgtctgtgtgaccttctgggcgtacccaggccccagctggtgccccagcctggtgcctgctgaagccagtcctggagcccatacctcacccctgcctggtgaggatgtcttgttcctgagggaggccggtgtggaaagcctcgcacagtggtgcctccagctgttgaagggtagcgctggcccttggaggctggcactagctgacagcttttcctctctgcacctgcgctctggtgacttggggtggacgcctctgccttcacttgaacacaaatgtgcttcctataaaatcatgtaccaagaa

SEQ ID NO: 282890 - DNA, 2204 bp, Homo sapiens
ccacactgggctgccagagcacagtgaagggagcccccagggctgtggtgtcccggggctgtctcagcagcctcagaagttaggactttttttttgttaattgaatagccttcacatttgttgcttgtgcaggatctaattgagttaaagatttgggtttatattggtgggagccgggggagaccgtttgaaggaaaagatttaggggtaacaaaagaataaaagtttcccaaaatgtgatgtataaaaatttacagaatgctggtatttccctcaataagagcttacacaatttaacagccatgagaggaaggggccttagacttaacacaacgtggagaatgttcactttggcttttccacagattcctctcaaaggttaccatcgactttaagattagtattaatagaagctgtttttgctgttgtttttgatttcatggtgtttttgattgcctgggtacgctaacttgattttttgacagatggttggcaatggctgataaatgacactttgagacatctccatctcatctcaagtcactcccgccagcagatgaaggatgcagcagtctcggccctggctgctctatgcagtgaatattacatgaaggagccgggggaggcagatcccgcaattcaggaggagctgatcacgcagtacctggctgagcttcggaaccccgaggagatgactcgctgtggcttctcgttggccttgggcgcccttccaggcttccttctgaaaggccggctccagcaggttctcacaggtttaagagcagttacccacacttcccccgaggacgtaagttttgctgagtccaggagagacggcttgaaggccattgcgaggatttgccagactgttggtgtgaaagcaggagccccagacgaagctgtgtgcggagagaatgtttcccagatttactgtgcgctgctgggctgcatggacgactacaccacggacagcagaggggacgtgggcacctgggtccgcaaggccgccatgaccagtctgatggatctgacacttctgctggctcggagccagcctgagctgatcgaggcccatacctgtgagcgcatcatgtgctgtgtggcccagcaggccagtgagaagattgaccgtttccgtgctcacgccgccagcgtgttcctgacgctcctgcactttgacagccctcccatcccccacgtgccccaccgaggagaactggaaaagctgtttcccaggtccgatgtggcctccgtgaactggagtgcaccttcccaggccttcccacgcatcacccagctccttgggctgcccacctaccgctaccacgtcctgctggggctagtcgtgtccctgggcggcttgacggagtcgacgatccggcactccacccagagcctctttgagtacatgaagggcattcagagcgacccgcaggccctgggcagcttcagcgggacccttctgcagatctttgaggacaaccttctgaatgagagggtgtccgtgccgctgctgaagacgctggaccacgtgctcacccacggctgcttcgacatcttcaccacggaggaggaccacccctttgctgtgaagttgcttgcgctctgtaagaaagaaatcaagaattcaaaagatatccagaagctcctgtcaggcatcgcagtgttctgcgggatggtgcagttccccggcgacgtgaggaggcaggccctcctgcagctgtgtctgctcctctgccaccgtttcccgctgatccggaagaccacggccagccaggtgtacgagacattgctcacctacagtgacgtcgtgggcgcggatgtgctggacgaggtggtgactgtgctcagtgacactgcgtgggacgcggagcttgcagtggtgagagagcagcgcaaccgtctgtgtgaccttctgggcgtacccaggccccagctggtgccccagcctggtgcctgctgaagccagtcctggagcccatacctcacccctgcctggtgaggatgtcttgttcctgagggaggccggtgtggaaagcctcgcacagtggtgcctccagctgttgaagggtagcgctggcccttggaggctggcactagctgacagcttttcctctctgcacctgcgctctggtgacttggggtggacgcctctgccttcacttgaacacaaatgtgcttcctataaaatcatgtaccaagaa

SEQ ID NO: 282891 - DNA, 1405 bp, Homo sapiens
atctagaggatcccgtgcctctagtccaggagagacggcttgaaggccattgcgaggatttgccagactgttggtgtgaaagcaggagccccagacgaagctgtgtgcggagagaatgtttcccagatttactgtgcgctgctgggctgcatggacgactacaccacggacagcagaggggacgtgggcacctgggtccgcaaggccgccatgaccagtctgatggatctgacacttctgctggctcggagccagcctgagctgatcgaggcccatacctgtgagcgcatcatgtgctgtgtggcccagcaggccagtgagaagattgaccgtttccgtgctcacgccgccagcgtgttcctgacgctcctgcactttgacagccctcccatcccccacgtgccccaccgaggagaactggaaaagctgtttcccaggtccgatgtggcctccgtgaactggagtgcaccttcccaggccttcccacgcatcacccagctccttgggctgcccacctaccgctaccacgtcctgctggggctagtcgtgtccctgggcggcttgacggagtcgacgatccggcactccacccagagcctctttgagtacatgaagggcattcagagcgacccgcaggccctgggcagcttcagcgggacccttctgcagatctttgaggacaaccttctgaatgagagggtgtccgtgccgctgctgaagacgctggaccacgtgctcacccacggctgcttcgacatcttcaccacggaggaggaccacccctttgctgtgaagttgcttgcgctctgtaagaaagaaatcaagaattcaaaagatatccagaagctcctgtcaggcatcgcagtgttctgcgggatggtgcagttccccggcgacgtgaggaggcaggccctcctgcagctgtgtctgctcctctgccaccgtttcccgctgatccggaagaccacggccagccaggtgtacgagacattgctcacctacagtgacgtcgtgggcgcggatgtgctggacgaggtggtgactgtgctcagtgacactgcgtgggacgcggagcttgcagtggtgagagagcagcgcaaccgtctgtgtgaccttctgggcgtacccaggccccagctggtgccccagcctggtgcctgctgaagccagtcctggagcccatacctcacccctgcctggtgaggatgtcttgttcctgagggaggccggtgtggaaagcctcgcacagtggtgcctccagctgttgaagggtagcgctggcccttggaggctggcactagctgacagcttttcctctctgcacctgcgctctggtgacttggggtggacgcctctgccttcacttgaacacaaatgtgcttcctataaaatcatgtaccaagaa

SEQ ID NO: 282892 - DNA, 1163 bp, Homo sapiens
  misc_feature (1)..(1): n is a, c, g, or t
ntgtgatctagcggatcctttttgcggctgcctttcctgtgagcgcatcatgtgctgtgtggcccagcaggccagtgagaagattgaccgtttccgtgctcacgccgccagcgtgttcctgacgctcctgcactttgacagccctcccatcccccacgtgccccaccgaggagaactggaaaagctgtttcccaggtccgatgtggcctccgtgaactggagtgcaccttcccaggccttcccacgcatcacccagctccttgggctgcccacctaccgctaccacgtcctgctggggctagtcgtgtccctgggcggcttgacggagtcgacgatccggcactccacccagagcctctttgagtacatgaagggcattcagagcgacccgcaggccctgggcagcttcagcgggacccttctgcagatctttgaggacaaccttctgaatgagagggtgtccgtgccgctgctgaagacgctggaccacgtgctcacccacggctgcttcgacatcttcaccacggaggaggaccacccctttgctgtgaagttgcttgcgctctgtaagaaagaaatcaagaattcaaaagatatccagaagctcctgtcaggcatcgcagtgttctgcgggatggtgcagttccccggcgacgtgaggaggcaggccctcctgcagctgtgtctgctcctctgccaccgtttcccgctgatccggaagaccacggccagccaggtgtacgagacattgctcacctacagtgacgtcgtgggcgcggatgtgctggacgaggtggtgactgtgctcagtgacactgcgtgggacgcggagcttgcagtggtgagagagcagcgcaaccgtctgtgtgaccttctgggcgtacccaggccccagctggtgccccagcctggtgcctgctgaagccagtcctggagcccatacctcacccctgcctggtgaggatgtcttgttcctgagggaggccggtgtggaaagcctcgcacagtggtgcctccagctgttgaagggtagcgctggcccttggaggctggcactagctgacagcttttcctctctgcacctgcgctctggtgacttggggtggacgcctctgccttcacttgaacacaaatgtgcttcctataaaatcatgtaccaagaa

SEQ ID NO: 282893 - DNA, 729 bp, Homo sapiens
tcacagctccttctcccctcagggtgtccgtgccgctgctgaagacgctggaccacgtgctcacccacggctgcttcgacatcttcaccacggaggaggaccacccctttgctgtgaagttgcttgcgctctgtaagaaagaaatcaagaattcaaaagatatccagaagctcctgtcaggcatcgcagtgttctgcgggatggtgcagttccccggcgacgtgaggaggcaggccctcctgcagctgtgtctgctcctctgccaccgtttcccgctgatccggaagaccacggccagccaggtgtacgagacattgctcacctacagtgacgtcgtgggcgcggatgtgctggacgaggtggtgactgtgctcagtgacactgcgtgggacgcggagcttgcagtggtgagagagcagcgcaaccgtctgtgtgaccttctgggcgtacccaggccccagctggtgccccagcctggtgcctgctgaagccagtcctggagcccatacctcacccctgcctggtgaggatgtcttgttcctgagggaggccggtgtggaaagcctcgcacagtggtgcctccagctgttgaagggtagcgctggcccttggaggctggcactagctgacagcttttcctctctgcacctgcgctctggtgacttggggtggacgcctctgccttcacttgaacacaaatgtgcttcctataaaatcatgtaccaagaa

SEQ ID NO: 282894 - DNA, 2583 bp, Homo sapiens
  misc_feature (2332)..(2332): n is a, c, g, or t
  misc_feature (2349)..(2349): n is a, c, g, or t
  misc_feature (2468)..(2468): n is a, c, g, or t
  misc_feature (2508)..(2508): n is a, c, g, or t
gggccagcgtcggttgccgccttagcgggcgcctccttttcatccctcatccttcatccctggctttcgcgctctagcggagtgggatctgcgaacacgtgaggcgggggcgcggtccccaggctgccgagatggccctgagcgacgaaccggccgcgggcggccccgaggaggaggcggaggacgagacactggcctttggcgcggcgctggaagcgttcggcgagagcgcggagacccgggcgctgctgggccgcctgcgggaggtgcacggcggcggcgcggagcgcgaggtggccctggagcggttccgcgtaataatggacaaataccaggagcagcctcatctgttggacccgcaccttgaatggatgatgaacttgttgttggacatagtgcaagatcagacatctccagcttcccttgtacatctggcttttaaatttctttacatcatcaccaaggttcgaggctataaaacatttcttcgtttatttcctcatgaagttgccgatgtagagcctgttttagatttggtcacaattcagaatcccaaggaccatgaagcttgggaaacccgctacatgcttttgctctggctctccgtgacctgcctgatcccttttgatttttctcgccttgacgggaacctcctcacccagcctgggcaagcacgaatgtccataatggaccgtattctccaaatagcagagtcctacttgattgtcagtgacaaggcccgagatgcagctgctgtccttgtgtccagatttatcacacgtcctgatgtcaagcaaagcaagatggctgagttcctggactggagcctgtgcaatctggcccgttcctccttccagaccatgcagggggtcatcaccatggatgggacgctgcaggccctggcacaaatatttaaacatggaaaacgtgaagactgtttgccctatgctgccactgtcctcaggtgcctcgatggctgcagactccctgagagcaaccagaccctgctgcggaagctgggggtgaagcttgtgcagcgactggggctgacattcctgaagccgaaggtggcagcatggaggtaccagcgtggctgccgatctttggctgcaaatctgcagctcctcactcagggtcagagtgagcagaagccactcatcctgaccgaagatgacgacgaagatgacgacgtcccagagggggtggagcgtgtgatagagcagctgctggtcgggctgaaggacaaggacacggtcgtgcggtggtctgcagccaagggcatcggtaggatggctggcaggcttcccagagccctggcggatgatgtggtcgggtctgtgctggactgcttcagtttccaggagactgacaaggcgtggcatgggggatgtctggcgctggcagagctgggcaggagaggcctgttgctgccgtctcgactcgtggatgttgtcgccgtgatcctgaaggcgctgacctacgacgagaagcggggtgcctgcagcgtgggcaccaacgtcagggacgccgcctgctacgtgtgctgggccttcgcgcgtgcctatgagcctcaggagctgaagccctttgtgactgcaatctcgagtgcactggtgattgctgcggtgtttgaccgagacataaactgcagaagagcagcctctgccgccttccaggagaatgtggggagacagggcactttccctcatggtattgatattttgaccacagctgactattttgccgtcggtaacagatccaactgtttcctggttataagtgtgtttattgccggctttcctgagtacacgcagccaatgatagaccacctggttaccatgaagatcagccactgggatggggtcatccgagagttggctgcgagggcgctgcacaacctggcccagcaggcacccgagttcagcgccacgcaagtcttcccgaggctgctgtccatgacactgagtccagatcttcacatgaggcatgggtcgattctcgcctgcgcagaagttgcttacgccttgtacaaacttgcagcccaagagaacaggcccgtcacggaccatctggacgagcaggcagtgcagggcctgaagcagattcaccagcagctctatgatcgtcagttatacaggggtctgggaggacagctcatgagacaagcagtgtgtgttttaatagaaaagttgtcactttccaaaatgccctttagaggtgacaccgtaattgatggttggcaatggctgataaatgacactttgagacatctccatctcatctcaagtcactcccgccagcagatgaagatgcagcagtctcgaccctgtgnagctacagaaatgcatnaagccacgtgagtgggcctgttctttctgtcaatcatctggcatagagtatccattttgtgtccatcataggcaagtgcaagccttatataatgttaccaacatagatcacacctcagnatcttgcttgatgtgagtgctcatttttccatcaaacctntccacctacttcctccctccctccctttttgctgtgattcagtccatatattgggcatctagcatattccaggtc

SEQ ID NO: 282895 - DNA, 2661 bp, Homo sapiens
gggccagcgtcggttgccgccttagcgggcgcctccttttcatccctcatccttcatccctggctttcgcgctctagcggagtgggatctgcgaacacgtgaggcgggggcgcggtccccaggctgccgagatggccctgagcgacgaaccggccgcgggcggccccgaggaggaggcggaggacgagacactggcctttggcgcggcgctggaagcgttcggcgagagcgcggagacccgggcgctgctgggccgcctgcgggaggtgcacggcggcggcgcggagcgcgaggtggccctggagcggttccgcgtaataatggacaaataccaggagcagcctcatctgttggacccgcaccttgaatggatgatgaacttgttgttggacatagtgcaagatcagacatctccagcttcccttgtacatctggcttttaaatttctttacatcatcaccaaggttcgaggctataaaacatttcttcgtttatttcctcatgaagttgccgatgtagagcctgttttagatttggtcacaattcagaatcccaaggaccatgaagcttgggaaacccgctacatgcttttgctctggctctccgtgacctgcctgatcccttttgatttttctcgccttgacgggaacctcctcacccagcctgggcaagcacgaatgtccataatggaccgtattctccaaatagcagagtcctacttgattgtcagtgacaaggcccgagatgcagctgctgtccttgtgtccagatttatcacacgtcctgatgtcaagcaaagcaagatggctgagttcctggactggagcctgtgcaatctggcccgttcctccttccagaccatgcagggggtcatcaccatggatgggacgctgcaggccctggcacaaatatttaaacatggaaaacgtgaagactgtttgccctatgctgccactgtcctcaggtgcctcgatggctgcagactccctgagagcaaccagaccctgctgcggaagctgggggtgaagcttgtgcagcgactggggctgacattcctgaagccgaaggtggcagcatggaggtaccagcgtggctgccgatctttggctgcaaatctgcagctcctcactcagggtcagagtgagcagaagccactcatcctgaccgaagatgacgacgaagatgacgacgtcccagagggggtggagcgtgtgatagagcagctgctggtcgggctgaaggacaaggacacggtcgtgcggtggtctgcagccaagggcatcggtaggatggctggcaggcttcccagagccctggcggatgatgtggtcgggtctgtgctggactgcttcagtttccaggagactgacaaggcgtggcatgggggatgtctggcgctggcagagctgggcaggagaggcctgttgctgccgtctcgactcgtggatgttgtcgccgtgatcctgaaggcgctgacctacgacgagaagcggggtgcctgcagcgtgggcaccaacgtcagggacgccgcctgctacgtgtgctgggccttcgcgcgtgcctatgagcctcaggagctgaagccctttgtgactgcaatctcgagtgcactggtgattgctgcggtgtttgaccgagacataaactgcagaagagcagcctctgccgccttccaggagaatgtggggagacagggcactttccctcatggtattgatattttgaccacagctgactattttgccgtcggtaacagatccaactgtttcctggttataagtgtgtttattgccggctttcctgagtacacgcagccaatgatagaccacctggttaccatgaagatcagccactgggatggggtcatccgagagttggctgcgagggcgctgcacaacctggcccagcaggcacccgagttcagcgccacgcaagtcttcccgaggctgctgtccatgacactgagtccagatcttcacatgaggcatgggtcgattctcgcctgcgcagaagttgcttacgccttgtacaaacttgcagcccaagagaacaggcccgtcacggaccatctggacgagcaggcagtgcagggcctgaagcagattcaccagcagctctatgatcgtcagttatacaggggtctgggaggacagctcatgagacaagcagtgtgtgttttaatagaaaagttgtcactttccaaaatgccctttagaggtgacaccgtaattgatggttggcaatggctgataaatgacactttgagacatctccatctcatctcaagtcactcccgccagcagatgaaggatgcagcagtctcggccctggctgctctatgcagtgaaagcaggagccccagacgaagctgtgtgcggagagaatgtttcccagatttactgtgcgctgctgggctgcatggacgactacaccacggacagcagaggggacgtgggcacctgggtccgcaaggccgccatgaccagtctgatggatctgacacttctgctggctcggagccagcctgagctgatcgaggcccatacgctggcactagctgacagcttttcctctctgcacctgcgctctggtgacttggggtggacgcctctgccttcacttgaacacaaatgtgcttcctataaaatcatgtaccaagaa

SEQ ID NO: 282896 - DNA, 1553 bp, Homo sapiens
  misc_feature (1453)..(1453): n is a, c, g, or t
  misc_feature (1455)..(1455): n is a, c, g, or t
  misc_feature (1458)..(1458): n is a, c, g, or t
  misc_feature (1475)..(1475): n is a, c, g, or t
  misc_feature (1477)..(1477): n is a, c, g, or t
  misc_feature (1483)..(1483): n is a, c, g, or t
gggccagcgtcggttgccgccttagcgggcgcctccttttcatccctcatccttcatccctggctttcgcgctctagcggagtgggatctgcgaacacgtgaggcgggggcgcggtccccaggctgccgagatggccctgagcgacgaaccggccgcgggcggccccgaggaggaggcggaggacgagacactggcctttggcgcggcgctggaagcgttcggcgagagcgcggagacccgggcgctgctgggccgcctgcgggaggtgcacggcggcggcgcggagcgcgaggtggccctggagcggttccgcgtaataatggacaaataccaggagcagcctcatctgttggacccgcaccttgaatggatgatgaacttgttgttggacatagtgcaagatcagacatctccagcttcccttgtacatctggcttttaaatttctttacatcatcaccaaggttcgaggctataaaacatttcttcgtttatttcctcatgaagttgccgatgtagagcctgttttagatttggtcacaattcagaatcccaaggaccatgaagcttgggaaacccgctacatgcttttgctctggctctccgtgacctgcctgatcccttttgatttttctcgccttgacgggaacctcctcacccagcctgggcaagcacgaatgtccataatggaccgtattctccaaatagcagagtcctacttgattgtcagtgacaaggcccgagatgcagctgctgtccttgtgtccagatttatcacacgtcctgatgtcaagcaaagcaagatggctgagttcctggactggagcctgtgcaatctggcccgttcctccttccagaccatgcagggggtcatcaccatggatgggacgctgcaggccctggcacaaatatttaaacatggaaaacgtgaagactgtttgccctatgctgccactgtcctcaggtgcctcgatggctgcagactccctgagagcaaccagaccctgctgcggaagctgggggtgaagcttgtgcagcgactggggctgacattcctgaagccgaaggtggcagcatggaggtaccagcgtggctgccgatctttggctgcaaatctgcagctcctcactcagggtcagagtgagcagaagccactcatcctgaccgaagatgacgacgaagatgacgacgtcccagagggggtggagcgtgtgatagagcagctgctggtcgggctgaaggacaaggacacggtcgtgcggtggtctgcagccaagggcatcggtaggatggctggcaggcttcccagagccctggcggatgatgtggtcgggtctgtgctggactgcttcagtttccaggagactgacaaggcgtggcatgggggatgtctggcgctggcagagctgggcaggagaggcctgttgctgccgtctcgactcgtggatgttgncnccngatcctgaagggctgancnagacanaagcgggcgccgcaacagggaccacttgacacccgccagaacagtgtgggcccgcgtccaagcccgaaca

SEQ ID NO: 282897 - DNA, 556 bp, Homo sapiens
aatgcacagcttctccgcggtcagcgggctggtctctttgagtttggaggccaggaacatgcagacagcacccaggagttgcagatgggacttcggagtcgggaccccagccaagaaacggtccagaagaatctaccataaaaccaacagactcctcctgatctctacctgtgctgtctgcctctctagttccggacactgagagctggtgccctgtggccacctcaagctggaaccctgcaagatcaccaagaagactgcatgcctcgctctagccttcctaagggaaagtagactcctgtttttgagagaaattacctgatttcaagagaaacataaaggactttttttcccttaacattccactcgtaaaaatgaagtttggaagaacttctgcaaactctgagtgttttggtcaattgaccttttactgtactaagcaaatctgaagccacaaatacattggggaggaaggtatacccttcacaaaagatccgtcacttagccagatactctgttgccatgcttctttaaataaagcacatttctggtatat

SEQ ID NO: 282898 - DNA, 6470 bp, Homo sapiens
gcagctgccgactggggatgacggcgggcaggaggagaccgcagccgaagggacacagacacgccgcttcaccagctcgcctcaggctgcccccctgcatttttgttttaatttttacggctttttcccctctctttcttcccttcctcctggtcccagcagagccaaggaaacccacaaaataagaaaggaagtgggccccggagcttggaacctccacagccggcttgtccagcgcagcgcgggggcgggaggctgcgcgcaccagttgccagcccggtgcgcggtacctttccttacttttcttgaaacagcgatcgtgcctgcatttggtggttttttggtttttgtttttttccttttcccgtatttgctgaatctccactatccgactttttttttttaatcttttctttccccccccccccaccccacctctttctggagcacgaatccaaacattttcccaagcaacaaagaaaagttcgcacgctggcaccgcagcccggacaggctggcgctgctgccgggcccccctccctccgacacttgactcaatcctgcaagcaagtgtgtgtgtgtccccatcccccgccccgttaacttcatagcaaataacaaatacccataaagtcccagtcgcgcagcccctccccgcgggcagcgcactatgctgctcgggtgggcgtccctgctgctgtgcgcgttccgcctgcccctggccgcggtcggccccgccgcgacacctgcccaggataaagccgggcagcctccgactgctgcagcagccgcccagccccgccggcggcagggggaggaggtgcaggagcgagccgagcctcccggccacccgcaccccctggcgcagcggcgcaggagcaaggggctggtgcagaacatcgaccaactctactccggcggcggcaaggtgggctacctcgtctacgcgggcggccggaggttcctcttggacctggagcgagatggttcggtgggcattgctggcttcgtgcccgcaggaggcgggacgagtgcgccctggcgccaccggagccactgcttctatcggggcacagtggacgctagtccccgctctctggctgtctttgacctctgtgggggtctcgacggcttcttcgcggtcaagcacgcgcgctacaccctaaagccactgctgcgcggaccctgggcggaggaagaaaaggggcgcgtgtacggggatgggtccgcacggatcctgcacgtctacacccgcgagggcttcagcttcgaggccctgccgccgcgcgccagctgcgaaacccccgcgtccacaccggaggcccacgagcatgctccggcgcacagcaacccgagcggacgcgcagcactggcctcgcagctcttggaccagtccgctctctcgcccgctgggggctcaggaccgcagacgtggtggcggcggcggcgccgctccatctcccgggcccgccaggtggagctgcttctggtggctgacgcgtccatggcgcggttgtatggccggggcctgcagcattacctgctgaccctggcctccatcgccaataggctgtacagccatgctagcatcgagaaccacatccgcctggccgtggtgaaggtggtggtgctaggcgacaaggacaagagcctggaagtgagcaagaacgctgccaccacactcaagaacttttgcaagtggcagcaccaacacaaccagctgggagatgaccatgaggagcactacgatgcagctatcctgtttactcgggaggatttatgtgggcatcattcatgtgacaccctgggaatggcagacgttgggaccatatgttctccagagcgcagctgtgctgtgattgaagacgatggcctccacgcagccttcactgtggctcacgaaatcggacatttacttggcctctcccatgacgattccaaattctgtgaagagacctttggttccacagaagataagcgcttaatgtcttccatccttaccagcattgatgcatctaagccctggtccaaatgcacttcagccaccatcacagaattcctggatgatggccatggtaactgtttgctggacctaccacgaaagcagatcctgggccccgaagaactcccaggacagacctacgatgccacccagcagtgcaacctgacattcgggcctgagtactccgtgtgtcccggcatggatgtctgtgctcgcctgtggtgtgctgtggtacgccagggccagatggtctgtctgaccaagaagctgcctgcggtggaagggacgccttgtggaaaggggagaatctgcctgcagggcaaatgtgtggacaaaaccaagaaaaaatattattcaacgtcaagccatggcaactggggatcttggggatcctggggccagtgttctcgctcatgtggaggaggagtgcagtttgcctatcgtcactgtaataaccctgctcccagaaacaacggacgctactgcacagggaagagggccatctaccactcctgcagtctcatgccctgcccacccaatggtaaatcatttcgtcatgaacagtgtgaggccaaaaatggctatcagtctgatgcaaaaggagtcaaaacttttgtggaatgggttcccaaatatgcaggtgtcctgccagcggatgtgtgcaagctgacctgcagagccaagggcactggctactatgtggtattttctccaaaggtgaccgatggcactgaatgtaggccgtacagtaattccgtctgcgtccgggggaagtgtgtgagaactggctgtgacggcatcattggctcaaagctgcagtatgacaagtgcggagtatgtggaggagacaactccagctgtacaaagattgttggaacctttaataagaaaagtaagggttacactgacgtggtgaggattcctgaaggggcaacccacataaaagttcgacagttcaaagccaaagaccagactagattcactgcctatttagccctgaaaaagaaaaacggtgagtaccttatcaatggaaagtacatgatctccacttcagagactatcattgacatcaatggaacagtcatgaactatagcggttggagccacagggatgacttcctgcatggcatgggctactctgccacgaaggaaattctaatagtgcagattcttgcaacagaccccactaaaccattagatgtccgttatagcttttttgttcccaagaagtccactccaaaagtaaactctgtcactagtcatggcagcaataaagtgggatcacacacttcgcagccgcagtgggtcacgggcccatggctcgcctgctctaggacctgtgacacaggttggcacaccagaacggtgcagtgccaggatggaaaccggaagttagcaaaaggatgtcctctctcccaaaggccttctgcgtttaagcaatgcttgttgaagaaatgttagcctgtggttatgatcttatgcacaaagataactggaggattcagcaccgatgcagtcgtggtgaacaggaggtctacctaacgcacagaaagtcatgcttcagtgacattgtcaacaggagtccaattatgggcagaatctgctctctgtgaccaaaagaggatgtgcactgcttcacgtgacagtggtgaccttgcaatatagaaaaacttgggagttattgaacatcccctgggcttacaagaaacactgatgaatgtaaaatcaggggacatttgaagatggcagaactgtctcccccttgtcacctacctctgatagaatgtctttaatggtatcataatcattttcacccataatacacagtagcttcttcttactgtttgtaaatacattctcccttggtatgtcactttatatcccctggttctattaaaatatccatatatatttctataaaaaaagtgtttgaccaaagtaggtctgcagctatttcaacttccttccgtttccagaaagagctgtggatattttactggaaattaagaacttgctgctgttttaataagatgtagtatattttctgactacaggagataaaatttcagtcaaaaaaccattttgacagcaagtatcttctgagaaattttgaaaagtaaatagatctcagtgtatctagtcacttaaatacatacacgggttcatttacttaaaacctttgactgcctgtatttttttcaggtagctagccaaattaatgcataatttcagatgtagaagtagggtttgcgtgtgtgtgtgtgatcatactcaagagtctaaaaactagtttccttgtgttggaaatttaaaaggaaaaaaatcgtatttcactgtgttttcaatttatattttcacaactactttctctctccagagctttcatctgatatctcacaatgtatgatatacgtacaaaacacacagcaagttttctatcatgtccaacacattcaacactggtatacctcctaccagcaagcctttaaaatgcgtttgtgtttgcttatttgttttgttcaagggttcagtaagacctacaatgttttgtatttcttgacttattttattagaaacattaaagatcacttggtagttagccacattgagaagtggttatcattgttaatgtggttaatgccaaaaagtggttaatattaataagactgtttccacaccataggcaataatttcttaatttaaaaaatctaagtatattcctattgtactaaatatttttcccaactggaaagcacttgattgtacccgtaagtgtttgagtgatgacatgtgatgattttcagaaagttgttgtttttgtttccatagcctgtttaagtaggttgtaagtttgaatagttagacatggaaattattttataagcacacacctaaagatatctttttagatgataaaatgtacacccccccatcaccaacctcacaacttagaaaatctaagttgtttgatttcattgggatttcttttgttgtgaaacactgcaaagccaatttttctttataaaaattcatagtaatcctgccaaatgtgcctattgttaaagatttgcatgtgaagatcttagggaaccactgtttgagttctacaagctcatgagagtttatttttattataagatgtttttaatataaaagaattatgtaactgatcactatattacatcatttcagtgggccaggaaaatagatgtcttgctgttttcagtattttcttaagaaattgcttttaaaacaaataattgttttacaaaaccaataattatcctttgaattttcatagactgactttgctttcgacgtagaaatttttttttcttaataaattatcactttgagaaatgaggcctgtacaaggctgataacctatatgtgatggagatcacccaatgccaagggcagaaagcaaacctagttaaataggtgagaaaaaaaataataatcccagtgccatttgtctgtgcaaagagaattaggagagaggttaatgttacttttttccattttggaaataattttaatcaagtaactcaaatgtgacaaaatttatttttattttttgtggttatattcccaacaacattaaaaaatactcgaggcataaatgtagttgtctcctactctgcttctcttactatactcatacatttttaatatggtttatcaatgattcatgtttccctcaaatagtgatggtttacacctgtcatggaaacaatcctagagagctcagagcaattaaaccactattccatgcttttaagtagttttctccacctttttcttatgagtctcactagattgactgaggaatgtatgtctaaattcctggagaagatgatatggattggaaactgaaattcagagaaatggagtgttcaatagataccacgaattgtgaacaaagggaaaattctatacaactcaatctaagtcagtccactttgacttcgtactgtctttcacctttccattgttgcatcttgaattttttaaaatgtctagaattcaggatgctaggggctacttctttaaaaaaaaaaaaaaaaaagaattcgtctgaaaatgctcaggtttgtaagaatctaatctcacttacataactaagcactccataataagttttattaagtacaaagggagccagaaaaaatgacatttatttcttctagatcagaaaaatttaaattaagccctgccttgctgtttagaaatatgtgggcattgttataatttattcaataaatttatgttcctttgccttcctgtggaaacagttttatcccactaaactaggaattaggggataaatcacaaacaaaaaaaaagttgcagcactgaaaaaaagtaatttattgtttttgcaactggtatgtgaatttgtgtgataaaattatttattcttatttaacaaaaatatgttcaaatttttctatatttaaaatgtttt

SEQ ID NO: 282899 - DNA, 3203 bp, Homo sapiens
gcagctgccgactggggatgacggcgggcaggaggagaccgcagccgaagggacacagacacgccgcttcaccagctcgcctcaggctgcccccctgcatttttgttttaatttttacggctttttcccctctctttcttcccttcctcctggtcccagcagagccaaggaaacccacaaaataagaaaggaagtgggccccggagcttggaacctccacagccggcttgtccagcgcagcgcgggggcgggaggctgcgcgcaccagttgccagcccggtgcgcggtacctttccttacttttcttgaaacagcgatcgtgcctgcatttggtggttttttggtttttgtttttttccttttcccgtatttgctgaatctccactatccgactttttttttttaatcttttctttccccccccccccaccccacctctttctggagcacgaatccaaacattttcccaagcaacaaagaaaagttcgcacgctggcaccgcagcccggacaggctggcgctgctgccgggcccccctccctccgacacttgactcaatcctgcaagcaagtgtgtgtgtgtccccatcccccgccccgttaacttcatagcaaataacaaatacccataaagtcccagtcgcgcagcccctccccgcgggcagcgcactatgctgctcgggtgggcgtccctgctgctgtgcgcgttccgcctgcccctggccgcggtcggccccgccgcgacacctgcccaggataaagccgggcagcctccgactgctgcagcagccgcccagccccgccggcggcagggggaggaggtgcaggagcgagccgagcctcccggccacccgcaccccctggcgcagcggcgcaggagcaaggggctggtgcagaacatcgaccaactctactccggcggcggcaaggtgggctacctcgtctacgcgggcggccggaggttcctcttggacctggagcgagatggttcggtgggcattgctggcttcgtgcccgcaggaggcgggacgagtgcgccctggcgccaccggagccactgcttctatcggggcacagtggacgctagtccccgctctctggctgtctttgacctctgtgggggtctcgacggcttcttcgcggtcaagcacgcgcgctacaccctaaagccactgctgcgcggaccctgggcggaggaagaaaaggggcgcgtgtacggggatgggtccgcacggatcctgcacgtctacacccgcgagggcttcagcttcgaggccctgccgccgcgcgccagctgcgaaacccccgcgtccacaccggaggcccacgagcatgctccggcgcacagcaacccgagcggacgcgcagcactggcctcgcagctcttggaccagtccgctctctcgcccgctgggggctcaggaccgcagacgtggtggcggcggcggcgccgctccatctcccgggcccgccaggtggagctgcttctggtggctgacgcgtccatggcgcggttgtatggccggggcctgcagcattacctgctgaccctggcctccatcgccaataggctgtacagccatgctagcatcgagaaccacatccgcctggccgtggtgaaggtggtggtgctaggcgacaaggacaagagcctggaagtgagcaagaacgctgccaccacactcaagaacttttgcaagtggcagcaccaacacaaccagctgggagatgaccatgaggagcactacgatgcagctatcctgtttactcgggaggatttatgtgggcatcattcatgtgacaccctgggaatggcagacgttgggaccatatgttctccagagcgcagctgtgctgtgattgaagacgatggcctccacgcagccttcactgtggctcacgaaatcggacatttacttggcctctcccatgacgattccaaattctgtgaagagacctttggttccacagaagataagcgcttaatgtcttccatccttaccagcattgatgcatctaagccctggtccaaatgcacttcagccaccatcacagaattcctggatgatggccatggtaactgtttgctggacctaccacgaaagcagatcctgggccccgaagaactcccaggacagacctacgatgccacccagcagtgcaacctgacattcgggcctgagtactccgtgtgtcccggcatggatgtctgtgctcgcctgtggtgtgctgtggtacgccagggccagatggtctgtctgaccaagaagctgcctgcggtggaagggacgccttgtggaaaggggagaatctgcctgcagggcaaatgtgtggacaaaaccaagaaaaaatattattcaacgtcaagccatggcaactggggatcttggggatcctggggccagtgttctcgctcatgtggaggaggagtgcagtttgcctatcgtcactgtaataaccctgctcccagaaacaacggacgctactgcacagggaagagggccatctaccactcctgcagtctcatgccctgcccacccaatggtaaatcatttcgtcatgaacagtgtgaggccaaaaatggctatcagtctgatgcaaaaggagtcaaaacttttgtggaatgggttcccaaatatgcaggtgtcctgccagcggatgtgtgcaagctgacctgcagagccaagggcactggctactatgtggtattttctccaaaggtgaccgatggcactgaatgtaggccgtacagtaattccgtctgcgtccgggggaagtgtgtgagaactggctgtgacggcatcattggctcaaagctgcagtatgacaagtgcggagtatgtggaggagacaactccagctgtacaaagattgttggaacctttaataagaaaagtaagggttacactgacgtggtgaggattcctgaaggggcaacccacataaaagttcgacagttcaaagccaaagaccagactagattcactgcctatttagccctgaaaaagaaaaacgaagttggagcagcagaagctgggaaccagagcttcattcttggaacattggcacatgctgtgtgtttcctgagacccaaataacctcagataaggaaactaatactaagtgagagaagatgtttgctgacagatgttcttgccctaagtcagtggcttctgaaacttggctgcattaaagtcacctgtg

SEQ ID NO: 282900 - DNA, 3959 bp, Homo sapiens
  misc_feature (3917)..(3917): n is a, c, g, or t
  misc_feature (3941)..(3941): n is a, c, g, or t
gcagctgccgactggggatgacggcgggcaggaggagaccgcagccgaagggacacagacacgccgcttcaccagctcgcctcaggctgcccccctgcatttttgttttaatttttacggctttttcccctctctttcttcccttcctcctggtcccagcagagccaaggaaacccacaaaataagaaaggaagtgggccccggagcttggaacctccacagccggcttgtccagcgcagcgcgggggcgggaggctgcgcgcaccagttgccagcccggtgcgcggtacctttccttacttttcttgaaacagcgatcgtgcctgcatttggtggttttttggtttttgtttttttccttttcccgtatttgctgaatctccactatccgactttttttttttaatcttttctttccccccccccccaccccacctctttctggagcacgaatccaaacattttcccaagcaacaaagaaaagttcgcacgctggcaccgcagcccggacaggctggcgctgctgccgggcccccctccctccgacacttgactcaatcctgcaagcaagtgtgtgtgtgtccccatcccccgccccgttaacttcatagcaaataacaaatacccataaagtcccagtcgcgcagcccctccccgcgggcagcgcactatgctgctcgggtgggcgtccctgctgctgtgcgcgttccgcctgcccctggccgcggtcggccccgccgcgacacctgcccaggataaagccgggcagcctccgactgctgcagcagccgcccagccccgccggcggcagggggaggaggtgcaggagcgagccgagcctcccggccacccgcaccccctggcgcagcggcgcaggagcaaggggctggtgcagaacatcgaccaactctactccggcggcggcaaggtgggctacctcgtctacgcgggcggccggaggttcctcttggacctggagcgagatggttcggtgggcattgctggcttcgtgcccgcaggaggcgggacgagtgcgccctggcgccaccggagccactgcttctatcggggcacagtggacgctagtccccgctctctggctgtctttgacctctgtgggggtctcgacggcttcttcgcggtcaagcacgcgcgctacaccctaaagccactgctgcgcggaccctgggcggaggaagaaaaggggcgcgtgtacggggatgggtccgcacggatcctgcacgtctacacccgcgagggcttcagcttcgaggccctgccgccgcgcgccagctgcgaaacccccgcgtccacaccggaggcccacgagcatgctccggcgcacagcaacccgagcggacgcgcagcactggcctcgcagctcttggaccagtccgctctctcgcccgctgggggctcaggaccgcagacgtggtggcggcggcggcgccgctccatctcccgggcccgccaggtggagctgcttctggtggctgacgcgtccatggcgcggttgtatggccggggcctgcagcattacctgctgaccctggcctccatcgccaataggctgtacagccatgctagcatcgagaaccacatccgcctggccgtggtgaaggtggtggtgctaggcgacaaggacaagagcctggaagtgagcaagaacgctgccaccacactcaagaacttttgcaagtggcagcaccaacacaaccagctgggagatgaccatgaggagcactacgatgcagctatcctgtttactcgggaggatttatgtgggcatcattcatgtgacaccctgggaatggcagacgttgggaccatatgttctccagagcgcagctgtgctgtgattgaagacgatggcctccacgcagccttcactgtggctcacgaaatcggacatttacttggcctctcccatgacgattccaaattctgtgaagagacctttggttccacagaagataagcgcttaatgtcttccatccttaccagcattgatgcatctaagccctggtccaaatgcacttcagccaccatcacagaattcctggatgatggccatggtaactgtttgctggacctaccacgaaagcagatcctgggccccgaagaactcccaggacagacctacgatgccacccagcagtgcaacctgacattcgggcctgagtactccgtgtgtcccggcatggatgtctgtgctcgcctgtggtgtgctgtggtacgccagggccagatggtctgtctgaccaagaagctgcctgcggtggaagggacgccttgtggaaaggggagaatctgcctgcagggcaaatgtgtggacaaaaccaagaaaaaatattattcaacgtcaagccatggcaactggggatcttggggatcctggggccagtgttctcgctcatgtggaggaggagtgcagtttgcctatcgtcactgtaataaccctgctcccagaaacaacggacgctactgcacagggaagagggccatctaccactcctgcagtctcatgccctgcccacccaatggtaaatcatttcgtcatgaacagtgtgaggccaaaaatggctatcagtctgatgcaaaaggagtcaaaacttttgtggaatgggttcccaaatatgcaggtgtcctgccagcggatgtgtgcaagctgacctgcagagccaagggcactggctactatgtggtattttctccaaaggtgaccgatggcactgaatgtaggccgtacagtaattccgtctgcgtccgggggaagtgtgtgagaactggctgtgacggcatcattggctcaaagctgcagtatgacaagtgcggagtatgtggaggagacaactccagctgtacaaagattgttggaacctttaataagaaaagtaagggttacactgacgtggtgaggattcctgaaggggcaacccacataaaagttcgacagttcaaagccaaagaccagactagattcactgcctatttagccctgaaaaagaaaaacggtgagtaccttatcaatggaaagtacatgatctccacttcagagactatcattgacatcaatggaacagtcatgaactatagcggttggagccacagggatgacttcctgcatggcatgggctactctgccacgaaggaaattctaatagtgcagattcttgcaacagaccccactaaaccattagatgtccgttatagcttttttgttcccaagaagtccactccaaaagtaaactctgtcactagtcatggcagcaataaagtgggatcacacacttcgcagccgcagtgggtcacgggcccatggctcgcctgctctaggacctgtgacacaggttggcacaccagaacggtgcagtgccaggatggaaaccggaagttagcaaaaggatgtcctctctcccaaaggccttctgcgtttaagcaatgcttgttgaagaaatgttagcctgtggttatgatcttatgcacaaagataactggaggattcagcaccgatgcagtcgtggtgaacaggaggtctacctaacgcacagaaagtcatgcttcagtgacattgtcaacaggagtccaattatgggcagaatctgctctctgtgaccaaaagaggatgtgcactgcttcacgtgacagtggtgaccttgcaatatagaaaaacttgggagttattgaacatcccctgggcttacaagaaacactgatgaatgtaaaatcaggggacatttgaagatggcagaactgtctcccccttgtcacctacctctgatagaatgtctttaatggtatcataatcattttcacccataatacacagtagcttcttcttactgtttgtaaatacattctcccttgtctgtcctcccccacttcttgaataaaataatttaaagagaaaaaaaaanaaaaaaagtgcggcgaagcttatncccttagtggggtaattt

SEQ ID NO: 282901 - DNA, 1850 bp, Homo sapiens
ggcaattagcccaggacccacagccctggcgctccgcacgcacctcggtaacatcacagcaggtccaggccaatgataaccttataagaggccatgtcgaagcgcgacatcgtcctcaccaatgtcaccgttgtccagttgctgcgacagccgtgcccggtgaccagagcaccgcccccacctgagcctaaggctgaagtagagccccagccacaaccagagcccacaccagtcagggaggaaataaagccaccaccgccaccactgcctcctcaccccgctactcctcctcctaagatggtgtctgtggcccgggagctgactgtgggcatcaatggatttggacgcatcggtcgcctggtcctgcgcgcctgcatggagaagggtgttaaggtggtggctgtgaatgatccattcattgacccggaatacatggtgtacatgtttaagtatgactccacccacggccgatacaagggaagtgtggaattcaggaatggacaactggtcgtggacaaccatgagatctctgtctaccagtgcaaagagcccaaacagatcccctggagggctgtcgggagcccctacgtggtggagtccacaggcgtgtacctctccatacaggcagcttcggaccacatctctgcaggtgctcaacgtgtggtcatctccgcgccctcaccggatgcaccaatgttcgtcatgggtgtcaatgaaaatgactataaccctggctccatgaacattgtgagcaacgcgtcctgcaccaccaactgtttggctcccctcgccaaagtcatccacgagcgatttgggatcgtggaagggttgatgaccacagtccattcctacacggccacccagaagacagtggacgggccatcaaggaaggcctggcgagatgggcggggtgcccaccagaacatcatcccagcctccactggggctgcgaaagctgtgaccaaagtcatcccagagctcaaagggaagctgacagggatggcgttccgggtaccaaccccggatgtgtctgtcgtggacctgacctgccgcctcgcccagcctgccccctactcagccatcaaggaggctgtaaaagcagcagccaaggggcccatggctggcatccttgcctacaccgaggatgaggtcgtctctacggacttcctcggtgatacccactcgtccatcttcgatgctaaggccggcattgcgctcaatgacaatttcgtgaagctcatttcatggtacgacaacgaatatggctacagtcaccgggtggtcgacctcctccgctacatgttcagccgagacaagtgaaacgggaaggtcctttctttccttcccaggggccggggccggaacatgtgcctcccgttccagcatctggctgcccgggggaggaaggacacccggggcgggcgccccacgccgatgggtccatggtgaaataaaaaacagtgctcacgaaaaaaaaaaaaaaaaaaaaaaaaaaaaaaaaaaaaaaaaaaaaaaaaaaaaaaaaaaaaaaaaaaaaaaaaaaaaaaaaaaaaaaaaaaaaaaaaaaaaaaaaagaggggggggcgggcccggcagaacgaacaatcgccacggggggggcccgaacattaccgcgcccgcacggcctgtttgtatgaacgacgaggagaggggccacccaagagaggagtgggtgttatattaaaatggaacgagccaggccggccgccggatataaaacacgagggggagagtgggggagaaaaacgacgcctgctcggtggcttatggacggaagagcagcccacctacggcggggggggcacaaaagaggtggaggcccgctggta

SEQ ID NO: 282902 - DNA, 1720 bp, Homo sapiens
gcaacccattccctcccttcccccgcatagtgaccagagcaccgcccccacctgagcctaaggctgaagtagagccccagccacaaccagagcccacaccagtcagggaggaaataaagccaccaccgccaccactgcctcctcaccccgctactcctcctcctaagatggtgtctgtggcccgggagctgactgtgggcatcaatggatttggacgcatcggtcgcctggtcctgcgcgcctgcatggagaagggtgttaaggtggtggctgtgaatgatccattcattgacccggaatacatggtgtacatgtttaagtatgactccacccacggccgatacaagggaagtgtggaattcaggaatggacaactggtcgtggacaaccatgagatctctgtctaccagtgcaaagagcccaaacagatcccctggagggctgtcgggagcccctacgtggtggagtccacaggcgtgtacctctccatacaggcagcttcggaccacatctctgcaggtgctcaacgtgtggtcatctccgcgccctcaccggatgcaccaatgttcgtcatgggtgtcaatgaaaatgactataaccctggctccatgaacattgtgagcaacgcgtcctgcaccaccaactgtttggctcccctcgccaaagtcatccacgagcgatttgggatcgtggaagggttgatgaccacagtccattcctacacggccacccagaagacagtggacgggccatcaaggaaggcctggcgagatgggcggggtgcccaccagaacatcatcccagcctccactggggctgcgaaagctgtgaccaaagtcatcccagagctcaaagggaagctgacagggatggcgttccgggtaccaaccccggatgtgtctgtcgtggacctgacctgccgcctcgcccagcctgccccctactcagccatcaaggaggctgtaaaagcagcagccaaggggcccatggctggcatccttgcctacaccgaggatgaggtcgtctctacggacttcctcggtgatacccactcgtccatcttcgatgctaaggccggcattgcgctcaatgacaatttcgtgaagctcatttcatggtacgacaacgaatatggctacagtcaccgggtggtcgacctcctccgctacatgttcagccgagacaagtgaaacgggaaggtcctttctttccttcccaggggccggggccggaacatgtgcctcccgttccagcatctggctgcccgggggaggaaggacacccggggcgggcgccccacgccgatgggtccatggtgaaataaaaaacagtgctcacgaaaaaaaaaaaaaaaaaaaaaaaaaaaaaaaaaaaaaaaaaaaaaaaaaaaaaaaaaaaaaaaaaaaaaaaaaaaaaaaaaaaaaaaaaaaaaaaaaaaaaaaaagaggggggggcgggcccggcagaacgaacaatcgccacggggggggcccgaacattaccgcgcccgcacggcctgtttgtatgaacgacgaggagaggggccacccaagagaggagtgggtgttatattaaaatggaacgagccaggccggccgccggatataaaacacgagggggagagtgggggagaaaaacgacgcctgctcggtggcttatggacggaagagcagcccacctacggcggggggggcacaaaagaggtggaggcccgctggta

SEQ ID NO: 282903 - DNA, 842 bp, Homo sapiens
gggctgccttttcacttttgtggctccaacctggcatacagcaggtgactaatacatgcttagtgaacaaaagacaacagctcccatttttttcaatacttgctcagggccaggccatggccagatgccttctctgtgaggagtggatgccatggtcatggtggacccctgtacatccaccttggtgctgtctccctgcattaactcctgcaggtccactttcccacagtcactgggatcttttgttttaatggaatcacattgcatcacccgttttcaggattgaaaacactcctgtggcctttcatgacactagggctaaaaccctcaggtcctcccttcctgcagctccttctacctcagacactgtgctgagggccccagccggtcagatctttctagtcatctagacccaggctcatggccacccctcagagaggccctccatgctggcccattccaaacgcttgcattattcctaggaaagggatgtactggtacagcatgagggtgtttgtgacctgtgccctttggccagaccctgacacagtgccttggtcataccctgcacttggtcataccctccagtccagagactggacacagtagggctacatcaaatattatagatgaatgcatggatgggcgatagagttaagagtcggggcctcagctcctggaggtccttgctctgccggacacacttatctttgaaattctgacttccaggtcgtctctacggacttcctcggtgatacccactcgtccatcttcgatgctaaggccggcattgcgctcaatgacaatttcgtgaagctcatttcatggtaagggggaaggag

SEQ ID NO: 282904 - DNA, 492 bp, Homo sapiens
acccctcagagaggccctccatgctggcccattccaaacgcttgcattattcctaggaaagggatgtactggtacagcatgagggtgtttgtgacctgtgccctttggccagaccctgacacagtgccttggtcataccctgcacttggtcataccctccagtccagagactggacacagtagggctacatcaaatattatagatgaatgcatggatgggcgatagagttaagagtcggggcctcagctcctggaggtccttgctctgccggacacacttatctttgaaattctgacttccaggtcgtctctacggacttcctcggtgatacccactcgtccatcttcgatgctaaggccggcattgcgctcaatgacaatttcgtgaagctcatttcatggtaagggggaaggagctggagacttagagggaggggaactaaggggtggtcggaaggaacccccttgaacctcccgacccctcctccacag

SEQ ID NO: 282905 - DNA, 399 bp, Homo sapiens
tacagtcaccgggtggtcgacctcctccgctacatgttcagccgagacaagtgaaacgggaaggtcctttctttccttcccaggggccggggccggaacatgtgcctcccgttccagcatctggctgcccgggggaggaaggacacccggggcgggcgccccacgccgatgggtccatggtgaaataaaaaacagtgctcacggctgcgtcccgtatctctgcgccggtcagggcgggttctgatccgggtttgaggcccgccccacccttactcgatcgcctgcgcccacgggcgaggggtcgcgctcgactccaagccgggttccacttcaggagaccgggaccgcgatggcagcggtagaggccccgcatggccggaagtcactccccaaagcgct

SEQ ID NO: 282906 - DNA, 447 bp, Homo sapiens
aggtgggccggtacctgctcagcctgtcaaatggtgaaagccatggactatgaaggtggggctcaagcaggggagactgactcagccctgccacttccccacagcaaagagcccaaacagatcccctggagggctgtcgggagcccctacgtggtggagtccacaggcgtgtacctctccatacaggcagcttcggtaagctggggagaggtgcccagggctagctggggggatgatggtgccagaagcccctgacacctgcgcttcctccccaggaccacatctctgcaggtgctcaacgtgtggtcatctccgcgccctcaccggatgcaccaatgttcgtcatgggtgtcaatgaaaatgactataaccctggctccatgaacattgtgaggtaatgtgggcagtgacatcctgcaatgtgtggaagggagggtagactcgtcc

SEQ ID NO: 282907 - DNA, 448 bp, Homo sapiens
gcaacctagtgagcctggaggaggacctgaaggaaggggcttcccgggcccagaccatgggcaactccctactgaaggagcgagccatatatgtcctcgttcggatcatcagtaagagggagaggacatggcctccacccgctatgagtccctattggagaacctggatgaccattacccagagctggcagaggaactgcgcaggctgtcaggcctctcctctgtgggccacaactggaggaagcgtatgggcactcgcgaggccgccatgagcaaagccccacttcaaggcccagaaagggccctgattaaggggatggattgcacactgtagtgagacatccatcctgaccccacctcatcagccagggagctccctgaagacaggccatcgagagaggcacacaacaggctgtggtctaaaataaacttttaattgcaaaaatgt

SEQ ID NO: 282908 - DNA, 2572 bp, Homo sapiens
  misc_feature (362)..(362): n is a, c, g, or t
  misc_feature (2555)..(2555): n is a, c, g, or t
  misc_feature (2557)..(2558): n is a, c, g, or t
  misc_feature (2565)..(2567): n is a, c, g, or t
  misc_feature (2569)..(2572): n is a, c, g, or t
cctctttcgaaccctgtaggattttacttcttgacgcatctgtttatttaaaccaaaggggtatgttgaggcatgggcaccctggcagcagaccccaaaccaaccctcttgacttgtgcctgccttcaggatatgttccttcctgaattgtctaagaaggctgagttggggggtggttgctgatttttataacatatagcagttgttcataggcctgtgttttaaagaagggcaagcctgaactaccgtcctgcctaggcctggctccatacctgggagtagacagtcttctactttctaaaaactgacttaaatttgataaatctcctgttgagtgacagtgtttcgcagctgagcccttnaggagattctcagttgggcagagacatcccttcctcagacgccttgtgggctggactcctttggcccagttcaaagtgaggggagggctccaacaggccgggaagacagttgacttcaccctccttgggtttgtctgtctgtccgtctctgggaatggtcgcttcctgttttcccttttccttttaagcctcgccttgttccctcttctctctcttcatgaactactccgagtcttggtctccgtccctctatctctggctcctgcatctgtctcggcttctggccttcctctccccctcccctcccctccctcgcgctgtcattcaccccgctcctctccgcgcacagccaatggagagacccagtcgaaaccgcgaagctctcttgcaccgggctttttcgcctggtgattgatgtcccagagtcaacagcgagcgagcagccggagcggggaagcagaagccagagaggggaagaatacggcgccccctctctccctcccctcccccttctactttagcctttctgcgcacttcgcttccaagtctccgcgcagccaggagccgctgttgcctcccagcccctgctagctgccccccgagccgagcgcagcgagcgccgccgcccgggccccccggtggggccagggccagcatggagcacctgggtccgcaccacctccacccgggtcacgcagagcccattagcttcggcatcgaccagatcctcaacagcccggaccagggtggctgcatgggacccgcctcgcgcctccaggacggagaatacggccttggctgcttggtcggaggcgcctacacttacggcggcgggggctccgcggccgcgacgggggctggaggagcgggggcctatggtactggaggtcccggcggccccggaggcccggcaggcggcggcggcgcctgcagcatgggtcctctgaccggctcctacaacgtgaacatggccttggcaggcggccccggtcctggcggcggcggcggcagcagcggcggtgccggggcactcagcgctgcgggggtaatccgggtgccggcacacaggccgctcgccggagccgtggcccacccccagcccctggccaccggcttgcccaccgtgccctctgtgcctgccatgccgggcgtcaacaacctcactggcctcaccttcccctggatggagagtaaccgcagatacacaaaggacaggttcacaggtcacccctatcagaaccggacgccccccaagaagaagaaccgtggtctgacgactcgaccaaaatcactagcgtcacgtcggtggcgtcggcctgcgagtgagcctgcccattctgccctgtgggaccccaggcccactcaggggtcactgaggcctgagacccaggactcctccccaccctcctggcctcagactgcacccaggaggggaacactgccctcgcacggccccgaagggcccccacatttgtgccgacactgttctcccttcggtggaagagctcaagggacaaggacacgcgcccccctcccagaggcgtcccgcacctgtctgaactgttaagaaatctgtttttgtttatttcattttattttaatttttaacgtgggattcagagaaaggcaagggaggtaagggaggaggagcttctggggtccccagggctgtcatctgaatttgccctgggaaaccccttctctgtgacccacttctcatcacacacatggaaacccataggcccacacacaggtggtgtcactgtccctcctggtgtcaccccagagccacacatgggcatctatgggagagtgtcaaccagacagagggtcacagtgtttacactttggaccttacgatcaggcacaggtcaggggtgacacagactcatcctgaacagcatggcactccctccagcacaaacacaaggtcatggccacactgtgacacactacaccacacacaacagccaacagctacaacagcctcacttggtctgccaggcccccaccacacatcccagcccaatccaggtacgcacagacaggttttcacataaatgcagcccatttctccagaacccatttgaggggtgggggggtgttaatttatgcacttataaggtgttttctgtgtaaccattttataaagtgcttgtgtaatttatgtgaaaaaaataaataaaagcctcngnntccggannnannnn

SEQ ID NO: 282909 - DNA, 2894 bp, Homo sapiens
  misc_feature (362)..(362): n is a, c, g, or t
  misc_feature (2877)..(2877): n is a, c, g, or t
  misc_feature (2879)..(2880): n is a, c, g, or t
  misc_feature (2887)..(2889): n is a, c, g, or t
  misc_feature (2891)..(2894): n is a, c, g, or t
cctctttcgaaccctgtaggattttacttcttgacgcatctgtttatttaaaccaaaggggtatgttgaggcatgggcaccctggcagcagaccccaaaccaaccctcttgacttgtgcctgccttcaggatatgttccttcctgaattgtctaagaaggctgagttggggggtggttgctgatttttataacatatagcagttgttcataggcctgtgttttaaagaagggcaagcctgaactaccgtcctgcctaggcctggctccatacctgggagtagacagtcttctactttctaaaaactgacttaaatttgataaatctcctgttgagtgacagtgtttcgcagctgagcccttnaggagattctcagttgggcagagacatcccttcctcagacgccttgtgggctggactcctttggcccagttcaaagtgaggggagggctccaacaggccgggaagacagttgacttcaccctccttgggtttgtctgtctgtccgtctctgggaatggtcgcttcctgttttcccttttccttttaagcctcgccttgttccctcttctctctcttcatgaactactccgagtcttggtctccgtccctctatctctggctcctgcatctgtctcggcttctggccttcctctccccctcccctcccctccctcgcgctgtcattcaccccgctcctctccgcgcacagccaatggagagacccagtcgaaaccgcgaagctctcttgcaccgggctttttcgcctggtgattgatgtcccagagtcaacagcgagcgagcagccggagcggggaagcagaagccagagaggggaagaatacggcgccccctctctccctcccctcccccttctactttagcctttctgcgcacttcgcttccaagtctccgcgcagccaggagccgctgttgcctcccagcccctgctagctgccccccgagccgagcgcagcgagcgccgccgcccgggccccccggtggggccagggccagcatggagcacctgggtccgcaccacctccacccgggtcacgcagagcccattagcttcggcatcgaccagatcctcaacagcccggaccagggtggctgcatgggacccgcctcgcgcctccaggacggagaatacggccttggctgcttggtcggaggcgcctacacttacggcggcgggggctccgcggccgcgacgggggctggaggagcgggggcctatggtactggaggtcccggcggccccggaggcccggcaggcggcggcggcgcctgcagcatgggtcctctgaccggctcctacaacgtgaacatggccttggcaggcggccccggtcctggcggcggcggcggcagcagcggcggtgccggggcactcagcgctgcgggggtaatccgggtgccggcacacaggccgctcgccggagccgtggcccacccccagcccctggccaccggcttgcccaccgtgccctctgtgcctgccatgccgggcgtcaacaacctcactggcctcaccttcccctggatggagagtaaccgcagatacacaaaggacaggttcacaggtcacccctatcagaaccggacgccccccaagaagaagaagccgcgcacgtccttcacacgcctgcagatctgcgagctggagaagcgcttccaccgccagaagtacctggcctcggccgagcgcgccgccctggccaaggcgctcaaaatgaccgatgcgcaggtcaaaacctggttccagaaccggcggacaaagtggagacggcagactgcggaggaacgggaggccgagaggcagcaagcgaaccgcatcctcctgcagttgcagcaggaggccttccagaagagcctggcacagccgctgcccgctgaccctctgtgcgtgcacaactcgtcgctcttcgccctgcagaatctgcagccgtggtctgacgactcgaccaaaatcactagcgtcacgtcggtggcgtcggcctgcgagtgagcctgcccattctgccctgtgggaccccaggcccactcaggggtcactgaggcctgagacccaggactcctccccaccctcctggcctcagactgcacccaggaggggaacactgccctcgcacggccccgaagggcccccacatttgtgccgacactgttctcccttcggtggaagagctcaagggacaaggacacgcgcccccctcccagaggcgtcccgcacctgtctgaactgttaagaaatctgtttttgtttatttcattttattttaatttttaacgtgggattcagagaaaggcaagggaggtaagggaggaggagcttctggggtccccagggctgtcatctgaatttgccctgggaaaccccttctctgtgacccacttctcatcacacacatggaaacccataggcccacacacaggtggtgtcactgtccctcctggtgtcaccccagagccacacatgggcatctatgggagagtgtcaaccagacagagggtcacagtgtttacactttggaccttacgatcaggcacaggtcaggggtgacacagactcatcctgaacagcatggcactccctccagcacaaacacaaggtcatggccacactgtgacacactacaccacacacaacagccaacagctacaacagcctcacttggtctgccaggcccccaccacacatcccagcccaatccaggtacgcacagacaggttttcacataaatgcagcccatttctccagaacccatttgaggggtgggggggtgttaatttatgcacttataaggtgttttctgtgtaaccattttataaagtgcttgtgtaatttatgtgaaaaaaataaataaaagcctcngnntccggannnannnn

SEQ ID NO: 282910 - DNA, 2930 bp, Homo sapiens
  misc_feature (362)..(362): n is a, c, g, or t
  misc_feature (2913)..(2913): n is a, c, g, or t
  misc_feature (2915)..(2916): n is a, c, g, or t
  misc_feature (2923)..(2925): n is a, c, g, or t
  misc_feature (2927)..(2930): n is a, c, g, or t
cctctttcgaaccctgtaggattttacttcttgacgcatctgtttatttaaaccaaaggggtatgttgaggcatgggcaccctggcagcagaccccaaaccaaccctcttgacttgtgcctgccttcaggatatgttccttcctgaattgtctaagaaggctgagttggggggtggttgctgatttttataacatatagcagttgttcataggcctgtgttttaaagaagggcaagcctgaactaccgtcctgcctaggcctggctccatacctgggagtagacagtcttctactttctaaaaactgacttaaatttgataaatctcctgttgagtgacagtgtttcgcagctgagcccttnaggagattctcagttgggcagagacatcccttcctcagacgccttgtgggctggactcctttggcccagttcaaagtgaggggagggctccaacaggccgggaagacagttgacttcaccctccttgggtttgtctgtctgtccgtctctgggaatggtcgcttcctgttttcccttttccttttaagcctcgccttgttccctcttctctctcttcatgaactactccgagtcttggtctccgtccctctatctctggctcctgcatctgtctcggcttctggccttcctctccccctcccctcccctccctcgcgctgtcattcaccccgctcctctccgcgcacagccaatggagagacccagtcgaaaccgcgaagctctcttgcaccgggctttttcgcctggtgattgatgtcccagagtcaacagcgagcgagcagccggagcggggaagcagaagccagagaggggaagaatacggcgccccctctctccctcccctcccccttctactttagcctttctgcgcacttcgcttccaagtctccgcgcagccaggagccgctgttgcctcccagcccctgctagctgccccccgagccgagcgcagcgagcgccgccgcccgggccccccggtggggccagggccagcatggagcacctgggtccgcaccacctccacccgggtcacgcagagcccattagcttcggcatcgaccagatcctcaacagcccggaccagggtggctgcatgggacccgcctcgcgcctccaggacggagaatacggccttggctgcttggtcggaggcgcctacacttacggcggcgggggctccgcggccgcgacgggggctggaggagcgggggcctatggtactggaggtcccggcggccccggaggcccggcaggcggcggcggcgcctgcagcatgggtcctctgaccggctcctacaacgtgaacatggccttggcaggcggccccggtcctggcggcggcggcggcagcagcggcggtgccggggcactcagcgctgcgggggtaatccgggtgccggcacacaggccgctcgccggagccgtggcccacccccagcccctggccaccggcttgcccaccgtgccctctgtgcctgccatgccgggcgtcaacaacctcactggcctcaccttcccctggatggagagtaaccgcagatacacaaaggacaggttcacagtggccctctcacccttcactgtaacacgccgtataggtcacccctatcagaaccggacgccccccaagaagaagaagccgcgcacgtccttcacacgcctgcagatctgcgagctggagaagcgcttccaccgccagaagtacctggcctcggccgagcgcgccgccctggccaaggcgctcaaaatgaccgatgcgcaggtcaaaacctggttccagaaccggcggacaaagtggagacggcagactgcggaggaacgggaggccgagaggcagcaagcgaaccgcatcctcctgcagttgcagcaggaggccttccagaagagcctggcacagccgctgcccgctgaccctctgtgcgtgcacaactcgtcgctcttcgccctgcagaatctgcagccgtggtctgacgactcgaccaaaatcactagcgtcacgtcggtggcgtcggcctgcgagtgagcctgcccattctgccctgtgggaccccaggcccactcaggggtcactgaggcctgagacccaggactcctccccaccctcctggcctcagactgcacccaggaggggaacactgccctcgcacggccccgaagggcccccacatttgtgccgacactgttctcccttcggtggaagagctcaagggacaaggacacgcgcccccctcccagaggcgtcccgcacctgtctgaactgttaagaaatctgtttttgtttatttcattttattttaatttttaacgtgggattcagagaaaggcaagggaggtaagggaggaggagcttctggggtccccagggctgtcatctgaatttgccctgggaaaccccttctctgtgacccacttctcatcacacacatggaaacccataggcccacacacaggtggtgtcactgtccctcctggtgtcaccccagagccacacatgggcatctatgggagagtgtcaaccagacagagggtcacagtgtttacactttggaccttacgatcaggcacaggtcaggggtgacacagactcatcctgaacagcatggcactccctccagcacaaacacaaggtcatggccacactgtgacacactacaccacacacaacagccaacagctacaacagcctcacttggtctgccaggcccccaccacacatcccagcccaatccaggtacgcacagacaggttttcacataaatgcagcccatttctccagaacccatttgaggggtgggggggtgttaatttatgcacttataaggtgttttctgtgtaaccattttataaagtgcttgtgtaatttatgtgaaaaaaataaataaaagcctcngnntccggannnannnn

SEQ ID NO: 282911 - DNA, 965 bp, Homo sapiens
cggctaaggcagattctgcgatcgtccctacaagactaggaggcggggttcggcaaaggcccatcgtggagagttacatcgggttcatcgagagctaccgcgacccctttggttcccgaggagaatttgaaggtttcgtagctgtggtgaacaaggccatgagtgccaagtttgagcggctggtggcgagcgcagagcagctgctgaaggagctgccctggcccccaacctttgagaaggacaagttcctcacccctgacttcacctccctggatgttctcaccttcgctggctccggcatccctgccggcatcaacatccccaactacgatgatctgaggcagacggaaggctttaagaacgtgtcgctggggaatgtgctggctgtggcctacgccacgcagcgggagaagcttacctttctggaggaggatgacaaggacctgtacatcctctggaaggggccctccttcgatgtgcaggtgggcctgcacgagctgctgggccatggcagtggcaagctcttcgtacaggacgaaaaaggagcattcaactttgaccaggaaacagtgatcaacccagagacgggcgagcagattcagagctggtatcggagcggggagacctgggatagcaagttcagcaccatcgcctccagctacgaagagtgccgggctgagagcgtgggtctctacctctgtctccacccgcaagtgctggaggaagatcttggcttgaaggcggctgatgccggaaggacgggatctacgtgacgtggccacatggtcggagcggctgctcgcccggagttcaaaacaccgaggcctacaatggagacagggccatatcaggccgggtgggacctgaaaactggaggagggagaaaggatcatacataacccacaaggtccagggccaaaccggtgctcccgacaaaccgccagggaacccgccaaaagccccgg

SEQ ID NO: 282912 - DNA, 2719 bp, Homo sapiens
tcgcagagccccaatgaatgggggagccggaagcaggaagtgagtttgcgaacggagcagctgctgcagcagggcccatggcggacacccagtacatcctgcccaatgacatcggcgtgtctagcctggactgccgtgaggccttccgcctgctgtcacccacagagcgcctctatgcctaccacctgtcccgtgccgcctggtacggaggcctggctgtgctgcttcagacctcccctgaggccccctacatctatgctctgctcagccgcctcttccgcgcccaggaccccgaccagctgcgccaacatgccctggctgaaggccttaccgaggaggagtatcaggcgttcctggtctatgccgcgggtgtttactccaacatgggcaactacaagtcctttggtgacaccaagtttgttcccaacttgcccaaggaaaagctggaacgggtgatcctagggagtgaggctgctcagcagcacccagaagaagtcaggggcctctggcagacctgcggggagcttatgttctctctggagccaaggcttcgacacctcggactggggaaggagggaatcaccacctatttctctgggaattgtaccatggaagatgccaaattggcccaggactttctggactcacagaacctcagtgcctacaacacccggctcttcaaagaggtcgatggagaagggaagccctactacgaggtgcggctggcttctgtgcttggctcagagccttccctggactctgaggtgacttccaagctgaagagctatgaattccggggaagccctttccaggtgacccggggggactacgcgcccatcctccagaaggtggtggagcagctggagaaagccaaggcctatgcagccaacagccaccaggggcagatgctggcccagtatatagagagcttcacccagggctccatcgaggcccacaagaggggctcccgcttctggatccaggacaaaggccccatcgtggagagttacatcgggttcatcgagagctaccgcgacccctttggttcccgaggagaatttgaaggtttcgtagctgtggtgaacaaggccatgagtgccaagtttgagcggctggtggcgagcgcagagcagctgctgaaggagctgccctggcccccaacctttgagaaggacaagttcctcacccctgacttcacctccctggatgttctcaccttcgctggctccggcatccctgccggcatcaacatccccaactacgatgatctgaggcagacggaaggctttaagaacgtgtcgctggggaatgtgctggctgtggcctacgccacgcagcgggagaagcttacctttctggaggaggatgacaaggacctgtacatcctctggaaggggccctccttcgatgtgcaggtgggcctgcacgagctgctgggccatggcagtggcaagctcttcgtacaggacgaaaaaggagcattcaactttgaccaggaaacagtgatcaacccagagacgggcgagcagattcagagctggtatcggagcggggagacctgggatagcaagttcagcaccatcgcctccagctacgaagagtgccgggctgagagcgtgggtctctacctctgtctccacccgcaagtgctggagatctttggctttgagggggctgatgcggaggacgtgatctacgtgaactggctcaacatggttcgggccgggctgctcgctctggagttctacacacctgaggccttcaactggcgacaggcccatatgcaggcccggtttgtgatcctgagagtcttgctggaggctggcgagggactcgttaccatcactcccaccacaggctccgatgggcgcccagatgcccgggtccgcctcgaccgcagcaagatccggtctgtgggcaagcctgctctagagcgcttcctgcggagacttcaggtgctgaagtccacaggggatgtggccggagggcgggccctgtacgaggggtatgcaacggtcactgatgcgccccccgagtgcttcctcaccctcagggacacggtgctgctgcgtaaggaatctcggaagctcattgttcagcccaacactcgccttgaaggctcagacgtgcagcttctggaatacgaggcgtcagctgctggcctcatccgatccttctctgagcgtttcccagaggatggacccgagttggaggagatcctcacacagctggccacagccgatgcccgattctggaagggccccagtgaggccccatctggccaagcttgaggaagatgtgtggccttgcccccaattccatcagaccaaggctgcaagtggccctccattcgtgtgtgtatttaggggctggggagggggaggggcaggagcttggaccttggtactacctcagctgagggtggtgacacaaccccttccatttgtcagcactttccagcctgccaattgcttcccctctgtgatctcatttcatctgcactgccatacgtggagtgagcaagacagggcttaccatcctgtctaccagatgaggaaatggcagttctgagaagtcactggtctagatcccgcaggtggcacgtgacagctagggttcaaaacgttctcaccaaatccaatgctcctcacatattaattttataaccagacaaataaatattagagacaaccaccaaaaaaaaataatataaaaaaaa

SEQ ID NO: 282913 - DNA, 2683 bp, Homo sapiens
cgcgggttaattggacaggaaggagcagtgcagcagggcccatggcggacacccagtacatcctgcccaatgacatcggcgtgtctagcctggactgccgtgaggccttccgcctgctgtcacccacagagcgcctctatgcctaccacctgtcccgtgccgcctggtacggaggcctggctgtgctgcttcagacctcccctgaggccccctacatctatgctctgctcagccgcctcttccgcgcccaggaccccgaccagctgcgccaacatgccctggctgaaggccttaccgaggaggagtatcaggcgttcctggtctatgccgcgggtgtttactccaacatgggcaactacaagtcctttggtgacaccaagtttgttcccaacttgcccaaggaaaagctggaacgggtgatcctagggagtgaggctgctcagcagcacccagaagaagtcaggggcctctggcagacctgcggggagcttatgttctctctggagccaaggcttcgacacctcggactggggaaggagggaatcaccacctatttctctgggaattgtaccatggaagatgccaaattggcccaggactttctggactcacagaacctcagtgcctacaacacccggctcttcaaagaggtcgatggagaagggaagccctactacgaggtgcggctggcttctgtgcttggctcagagccttccctggactctgaggtgacttccaagctgaagagctatgaattccggggaagccctttccaggtgacccggggggactacgcgcccatcctccagaaggtggtggagcagctggagaaagccaaggcctatgcagccaacagccaccaggggcagatgctggcccagtatatagagagcttcacccagggctccatcgaggcccacaagaggggctcccgcttctggatccaggacaaaggccccatcgtggagagttacatcgggttcatcgagagctaccgcgacccctttggttcccgaggagaatttgaaggtttcgtagctgtggtgaacaaggccatgagtgccaagtttgagcggctggtggcgagcgcagagcagctgctgaaggagctgccctggcccccaacctttgagaaggacaagttcctcacccctgacttcacctccctggatgttctcaccttcgctggctccggcatccctgccggcatcaacatccccaactacgatgatctgaggcagacggaaggctttaagaacgtgtcgctggggaatgtgctggctgtggcctacgccacgcagcgggagaagcttacctttctggaggaggatgacaaggacctgtacatcctctggaaggggccctccttcgatgtgcaggtgggcctgcacgagctgctgggccatggcagtggcaagctcttcgtacaggacgaaaaaggagcattcaactttgaccaggaaacagtgatcaacccagagacgggcgagcagattcagagctggtatcggagcggggagacctgggatagcaagttcagcaccatcgcctccagctacgaagagtgccgggctgagagcgtgggtctctacctctgtctccacccgcaagtgctggagatctttggctttgagggggctgatgcggaggacgtgatctacgtgaactggctcaacatggttcgggccgggctgctcgctctggagttctacacacctgaggccttcaactggcgacaggcccatatgcaggcccggtttgtgatcctgagagtcttgctggaggctggcgagggactcgttaccatcactcccaccacaggctccgatgggcgcccagatgcccgggtccgcctcgaccgcagcaagatccggtctgtgggcaagcctgctctagagcgcttcctgcggagacttcaggtgctgaagtccacaggggatgtggccggagggcgggccctgtacgaggggtatgcaacggtcactgatgcgccccccgagtgcttcctcaccctcagggacacggtgctgctgcgtaaggaatctcggaagctcattgttcagcccaacactcgccttgaaggctcagacgtgcagcttctggaatacgaggcgtcagctgctggcctcatccgatccttctctgagcgtttcccagaggatggacccgagttggaggagatcctcacacagctggccacagccgatgcccgattctggaagggccccagtgaggccccatctggccaagcttgaggaagatgtgtggccttgcccccaattccatcagaccaaggctgcaagtggccctccattcgtgtgtgtatttaggggctggggagggggaggggcaggagcttggaccttggtactacctcagctgagggtggtgacacaaccccttccatttgtcagcactttccagcctgccaattgcttcccctctgtgatctcatttcatctgcactgccatacgtggagtgagcaagacagggcttaccatcctgtctaccagatgaggaaatggcagttctgagaagtcactggtctagatcccgcaggtggcacgtgacagctagggttcaaaacgttctcaccaaatccaatgctcctcacatattaattttataaccagacaaataaatattagagacaaccaccaaaaaaaaataatataaaaaaaa

SEQ ID NO: 282914 - DNA, 2655 bp, Homo sapiens
tggctaggtaggaggccgcgttgaaattcggagaggtgccaatgacatcggcgtgtctagcctggactgccgtgaggccttccgcctgctgtcacccacagagcgcctctatgcctaccacctgtcccgtgccgcctggtacggaggcctggctgtgctgcttcagacctcccctgaggccccctacatctatgctctgctcagccgcctcttccgcgcccaggaccccgaccagctgcgccaacatgccctggctgaaggccttaccgaggaggagtatcaggcgttcctggtctatgccgcgggtgtttactccaacatgggcaactacaagtcctttggtgacaccaagtttgttcccaacttgcccaaggaaaagctggaacgggtgatcctagggagtgaggctgctcagcagcacccagaagaagtcaggggcctctggcagacctgcggggagcttatgttctctctggagccaaggcttcgacacctcggactggggaaggagggaatcaccacctatttctctgggaattgtaccatggaagatgccaaattggcccaggactttctggactcacagaacctcagtgcctacaacacccggctcttcaaagaggtcgatggagaagggaagccctactacgaggtgcggctggcttctgtgcttggctcagagccttccctggactctgaggtgacttccaagctgaagagctatgaattccggggaagccctttccaggtgacccggggggactacgcgcccatcctccagaaggtggtggagcagctggagaaagccaaggcctatgcagccaacagccaccaggggcagatgctggcccagtatatagagagcttcacccagggctccatcgaggcccacaagaggggctcccgcttctggatccaggacaaaggccccatcgtggagagttacatcgggttcatcgagagctaccgcgacccctttggttcccgaggagaatttgaaggtttcgtagctgtggtgaacaaggccatgagtgccaagtttgagcggctggtggcgagcgcagagcagctgctgaaggagctgccctggcccccaacctttgagaaggacaagttcctcacccctgacttcacctccctggatgttctcaccttcgctggctccggcatccctgccggcatcaacatccccaactacgatgatctgaggcagacggaaggctttaagaacgtgtcgctggggaatgtgctggctgtggcctacgccacgcagcgggagaagcttacctttctggaggaggatgacaaggacctgtacatcctctggaaggggccctccttcgatgtgcaggtgggcctgcacgagctgctgggccatggcagtggcaagctcttcgtacaggacgaaaaaggagcattcaactttgaccaggaaacagtgatcaacccagagacgggcgagcagattcagagctggtatcggagcggggagacctgggatagcaagttcagcaccatcgcctccagctacgaagagtgccgggctgagagcgtgggtctctacctctgtctccacccgcaagtgctggagatctttggctttgagggggctgatgcggaggacgtgatctacgtgaactggctcaacatggttcgggccgggctgctcgctctggagttctacacacctgaggccttcaactggcgacaggcccatatgcaggcccggtttgtgatcctgagagtcttgctggaggctggcgagggactcgttaccatcactcccaccacaggctccgatgggcgcccagatgcccgggtccgcctcgaccgcagcaagatccggtctgtgggcaagcctgctctagagcgcttcctgcggagacttcaggtgctgaagtccacaggggatgtggccggagggcgggccctgtacgaggggtatgcaacggtcactgatgcgccccccgagtgcttcctcaccctcagggacacggtgctgctgcgtaaggaatctcggaagctcattgttcagcccaacactcgccttgaaggctcagacgtgcagcttctggaatacgaggcgtcagctgctggcctcatccgatccttctctgagcgtttcccagaggatggacccgagttggaggagatcctcacacagctggccacagccgatgcccgattctggaagggccccagtgaggccccatctggccaagcttgaggaagatgtgtggccttgcccccaattccatcagaccaaggctgcaagtggccctccattcgtgtgtgtatttaggggctggggagggggaggggcaggagcttggaccttggtactacctcagctgagggtggtgacacaaccccttccatttgtcagcactttccagcctgccaattgcttcccctctgtgatctcatttcatctgcactgccatacgtggagtgagcaagacagggcttaccatcctgtctaccagatgaggaaatggcagttctgagaagtcactggtctagatcccgcaggtggcacgtgacagctagggttcaaaacgttctcaccaaatccaatgctcctcacatattaattttataaccagacaaataaatattagagacaaccaccaaaaaaaaataatataaaaaaaa

SEQ ID NO: 282915 - DNA, 2693 bp, Homo sapiens
ccatggctggatcgaggccgggggttgaatcggcacgaggcgaacggagcagctgctgcagcagggcccatggcggacacccagtacatcctgcccaatgacatcggcgtgtctagcctggactgccgtgaggccttccgcctgctgtcacccacagagcgcctctatgcctaccacctgtcccgtgccgcctggtacggaggcctggctgtgctgcttcagacctcccctgaggccccctacatctatgctctgctcagccgcctcttccgcgcccaggaccccgaccagctgcgccaacatgccctggctgaaggccttaccgaggaggagtatcaggcgttcctggtctatgccgcgggtgtttactccaacatgggcaactacaagtcctttggtgacaccaagtttgttcccaacttgcccaaggaaaagctggaacgggtgatcctagggagtgaggctgctcagcagcacccagaagaagtcaggggcctctggcagacctgcggggagcttatgttctctctggagccaaggcttcgacacctcggactggggaaggagggaatcaccacctatttctctgggaattgtaccatggaagatgccaaattggcccaggactttctggactcacagaacctcagtgcctacaacacccggctcttcaaagaggtcgatggagaagggaagccctactacgaggtgcggctggcttctgtgcttggctcagagccttccctggactctgaggtgacttccaagctgaagagctatgaattccggggaagccctttccaggtgacccggggggactacgcgcccatcctccagaaggtggtggagcagctggagaaagccaaggcctatgcagccaacagccaccaggggcagatgctggcccagtatatagagagcttcacccagggctccatcgaggcccacaagaggggctcccgcttctggatccaggacaaaggccccatcgtggagagttacatcgggttcatcgagagctaccgcgacccctttggttcccgaggagaatttgaaggtttcgtagctgtggtgaacaaggccatgagtgccaagtttgagcggctggtggcgagcgcagagcagctgctgaaggagctgccctggcccccaacctttgagaaggacaagttcctcacccctgacttcacctccctggatgttctcaccttcgctggctccggcatccctgccggcatcaacatccccaactacgatgatctgaggcagacggaaggctttaagaacgtgtcgctggggaatgtgctggctgtggcctacgccacgcagcgggagaagcttacctttctggaggaggatgacaaggacctgtacatcctctggaaggggccctccttcgatgtgcaggtgggcctgcacgagctgctgggccatggcagtggcaagctcttcgtacaggacgaaaaaggagcattcaactttgaccaggaaacagtgatcaacccagagacgggcgagcagattcagagctggtatcggagcggggagacctgggatagcaagttcagcaccatcgcctccagctacgaagagtgccgggctgagagcgtgggtctctacctctgtctccacccgcaagtgctggagatctttggctttgagggggctgatgcggaggacgtgatctacgtgaactggctcaacatggttcgggccgggctgctcgctctggagttctacacacctgaggccttcaactggcgacaggcccatatgcaggcccggtttgtgatcctgagagtcttgctggaggctggcgagggactcgttaccatcactcccaccacaggctccgatgggcgcccagatgcccgggtccgcctcgaccgcagcaagatccggtctgtgggcaagcctgctctagagcgcttcctgcggagacttcaggtgctgaagtccacaggggatgtggccggagggcgggccctgtacgaggggtatgcaacggtcactgatgcgccccccgagtgcttcctcaccctcagggacacggtgctgctgcgtaaggaatctcggaagctcattgttcagcccaacactcgccttgaaggctcagacgtgcagcttctggaatacgaggcgtcagctgctggcctcatccgatccttctctgagcgtttcccagaggatggacccgagttggaggagatcctcacacagctggccacagccgatgcccgattctggaagggccccagtgaggccccatctggccaagcttgaggaagatgtgtggccttgcccccaattccatcagaccaaggctgcaagtggccctccattcgtgtgtgtatttaggggctggggagggggaggggcaggagcttggaccttggtactacctcagctgagggtggtgacacaaccccttccatttgtcagcactttccagcctgccaattgcttcccctctgtgatctcatttcatctgcactgccatacgtggagtgagcaagacagggcttaccatcctgtctaccagatgaggaaatggcagttctgagaagtcactggtctagatcccgcaggtggcacgtgacagctagggttcaaaacgttctcaccaaatccaatgctcctcacatattaattttataaccagacaaataatataggccggcgggggggggggg

SEQ ID NO: 282916 - DNA, 2621 bp, Homo sapiens
ccatggctggatcgaggccgggggttgaatcggcacgaggcgaacggagcagctgctgcagcagggcccatggcggacacccagtacatcctgcccaatgacatcggcgtgtctagcctggactgccgtgaggccttccgcctgctgtcacccacagagcgcctctatgcctaccacctgtcccgtgccgcctggtacggaggcctggctgtgctgcttcagacctcccctgaggccccctacatctatgctctgctcagccgcctcttccgcgcccaggaccccgaccagctgcgccaacatgccctggctgaaggccttaccgaggaggagtatcaggcgttcctggtctatgccgcgggtgtttactccaacatgggcaactacaagtcctttggtgacaccaagtttgttcccaacttgcccaaggaaaagctggaacgggtgatcctagggagtgaggctgctcagcagcacccagaagaagtcaggggcctctggcagacctgcggggagcttatgttctctctggagccaaggcttcgacacctcggactggggaaggagggaatcaccacctatttctctgggaattgtaccatggaagatgccaaattggcccaggactttctggactcacagaacctcagtgcctacaacacccggctcttcaaagaggtcgatggagaagggaagccctactacgaggtgcggctggcttctgtgcttggctcagagccttccctggactctgaggtgacttccaagctgaagagctatgaattccggggaagccctttccaggtgacccggggggactacgcgcccatcctccagaaggtggtggagcagctggagaaagccaaggcctatgcagccaacagccaccaggggcagatgctggcccagtatatagagagcttcacccagggctccatcgaggcccacaagaggggctcccgcttctggatccaggacaaaggccccatcgtggagagttacatcgggttcatcgagagctaccgcgacccctttggttcccgaggagaatttgaaggtttcgtagctgtggtgaacaaggccatgagtgccaagtttgagcggctggtggcgagcgcagagcagctgctgaaggagctgccctggcccccaacctttgagaaggacaagttcctcacccctgacttcacctccctggatgttctcaccttcgctggctccggcatccctgccggcatcaacatccccaactacgatgatctgaggcagacggaaggctttaagaacgtgtcgctggggaatgtgctggctgtggcctacgccacgcagcgggagaagcttacctttctggaggaggatgacaaggacctgtacatcctctggaaggggccctccttcgatgtgcaggtgggcctgcacgagctgctgggccatggcagtggcaagctcttcgtacaggacgaaaaaggagcattcaactttgaccaggaaacagtgatcaacccagagacgggcgagcagattcagagctggtatcggagcggggagacctgggatagcaagttcagcaccatcgcctccagctacgaagagtgccgggctgagagcgtgggtctctacctctgtctccacccgcaagtgctggagatctttggctttgagggggctgatgcggaggacgtgatctacgtgaactggctcaacatggttcgggccgggctgctcgctctggagttctacacacctgaggccttcaactggcgacaggcccatatgcaggcccggtttgtgatcctgagagtcttgctggaggctggcgagggactcgttaccatcactcccaccacaggctccgatgggcgcccagatgcccgggtccgcctcgaccgcagcaagatccggtctgtgggcaagcctgctctagagcgcttcctgcggagacttcaggtgctgaagtccacaggggatgtggccggagggcgggccctgtacgaggggtatgcaacggtcactgatgcgccccccgagtgcttcctcaccctcagggacacggtgctgctgcgtaaggaatctcggaagctcattgttcagcccaacactcgccttgaaggctcagacgtgcagcttctggaatacgaggcgtcagctgctggcctcatccgatccttctctgagcgtttcccagaggatggacccgagttggaggagatcctcacacagctggccacagccgatgcccgattctggaagggccccagtgaggccccatctggccaagcttgaggaagatgtgtggccttgcccccaattccatcagaccaaggctgcaagtggccctccattcgtgtgtagcactttccagcctgccaattgcttcccctctgtgatctcatttcatctgcactgccatacgtggagtgagcaagacagggcttaccatcctgtctaccagatgaggaaatggcagttctgagaagtcactggtctagatcccgcaggtggcacgtgacagctagggttcaaaacgttctcaccaaatccaatgctcctcacatattaattttataaccagacaaataaatattagagacaaccaccaaaaaaaaataatataaaaaaaa

SEQ ID NO: 282917 - DNA, 1786 bp, Homo sapiens
cggctaaggcagattctgcgatcgtccctacaagactaggaggcggggttcggcaaaggcccatcgtggagagttacatcgggttcatcgagagctaccgcgacccctttggttcccgaggagaatttgaaggtttcgtagctgtggtgaacaaggccatgagtgccaagtttgagcggctggtggcgagcgcagagcagctgctgaaggagctgccctggcccccaacctttgagaaggacaagttcctcacccctgacttcacctccctggatgttctcaccttcgctggctccggcatccctgccggcatcaacatccccaactacgatgatctgaggcagacggaaggctttaagaacgtgtcgctggggaatgtgctggctgtggcctacgccacgcagcgggagaagcttacctttctggaggaggatgacaaggacctgtacatcctctggaaggggccctccttcgatgtgcaggtgggcctgcacgagctgctgggccatggcagtggcaagctcttcgtacaggacgaaaaaggagcattcaactttgaccaggaaacagtgatcaacccagagacgggcgagcagattcagagctggtatcggagcggggagacctgggatagcaagttcagcaccatcgcctccagctacgaagagtgccgggctgagagcgtgggtctctacctctgtctccacccgcaagtgctggagatctttggctttgagggggctgatgcggaggacgtgatctacgtgaactggctcaacatggttcgggccgggctgctcgctctggagttctacacacctgaggccttcaactggcgacaggcccatatgcaggcccggtttgtgatcctgagagtcttgctggaggctggcgagggactcgttaccatcactcccaccacaggctccgatgggcgcccagatgcccgggtccgcctcgaccgcagcaagatccggtctgtgggcaagcctgctctagagcgcttcctgcggagacttcaggtgctgaagtccacaggggatgtggccggagggcgggccctgtacgaggggtatgcaacggtcactgatgcgccccccgagtgcttcctcaccctcagggacacggtgctgctgcgtaaggaatctcggaagctcattgttcagcccaacactcgccttgaaggctcagacgtgcagcttctggaatacgaggcgtcagctgctggcctcatccgatccttctctgagcgtttcccagaggatggacccgagttggaggagatcctcacacagctggccacagccgatgcccgattctggaagggccccagtgaggccccatctggccaagcttgaggaagatgtgtggccttgcccccaattccatcagaccaaggctgcaagtggccctccattcgtgtgtgtatttaggggctggggagggggaggggcaggagcttggaccttggtactacctcagctgagggtggtgacacaaccccttccatttgtcagcactttccagcctgccaattgcttcccctctgtgatctcatttcatctgcactgccatacgtggagtgagcaagacagggcttaccatcctgtctaccagatgaggaaatggcagttctgagaagtcactggtctagatcccgcaggtggcacgtgacagctagggttcaaaacgttctcaccaaatccaatgctcctcacatattaattttataaccagacaaataaatattagagacaaccaccaaaaaaaaataatataaaaaaaa

SEQ ID NO: 282918 - DNA, 1248 bp, Homo sapiens
gaatctagaggatcccgattcgacggaagcagtgatcaacccagagacgggcgagcagattcagagctggtatcggagcggggagacctgggatagcaagttcagcaccatcgcctccagctacgaagagtgccgggctgagagcgtgggtctctacctctgtctccacccgcaagtgctggagatctttggctttgagggggctgatgcggaggacgtgatctacgtgaactggctcaacatggttcgggccgggctgctcgctctggagttctacacacctgaggccttcaactggcgacaggcccatatgcaggcccggtttgtgatcctgagagtcttgctggaggctggcgagggactcgttaccatcactcccaccacaggctccgatgggcgcccagatgcccgggtccgcctcgaccgcagcaagatccggtctgtgggcaagcctgctctagagcgcttcctgcggagacttcaggtgctgaagtccacaggggatgtggccggagggcgggccctgtacgaggggtatgcaacggtcactgatgcgccccccgagtgcttcctcaccctcagggacacggtgctgctgcgtaaggaatctcggaagctcattgttcagcccaacactcgccttgaaggctcagacgtgcagcttctggaatacgaggcgtcagctgctggcctcatccgatccttctctgagcgtttcccagaggatggacccgagttggaggagatcctcacacagctggccacagccgatgcccgattctggaagggccccagtgaggccccatctggccaagcttgaggaagatgtgtggccttgcccccaattccatcagaccaaggctgcaagtggccctccattcgtgtgtgtatttaggggctggggagggggaggggcaggagcttggaccttggtactacctcagctgagggtggtgacacaaccccttccatttgtcagcactttccagcctgccaattgcttcccctctgtgatctcatttcatctgcactgccatacgtggagtgagcaagacagggcttaccatcctgtctaccagatgaggaaatggcagttctgagaagtcactggtctagatcccgcaggtggcacgtgacagctagggttcaaaacgttctcaccaaatccaatgctcctcacatattaattttataaccagacaaataaatattagagacaaccaccaaaaaaaaataatataaaaaaaa

SEQ ID NO: 282919 - DNA, 1524 bp, Homo sapiens
  misc_feature (1514)..(1514): n is a, c, g, or t
ccatggctggatcgaggccgggggttgaatcggcacgaggcgaacggagcagctgctgcagcagggcccatggcggacacccagtacatcctgcccaatgacatcggcgtgtctagcctggactgccgtgaggccttccgcctgctgtcacccacagagcgcctctatgcctaccacctgtcccgtgccgcctggtacggaggcctggctgtgctgcttcagacctcccctgaggccccctacatctatgctctgctcagccgcctcttccgcgcccaggaccccgaccagctgcgccaacatgccctggctgaaggccttaccgaggaggagtatcaggcgttcctggtctatgccgcgggtgtttactccaacatgggcaactacaagtcctttggtgacaccaagtttgttcccaacttgcccaaggaaaagctggaacgggtgatcctagggagtgaggctgctcagcagcacccagaagaagtcaggggcctctggcagacctgcggggagcttatgttctctctggagccaaggcttcgacacctcggactggggaaggagggaatcaccacctatttctctgggaattgtaccatggaagatgccaaattggcccaggactttctggactcacagaacctcagtgcctacaacacccggctcttcaaagaggtcgatggagaagggaagccctactacgaggtgcggctggcttctgtgcttggctcagagccttccctggactctgaggtgacttccaagctgaagagctatgaattccggggaagccctttccaggtgacccggggggactacgcgcccatcctccagaaggtggtggagcagctggagaaagccaaggcctatgcagccaacagccaccaggggcagatgctggcccagtatatagagagcttcacccagggctccatcgaggcccacaagaggggctcccgcttctggatccaggacaaaggccccatcgtggagagttacatcgggttcatcgagagctaccgcgacccctttggttcccgaggagaatttgaaggtttcgtagctgtggtgaacaaggccatgagtgccaagtttgagcggctggtggcgagcgcagagcagctgctgaaggagctgccctggcccccaacctttgagaaggacaagttcctcacccctgacttcacctccctggatgttctcaccttcgctggctccggcatccctgccggcatcaacatccccaactacgatgatctgaggcagacggaaggctttaagaacgtgtcgctggggaatgtgctggctgtggcctacgccacgcagcgggagaagcttacctttctggaggaggatgacaaggacctgtacatcctctggaaggggccctccttcgatgtgcaggtgggcctgcacgagctgctgggccatggcagtggcaagctcttcgtacaggacgaaaaaggagcattcaactttgaccaggaaacagtgatcgtggggttgtaagngggatcctca

SEQ ID NO: 282920 - DNA, 1454 bp, Homo sapiens
cttgtaataaacggggatatttatgctgtcggccggaagaccgggatcggagcagctgctgcagcagggcccatggcggacacccagtacatcctgcccaatgacatcggcgtgtctagcctggactgccgtgaggccttccgcctgctgtcacccacagagcgcctctatgcctaccacctgtcccgtgccgcctggtacggaggcctggctgtgctgcttcagacctcccctgaggccccctacatctatgctctgctcagccgcctcttccgcgcccaggaccccgaccagctgcgccaacatgccctggctgaaggccttaccgaggaggagtatcaggcgttcctggtctatgccgcgggtgtttactccaacatgggcaactacaagtcctttggtgacaccaagtttgttcccaacttgcccaaggaaaagctggaacgggtgatcctagggagtgaggctgctcagcagcacccagaagaagtcaggggcctctggcagacctgcggggagcttatgttctctctggagccaaggcttcgacacctcggactggggaaggagggaatcaccacctatttctctgggaattgtaccatggaagatgcccgggtccgcctcgaccgcagcaagatccggtctgtgggcaagcctgctctagagcgcttcctgcggagacttcaggtgctgaagtccacaggggatgtggccggagggcgggccctgtacgaggggtatgcaacggtcactgatgcgccccccgagtgcttcctcaccctcagggacacggtgctgctgcgtaaggaatctcggaagctcattgttcagcccaacactcgccttgaaggctcagacgtgcagcttctggaatacgaggcgtcagctgctggcctcatccgatccttctctgagcgtttcccagaggatggacccgagttggaggagatcctcacacagctggccacagccgatgcccgattctggaagggccccagtgaggccccatctggccaagcttgaggaagatgtgtggccttgcccccaattccatcagaccaaggctgcaagtggccctccattcgtgtgtgtatttaggggctggggagggggaggggcaggagcttggaccttggtactacctcagctgagggtggtgacacaaccccttccatttgtcagcactttccagcctgccaattgcttcccctctgtgatctcatttcatctgcactgccatacgtggagtgagcaagacagggcttaccatcctgtctaccagatgaggaaatggcagttctgagaagtcactggtctagatcccgcaggtggcacgtgacagctagggttcaaaacgttctcaccaaatccaatgctcctcacatattaattttataaccagacaaataaatattagagacaaccaccaaaaaaaaataatataaaaaaaa

SEQ ID NO: 282921 - DNA, 1425 bp, Homo sapiens
ccatggctggatcgaggccgggggttgaatcggcacgaggcgaacggagcagctgctgcagcagggcccatggcggacacccagtacatcctgcccaatgacatcggcgtgtctagcctggactgccgtgaggccttccgcctgctgtcacccacagagcgcctctatgcctaccacctgtcccgtgccgcctggtacggaggcctggctgtgctgcttcagacctcccctgaggccccctacatctatgctctgctcagccgcctcttccgcgcccaggaccccgaccagctgcgccaacatgccctggctgaaggccttaccgaggaggagtatcaggcgttcctggtctatgccgcgggtgtttactccaacatgggcaactacaagtcctttggtgacaccaagtttgttcccaacttgcccaaggaaaagctggaacgggtgatcctagggagtgaggctgctcagcagcacccagaagaagtcaggggcctctggcagacctgcggggagcttatgttctctctggagccaaggcttcgacacctcggactggggaaggagggaatcaccacctatttctctgggaattgtaccatggaagatgccaaattggcccaggactttctggactcacagaacctcagtgcctacaacacccggctcttcaaagaggtcgatggagaagggaagccctactacgaggtgcggctggcttctgtgcttggctcagagccttccctggactctgaggtgacttccaagctgaagagctatgaattccggggaagccctttccaggtgacccggggggactacgcgcccatcctccagaaggtggtggagcagctggagaaagccaaggcctatgcagccaacagccaccaggggcagatgctggcccagtatatagagagcttcacccagggctccatcgaggcccacaagaggggctcccgcttctggatccaggacaaaggccccatcgtggagagttacatcgggttcatcgagagctaccgcgacccctttggttcccgaggagaatttgaaggtttcgtagctgtggtgaacaaggccatgagtgccaagtttgagcggctggtggcgagcgcagagcagctgctgaaggagctgccctggcccccaacagcactttccagcctgccaattgcttcccctctgtgatctcatttcatctgcactgccatacgtggagtgagcaagacagggcttaccatcctgtctaccagatgaggaaatggcagttctgagaagtcactggtctagatcccgcaggtggcacgtgacagctagggttcaaaacgttctcaccaaatccaatgctcctcacatattaattttataaccagacaaataaatattagagacaaccaccaaaaaaaaataatataaaaaaaa

SEQ ID NO: 282922 - DNA, 413 bp, Homo sapiens
tcgcagagccccaatgaatgggggagccggaagcaggaagtgagtttgcgaacggagcagctgctgcagcagggcccatggcggacacccagtacatcctgcccaatgacatcggcgtgtctagcctggactgccgtgaggcagcactttccagcctgccaattgcttcccctctgtgatctcatttcatctgcactgccatacgtggagtgagcaagacagggcttaccatcctgtctaccagatgaggaaatggcagttctgagaagtcactggtctagatcccgcaggtggcacgtgacagctagggttcaaaacgttctcaccaaatccaatgctcctcacatattaattttataaccagacaaataaatattagagacaaccaccaaaaaaaaataatataaaaaaaa

SEQ ID NO: 282923 - DNA, 330 bp, Homo sapiens
tacccggtccggcgcttgtgcggcctgctgacaaaaggccgagcccgcagggccaatccgcgcgccaccccgtagcgcctgggggcgggagcgggcgagccgagaagctcgtcttggcgcgtctattggctggtactgacgcccatccggaccccgaggccaggcagttggccaaggggggcggggttcgcagagccccaatgaatgggggagccggaagcaggaagtgagtttgcgaacggagcagctgctgcaggtgaggcgcggcgcctgggcttttggggtcaaagcgtgtcatcccgggggaccaaggcgaatccatactgagcg

SEQ ID NO: 282924 - DNA, 924 bp, Homo sapiens
aaaacgcagctggtacggtctgggatgtttggatgctgctgcagcagggcccatggcggacacccagtacatcctgcccaatgacatcggcgtgtctagcctggactgccgtgaggccttccgcctgctgtcacccacagagcgcctctatgcctaccacctgtcccgtgccgcctggtacggaggcctggctgtgctgcttcagacctcccctgaggccccctacatctatgctctgctcagccgcctcttccgcgcccaggaccccgaccagctgcgccaacatgccctggctgaaggccttaccgaggaggagtatcaggcgttcctggtctatgccgcgggtgtttactccaacatgggcaactacaagtcctttggtgacaccaagtttgttcccaacttgcccaaggaaaagctggaacgggtgatcctagggagtgaggctgctcagcagcacccagaagaagtcaggggcctctggcagacctgcggggagcttatgttctctctggagccaaggcttcgacacctcggactggggaaggagggaatcaccacctatttctctgggaattgtaccatggaagatgccaaattggcccaggactttctggactcacagaacctcagtgcctacaacacccggctcttcaaagaggtcgatggagaagggaagccctactacgaggtgcggctggcttctgtgcttggctcagagccttccctggactctgaggtgacttccaagctgaagagctatgaattccggggaagccctttccaggtgacccggggggactacgcgcccatctcaaagctgggcgcgcggaaagccagcctgtcgcaaagcccggcacatggcccttacaaccccccggcccggccaaagggcccggccagaacgccccgggtccccaccac

SEQ ID NO: 282925 - DNA, 2711 bp, Homo sapiens
ccatggctggatcgaggccgggggttgaatcggcacgaggcgaacggagcagctgctgcagcagggcccatggcggacacccagtacatcctgcccaatgacatcggcgtgtctagcctggactgccgtgaggccttccgcctgctgtcacccacagagcgcctctatgcctaccacctgtcccgtgccgcctggtacggaggcctggctgtgctgcttcagacctcccctgaggccccctacatctatgctctgctcagccgcctcttccgcgcccaggaccccgaccagctgcgccaacatgccctggctgaaggccttaccgaggaggagtatcaggcgttcctggtctatgccgcgggtgtttactccaacatgggcaactacaagtcctttggtgacaccaagtttgttcccaacttgcccaaggaaaagctggaacgggtgatcctagggagtgaggctgctcagcagcacccagaagaagtcaggggcctctggcagacctgcggggagcttatgttctctctggagccaaggcttcgacacctcggactggggaaggagggaatcaccacctatttctctgggaattgtaccatggaagatgccaaattggcccaggactttctggactcacagaacctcagtgcctacaacacccggctcttcaaagaggtcgatggagaagggaagccctactacgaggtgcggctggcttctgtgcttggctcagagccttccctggactctgaggtgacttccaagctgaagagctatgaattccggggaagccctttccaggtgacccggggggactacgcgcccatcctccagaaggtggtggagcagctggagaaagccaaggcctatgcagccaacagccaccaggggcagatgctggcccagtatatagagagcttcacccagggctccatcgaggcccacaagaggggctcccgcttctggatccaggacaaaggccccatcgtggagagttacatcgggttcatcgagagctaccgcgacccctttggttcccgaggagaatttgaaggtttcgtagctgtggtgaacaaggccatgagtgccaagtttgagcggctggtggcgagcgcagagcagctgctgaaggagctgccctggcccccaacctttgagaaggacaagttcctcacccctgacttcacctccctggatgttctcaccttcgctggctccggcatccctgccggcatcaacatccccaactacgatgatctgaggcagacggaaggctttaagaacgtgtcgctggggaatgtgctggctgtggcctacgccacgcagcgggagaagcttacctttctggaggaggatgacaaggacctgtacatcctctggaaggggccctccttcgatgtgcaggtgggcctgcacgagctgctgggccatggcagtggcaagctcttcgtacaggacgaaaaaggagcattcaactttgaccaggaaacagtgatcaacccagagacgggcgagcagattcagagctggtatcggagcggggagacctgggatagcaagttcagcaccatcgcctccagctacgaagagtgccgggctgagagcgtgggtctctacctctgtctccacccgcaagtgctggagatctttggctttgagggggctgatgcggaggacgtgatctacgtgaactggctcaacatggttcgggccgggctgctcgctctggagttctacacacctgaggccttcaactggcgacaggcccatatgcaggcccggtttgtgatcctgagagtcttgctggaggctggcgagggactcgttaccatcactcccaccacaggctccgatgggcgcccagatgcccgggtccgcctcgaccgcagcaagatccggtctgtgggcaagcctgctctagagcgcttcctgcggagacttcaggtgctgaagtccacaggggatgtggccggagggcgggccctgtacgaggggtatgcaacggtcactgatgcgccccccgagtgcttcctcaccctcagggacacggtgctgctgcgtaaggaatctcggaagctcattgttcagcccaacactcgccttgaaggctcagacgtgcagcttctggaatacgaggcgtcagctgctggcctcatccgatccttctctgagcgtttcccagaggatggacccgagttggaggagatcctcacacagctggccacagccgatgcccgattctggaagggccccagtgaggccccatctggccaagcttgaggaagatgtgtggccttgcccccaattccatcagaccaaggctgcaagtggccctccattcgtgtgtgtatttaggggctggggagggggaggggcaggagcttggaccttggtactacctcagctgagggtggtgacacaaccccttccatttgtcagcactttccagcctgccaattgcttcccctctgtgatctcatttcatctgcactgccatacgtggagtgagcaagacagggcttaccatcctgtctaccagatgaggaaatggcagttctgagaagtcactggtctagatcccgcaggtggcacgtgacagctagggttcaaaacgttctcaccaaatccaatgctcctcacatattaattttataaccagacaaataaatattagagacaaccaccaaaaaaaaataatataaaaaaaa

SEQ ID NO: 282926 - DNA, 2714 bp, Homo sapiens
cttgtaataaacggggatatttatgctgtcggccggaagaccgggatcggagcagctgctgcagcagggcccatggcggacacccagtacatcctgcccaatgacatcggcgtgtctagcctggactgccgtgaggccttccgcctgctgtcacccacagagcgcctctatgcctaccacctgtcccgtgccgcctggtacggaggcctggctgtgctgcttcagacctcccctgaggccccctacatctatgctctgctcagccgcctcttccgcgcccaggaccccgaccagctgcgccaacatgccctggctgaaggccttaccgaggaggagtatcaggcgttcctggtctatgccgcgggtgtttactccaacatgggcaactacaagtcctttggtgacaccaagtttgttcccaacttgcccaaggaaaagctggaacgggtgatcctagggagtgaggctgctcagcagcacccagaagaagtcaggggcctctggcagacctgcggggagcttatgttctctctggagccaaggcttcgacacctcggactggggaaggagggaatcaccacctatttctctgggaattgtaccatggaagatgccaaattggcccaggactttctggactcacagaacctcagtgcctacaacacccggctcttcaaagaggtcgatggagaagggaagccctactacgaggtgcggctggcttctgtgcttggctcagagccttccctggactctgaggtgacttccaagctgaagagctatgaattccggggaagccctttccaggtgacccggggggactacgcgcccatcctccagaaggtggtggagcagctggagaaagccaaggcctatgcagccaacagccaccaggggcagatgctggcccagtatatagagagcttcacccagggctccatcgaggcccacaagaggggctcccgcttctggatccaggacaaaggccccatcgtggagagttacatcgggttcatcgagagctaccgcgacccctttggttcccgaggagaatttgaaggtttcgtagctgtggtgaacaaggccatgagtgccaagtttgagcggctggtggcgagcgcagagcagctgctgaaggagctgccctggcccccaacctttgagaaggacaagttcctcacccctgacttcacctccctggatgttctcaccttcgctggctccggcatccctgccggcatcaacatccccaactacgatgatctgaggcagacggaaggctttaagaacgtgtcgctggggaatgtgctggctgtggcctacgccacgcagcgggagaagcttacctttctggaggaggatgacaaggacctgtacatcctctggaaggggccctccttcgatgtgcaggtgggcctgcacgagctgctgggccatggcagtggcaagctcttcgtacaggacgaaaaaggagcattcaactttgaccaggaaacagtgatcaacccagagacgggcgagcagattcagagctggtatcggagcggggagacctgggatagcaagttcagcaccatcgcctccagctacgaagagtgccgggctgagagcgtgggtctctacctctgtctccacccgcaagtgctggagatctttggctttgagggggctgatgcggaggacgtgatctacgtgaactggctcaacatggttcgggccgggctgctcgctctggagttctacacacctgaggccttcaactggcgacaggcccatatgcaggcccggtttgtgatcctgagagtcttgctggaggctggcgagggactcgttaccatcactcccaccacaggctccgatgggcgcccagatgcccgggtccgcctcgaccgcagcaagatccggtctgtgggcaagcctgctctagagcgcttcctgcggagacttcaggtgctgaagtccacaggggatgtggccggagggcgggccctgtacgaggggtatgcaacggtcactgatgcgccccccgagtgcttcctcaccctcagggacacggtgctgctgcgtaaggaatctcggaagctcattgttcagcccaacactcgccttgaaggctcagacgtgcagcttctggaatacgaggcgtcagctgctggcctcatccgatccttctctgagcgtttcccagaggatggacccgagttggaggagatcctcacacagctggccacagccgatgcccgattctggaagggccccagtgaggccccatctggccaagcttgaggaagatgtgtggccttgcccccaattccatcagaccaaggctgcaagtggccctccattcgtgtgtgtatttaggggctggggagggggaggggcaggagcttggaccttggtactacctcagctgagggtggtgacacaaccccttccatttgtcagcactttccagcctgccaattgcttcccctctgtgatctcatttcatctgcactgccatacgtggagtgagcaagacagggcttaccatcctgtctaccagatgaggaaatggcagttctgagaagtcactggtctagatcccgcaggtggcacgtgacagctagggttcaaaacgttctcaccaaatccaatgctcctcacatattaattttataaccagacaaataaatattagagacaaccaccaaaaaaaaataatataaaaaaaa

SEQ ID NO: 282927 - DNA, 2586 bp, Homo sapiens
ccatggctggatcgaggccgggggttgaatcggcacgaggcgaacggagcagctgctgcagcagggcccatggcggacacccagtacatcctgcccaatgacatcggcgtgtctagcctggactgccgtgaggccttccgcctgctgtcacccacagagcgcctctatgcctaccacctgtcccgtgccgcctggtacggaggcctggctgtgctgcttcagacctcccctgaggccccctacatctatgctctgctcagccgcctcttccgcgcccaggaccccgaccagctgcgccaacatgccctggctgaaggccttaccgaggaggagtatcaggcgttcctggtctatgccgcgggtgtttactccaacatgggcaactacaagtcctttggtgacaccaagtttgttcccaacttgcccaaggaaaagctggaacgggtgatcctagggagtgaggctgctcagcagcacccagaagaagtcaggggcctctggcagacctgcggggagcttatgttctctctggagccaaggcttcgacacctcggactggggaaggagggaatcaccacctatttctctgggaattgtaccatggaagatgccaaattggcccaggactttctggactcacagaacctcagtgcctacaacacccggctcttcaaagaggtcgatggagaagggaagccctactacgaggtgcggctggcttctgtgcttggctcagagccttccctggactctgaggtgacttccaagctgaagagctatgaattccggggaagccctttccaggtgacccggggggactacgcgcccatcctccagaaggtggtggagcagctggagaaagccaaggcctatgcagccaacagccaccaggggcagatgctggcccagtatatagagagcttcacccagggctccatcgaggcccacaagaggggctcccgcttctggatccaggacaaaggccccatcgtggagagttacatcgggttcatcgagagctaccgcgacccctttggttcccgaggagaatttgaaggtttcgtagctgtggtgaacaaggccatgagtgccaagtttgagcggctggtggcgagcgcagagcagctgctgaaggagctgccctggcccccaacctttgagaaggacaagttcctcacccctgacttcacctccctggatgttctcaccttcgctggctccggcatccctgccggcatcaacatccccaactacgatgatctgaggcagacggaaggctttaagaacgtgtcgctggggaatgtgctggctgtggcctacgccacgcagcgggagaagcttacctttctggaggaggatgacaaggacctgtacatcctctggaaggggccctccttcgatgtgcaggtgggcctgcacgagctgctgggccatggcagtggcaagctcttcgtacaggacgaaaaaggagcattcaactttgaccaggaaacagtgatcaacccagagacgggcgagcaggatctttggctttgagggggctgatgcggaggacgtgatctacgtgaactggctcaacatggttcgggccgggctgctcgctctggagttctacacacctgaggccttcaactggcgacaggcccatatgcaggcccggtttgtgatcctgagagtcttgctggaggctggcgagggactcgttaccatcactcccaccacaggctccgatgggcgcccagatgcccgggtccgcctcgaccgcagcaagatccggtctgtgggcaagcctgctctagagcgcttcctgcggagacttcaggtgctgaagtccacaggggatgtggccggagggcgggccctgtacgaggggtatgcaacggtcactgatgcgccccccgagtgcttcctcaccctcagggacacggtgctgctgcgtaaggaatctcggaagctcattgttcagcccaacactcgccttgaaggctcagacgtgcagcttctggaatacgaggcgtcagctgctggcctcatccgatccttctctgagcgtttcccagaggatggacccgagttggaggagatcctcacacagctggccacagccgatgcccgattctggaagggccccagtgaggccccatctggccaagcttgaggaagatgtgtggccttgcccccaattccatcagaccaaggctgcaagtggccctccattcgtgtgtgtatttaggggctggggagggggaggggcaggagcttggaccttggtactacctcagctgagggtggtgacacaaccccttccatttgtcagcactttccagcctgccaattgcttcccctctgtgatctcatttcatctgcactgccatacgtggagtgagcaagacagggcttaccatcctgtctaccagatgaggaaatggcagttctgagaagtcactggtctagatcccgcaggtggcacgtgacagctagggttcaaaacgttctcaccaaatccaatgctcctcacatattaattttataaccagacaaataaatattagagacaaccaccaaaaaaaaataatataaaaaaaa

SEQ ID NO: 282928 - DNA, 2700 bp, Homo sapiens
ccatggctggatcgaggccgggggttgaatcggcacgaggcgaacggagcagctgctgcagcagggcccatggcggacacccagtacatcctgcccaatgacatcggcgtgtctagcctggactgccgtgaggccttccgcctgctgtcacccacagagcgcctctatgcctaccacctgtcccgtgccgcctggtacggaggcctggctgtgctgcttcagacctcccctgaggccccctacatctatgctctgctcagccgcctcttccgcgcccaggaccccgaccagctgcgccaacatgccctggctgaaggccttaccgaggaggagtatcaggcgttcctggtctatgccgcgggtgtttactccaacatgggcaactacaagtcctttggtgacaccaagtttgttcccaacttgcccaaggaaaagctggaacgggtgatcctagggagtgaggctgctcagcagcacccagaagaagtcaggggcctctggcagacctgcggggagcttatgttctctctggagccaaggcttcgacacctcggactggggaaggagggaatcaccacctatttctctgggaattgtaccatggaagatgccaaattggcccaggactttctggactcacagaacctcagtgcctacaacacccggctcttcaaagaggtcgatggagaagggaagccctactacgaggtgcggctggcttctgtgcttggctcagagccttccctggactctgaggtgacttccaagctgaagagctatgaattccggggaagccctttccaggtgacccggggggactacgcgcccatcctccagaaggtggtggagcagctggagaaagccaaggcctatgcagccaacagccaccaggggcagatgctggcccagtatatagagagcttcacccagggctccatcgaggcccacaagaggggctcccgcttctggatccaggacaaaggccccatcgtggagagttacatcgggttcatcgagagctaccgcgacccctttggttcccgaggagaatttgaaggtttcgtagctgtggtgaacaaggccatgagtgccaagtttgagcggctggtggcgagcgcagagcagctgctgaaggagctgccctggcccccaacctttgagaaggacaagttcctcacccctgacttcacctccctggatgttctcaccttcgctggctccggcatccctgccggcatcaacatccccaactacgatgatctgaggcagacggaaggctttaagaacgtgtcgctggggaatgtgctggctgtggcctacgccacgcagcgggagaagcttacctttctggaggaggatgacaaggacctgtacatcctctggaaggggccctccttcgatgtgcaggtgggcctgcacgagctgctgggccatggcagtggcaagctcttcgtacaggacgaaaaaggagcattcaactttgaccaggaaacagtgatcaacccagagacgggcgagcagattcagagctggtatcggagcggggagacctgggatagcaagttcagcaccatcgcctccagctacgaagagtgccgggctgagagcgtgggtctctacctctgtctccacccgcaagtgctggagatctttggctttgagggggctgatgcggaggacgtgatctacgtgaactggctcaacatggttcgggccgggctgctcgctctggagttctacacacctgaggccttcaactggcgacaggcccatatgcaggcccggtttgtgatcctgagagtcttgctggaggctggcgagggactcgttaccatcactcccaccacaggctccgatgggcgcccagatgcccgggtccgcctcgaccgcagcaagatccggtctgtgggcaagcctgctctagagcgcttcctgcggagacttcaggtgctgaagtccacaggggatgtggccggagggcgggccctgtacgaggggtatgcaacggtcactgatgcgccccccgagtgcttcctcaccctcagggacacggtgctgctgcgtaaggaatctcggaagctcattgttcagcccaacactcgccttgaaggctcagacgtgcagcttctggaatacgaggcgtcagctgctggcctcatccgatccttctctgagcgtttcccagaggatggacccgagttggaggagatcctcacacagctggccacagccgatgcccgattctggaagggccccagtgaggccccatctggccaagcttgaggaagatgtgtggccttgcccccaattccatcagaccaaggctgcaagtggccctccattcgtgtgtgtatttaggggctggggagggggaggggcaggagcttggaccttggtactacctcagctgagggtggtgacacaaccccttccatttgtcagcactttccagcctgccaattgcttcccctctgtgatctcatttcatctgcactgccatacgtggagtgagcaagacagggcttaccatcctgtctaccagatgaggaaatggcagttctgagaagtcactggtctagatcccgcaggtggcacgtgacagctagggttcaaaacgttctcacccaaccgagtcactacagcgatgattgaagtgagtaaccaccccgaggatcggataaatatctatgaacagcagtt

SEQ ID NO: 282929 - DNA, 1808 bp, Homo sapiens
tgacccaggcccagggagaaggggcaggcggccaggggcctgagggagagacgggtttgtgcagctgcatctttcctgtccaggtcctgacccagtagggcccaggcctgggtcactgctatccccatcttccagcccagggtgactgcatacagtttcgtagctgtggtgaacaaggccatgagtgccaagtttgagcggctggtggcgagcgcagagcagctgctgaaggagctgccctggcccccaacctttgagaaggacaagttcctcacccctgacttcacctccctggatgttctcaccttcgctggctccggcatccctgccggcatcaacatccccaactacgatgatctgaggcagacggaaggctttaagaacgtgtcgctggggaatgtgctggctgtggcctacgccacgcagcgggagaagcttacctttctggaggaggatgacaaggacctgtacatcctctggaaggggccctccttcgatgtgcaggtgggcctgcacgagctgctgggccatggcagtggcaagctcttcgtacaggacgaaaaaggagcattcaactttgaccaggaaacagtgatcaacccagagacgggcgagcagattcagagctggtatcggagcggggagacctgggatagcaagttcagcaccatcgcctccagctacgaagagtgccgggctgagagcgtgggtctctacctctgtctccacccgcaagtgctggagatctttggctttgagggggctgatgcggaggacgtgatctacgtgaactggctcaacatggttcgggccgggctgctcgctctggagttctacacacctgaggccttcaactggcgacaggcccatatgcaggcccggtttgtgatcctgagagtcttgctggaggctggcgagggactcgttaccatcactcccaccacaggctccgatgggcgcccagatgcccgggtccgcctcgaccgcagcaagatccggtctgtgggcaagcctgctctagagcgcttcctgcggagacttcaggtgctgaagtccacaggggatgtggccggagggcgggccctgtacgaggggtatgcaacggtcactgatgcgccccccgagtgcttcctcaccctcagggacacggtgctgctgcgtaaggaatctcggaagctcattgttcagcccaacactcgccttgaaggctcagacgtgcagcttctggaatacgaggcgtcagctgctggcctcatccgatccttctctgagcgtttcccagaggatggacccgagttggaggagatcctcacacagctggccacagccgatgcccgattctggaagggccccagtgaggccccatctggccaagcttgaggaagatgtgtggccttgcccccaattccatcagaccaaggctgcaagtggccctccattcgtgtgtgtatttaggggctggggagggggaggggcaggagcttggaccttggtactacctcagctgagggtggtgacacaaccccttccatttgtcagcactttccagcctgccaattgcttcccctctgtgatctcatttcatctgcactgccatacgtggagtgagcaagacagggcttaccatcctgtctaccagatgaggaaatggcagttctgagaagtcactggtctagatcccgcaggtggcacgtgacagctagggttcaaaacgttctcaccaaatccaatgctcctcacatattaattttataaccagacaaataaatattagagacaaccaccaaaaaaaaataatataaaaaaaa

SEQ ID NO: 282930 - DNA, 1227 bp, Homo sapiens
tggcaccctaagcccgacagtggagctccttttccagattcagagctggtatcggagcggggagacctgggatagcaagttcagcaccatcgcctccagctacgaagagtgccgggctgagagcgtgggtctctacctctgtctccacccgcaagtgctggagatctttggctttgagggggctgatgcggaggacgtgatctacgtgaactggctcaacatggttcgggccgggctgctcgctctggagttctacacacctgaggccttcaactggcgacaggcccatatgcaggcccggtttgtgatcctgagagtcttgctggaggctggcgagggactcgttaccatcactcccaccacaggctccgatgggcgcccagatgcccgggtccgcctcgaccgcagcaagatccggtctgtgggcaagcctgctctagagcgcttcctgcggagacttcaggtgctgaagtccacaggggatgtggccggagggcgggccctgtacgaggggtatgcaacggtcactgatgcgccccccgagtgcttcctcaccctcagggacacggtgctgctgcgtaaggaatctcggaagctcattgttcagcccaacactcgccttgaaggctcagacgtgcagcttctggaatacgaggcgtcagctgctggcctcatccgatccttctctgagcgtttcccagaggatggacccgagttggaggagatcctcacacagctggccacagccgatgcccgattctggaagggccccagtgaggccccatctggccaagcttgaggaagatgtgtggccttgcccccaattccatcagaccaaggctgcaagtggccctccattcgtgtgtgtatttaggggctggggagggggaggggcaggagcttggaccttggtactacctcagctgagggtggtgacacaaccccttccatttgtcagcactttccagcctgccaattgcttcccctctgtgatctcatttcatctgcactgccatacgtggagtgagcaagacagggcttaccatcctgtctaccagatgaggaaatggcagttctgagaagtcactggtctagatcccgcaggtggcacgtgacagctagggttcaaaacgttctcaccaaatccaatgctcctcacatattaattttataaccagacaaataaatattagagacaaccaccaaaaaaaaataatataaaaaaaa

SEQ ID NO: 282931 - DNA, 1482 bp, Homo sapiens
ccatggctggatcgaggccgggggttgaatcggcacgaggcgaacggagcagctgctgcagcagggcccatggcggacacccagtacatcctgcccaatgacatcggcgtgtctagcctggactgccgtgaggccttccgcctgctgtcacccacagagcgcctctatgcctaccacctgtcccgtgccgcctggtacggaggcctggctgtgctgcttcagacctcccctgaggccccctacatctatgctctgctcagccgcctcttccgcgcccaggaccccgaccagctgcgccaacatgccctggctgaaggccttaccgaggaggagtatcaggcgttcctggtctatgccgcgggtgtttactccaacatgggcaactacaagtcctttggtgacaccaagtttgttcccaacttgcccaaggaaaagctggaacgggtgatcctagggagtgaggctgctcagcagcacccagaagaagtcaggggcctctggcagacctgcggggagcttatgttctctctggagccaaggcttcgacacctcggactggggaaggagggaatcaccacctatttctctgggaattgtaccatggaagatgccaaattggcccaggactttctggactcacagaacctcagtgcctacaacacccggctcttcaaagaggtcgatggagaagggaagccctactacgaggtgcggctggcttctgtgcttggctcagagccttccctggactctgaggtgacttccaagctgaagagctatgaattccggggaagccctttccaggtgacccggggggactacgcgcccatcctccagaaggtggtggagcagctggagaaagccaaggcctatgcagccaacagccaccaggggcagatgctggcccagtatatagagagcttcacccagggctccatcgaggcccacaagaggggctcccgcttctggatccaggacaaaggccccatcgtggagagttacatcgggttcatcgagagctaccgcgacccctttggttcccgaggagaatttgaaggtttcgtagctgtggtgaacaaggccatgagtgccaagtttgagcggctggtggcgagcgcagagcagctgctgaaggagctgccctggcccccaacctttgagaaggacaagttcctcagctgagggtggtgacacaaccccttccatttgtcagcactttccagcctgccaattgcttcccctctgtgatctcatttcatctgcactgccatacgtggagtgagcaagacagggcttaccatcctgtctaccagatgaggaaatggcagttctgagaagtcactggtctagatcccgcaggtggcacgtgacagctagggttcaaaacgttctcaccaaatccaatgctcctcacatattaattttataaccagacaaataaatattagagacaaccaccaaaaaaaaataatataaaaaaaa

SEQ ID NO: 282932 - DNA, 1364 bp, Homo sapiens
cttgtaataaacggggatatttatgctgtcggccggaagaccgggatcggagcagctgctgcagcagggcccatggcggacacccagtacatcctgcccaatgacatcggcgtgtctagcctggactgccgtgaggccttccgcctgctgtcacccacagagcgcctctatgcctaccacctgtcccgtgccgcctggtacggaggcctggctgtgctgcttcagacctcccctgaggccccctacatctatgctctgctcagccgcctcttccgcgcccaggaccccgaccagctgcgccaacatgccctggctgaaggccttaccgaggaggagtatcaggcgttcctggtctatgccgcgggtgtttactccaacatgggcaactacaagtcctttggtgacaccaagtttgttcccaacttgcccaaggaaaagctggaacgggtgatcctagggagtgaggctgctcagcagcacccagaagaagtcaggggcctctggcagacctgcggggagcttatgttctctctggagccaaggcttcgacacctcggactggggaaggagggaatcaccacctatttctctgggaattgtaccatggaagatgcccgggtccgcctcgaccgcagcaagatccggtctgtgggcaagcctgctctagagcgcttcctgcggagacttcaggtgctgaagtccacaggggatgtggccggagggcgggccctgtacgaggggtatgcaacggtcactgatgcgccccccgagtgcttcctcaccctcagggacacggtgctgctgcgtaaggaatctcggaagctcattgttcagcccaacactcgccttgaaggctcagacgtgcagcttctggaatacgaggcgtcagctgctggcctcatccgatccttctctgagcgtttcccagaggatggacccgagttggaggagatcctcacacagctggccacagccgatgcccgattctggaagggccccagtgaggccccatctggccaagcttgaggaagatgtgtggccttgcccccaattccatcagaccaaggctgcaagtggccctccattcgtgtgtagcactttccagcctgccaattgcttcccctctgtgatctcatttcatctgcactgccatacgtggagtgagcaagacagggcttaccatcctgtctaccagatgaggaaatggcagttctgagaagtcactggtctagatcccgcaggtggcacgtgacagctagggttcaaaacgttctcaccaaatccaatgctcctcacatattaattttataaccagacaaataaatattagagacaaccaccaaaaaaaaataatataaaaaaaa

SEQ ID NO: 282933 - DNA, 450 bp, Homo sapiens
gcatgtggcaggaactgaaaccgcagctggtacacctggaatttgttctgtttttcttccatacagaaggactcctggacgtcaattttctgcaacacctggaaccagacggacagagagaacttgacttgttcaggtcctaggtgactgcgcaatgtgagtgggttacgagacccaagggtttacagagatagcagctgaacctcctaggagtggcctcagcagagcggggaacaaactgaaaccacctcctgctatcccccacctgcctttgctgacacctgtaaagctgccaacccgcctctgcacatacctgcatcgtgttcacagttgaacctttggctcccgactgcaccatcatctgcaggctgttctctgggaactgtctgtgtaggccaaaaggcatgcatgcctgcagattaaatcagcacagtggtcagtgacttcacc

SEQ ID NO: 282934 - DNA, 3386 bp, Homo sapiens
agcaggctggtactggtctggggtttatggatcgccgcgtgcacagccggcgctcgttccagcggcctcgcgcgcgccgccgccctgcgctgctgaagctggcgtcgctgccgccctcgtgccacgcaccgccgcacgcgctggagcaggaggagacgccgctgtgacgccgccggcgggaagggtccgcgcgccatggctggccgctcgcgccctttcccaccgctgccgggaaaccgaggctcgccccaaacggatttgcgtgaaaccagcccaaggttccgggcccccccagccgagccccgcgcccggggactgactcggggaccgactcagggacctcccgagcgccaggactcagggcccgacctgcagcggctgcaggcccagcgcccgcaagcggcctgggccgagcgccgtttccaggccctcgccaggtctttgaactgcaggtaaagtggcaggaacgtcttccgtctgctcagcgtttggggatttagactcctaaagccagtacctgccccgtttcccccccaggttccgtcctgcccgcgcccggtctcagggtggcggccccggacacggcccgtccccacagacgaggtctccggcctgagctgtcgcacctggcgcggaggtcgcccggggtgccctggctgggtgagaggtggcctggcgggcggagcttgccaagaatcacggccagtccttaagtggatggtggggcccagcagctgctctgtcccccttaacaaaccagggggcatggaggggcccagggcaccgcccccctaccaggctcaggccctccaaggagaacctgctgagacccctgagcctgtcctagaccccggacccctgacccttcccaccccttccagcgtcccagggcgaggccttggacagagctcctggtcctctgcagggagaccatccagcccaagctctgggaggcacagtccattgagtgggcggaggccgcggggtgctgagccggggagggtgctcggagtccatccatccctcagacggcaagtcccacagggtccaacccacctgaaacctgcctgcacggtggaagtggtggaggtggacactcctaggggcttttctaaagctagactcgcagctccttgctcaggaaaattaaactattcacgtttcagatcaagtgttgacagtcaccagtcaggaggagttcttaaagagttttatgttgactgaatattgcacattgagtccccattgagtccctggtgggaaaagtccacaatttcccattgatagctttttactgttgtgaaaaagggaagcgtcagccacacaaaagcctgcatgaccgctgcttcggagaagctctcgaccctaactgcagtcactgttacttggatcagatcaagcgcagtgactttttgggattcagtggttattctccacacttcgtagccatttcaaccaactctgagcacaaaatgcagccatcctctatgcagcaagccctgcccagtcagtgaccctactggacagatccaaggccagccctggttccctgctgcagccaccgtcctgacgttcatcggagcaggccggggcctggccttcccggcacaagtggctgttctgacaggcccccagtttgtcccatctgaactgctgggaggtttccgggtggccagaggagcaaagctgccttccaagtgcctgtctgtgcctgggagaacagagcaggagcgtcgtgcggtccaccgcgcagtgcatggcgattccaggcgctgaacaactcccctggacccttgggcctgcatctgactcccagctgcagagtcagaagctgagtccaggcaactgcttggccactcccgatcgctcctccctggacacccggttaccaaagtcagcaaagaagatgcggtaatcgccgcctgatctccacatggtgaacacaacactcccaccaacacctccttgactggtcggtcttcagcaccgggggtgggcaggcaggtgttctgtgttgacgagaattgcacaggctaaacacaaacacggaaccagagtgagaacacctcactcacggcagcccaggctgctccctaccaggtgacggagcgcgccggggctgtgggtgccaggggctgagtgctagggactcgtcatgagtggggatccccacgttcctgtcactgctgtcaaacagaaggtaaacagtcttatgaatgtatttccttaggaaaacttgtaaaaacttttattaggatatctatttaatactgaactttggcctactttgtgatagactataaacaaattgaggaaatcactatttctcacttctgtattttctcaaaaataattttgttacagagttcaatatactgtgtaccattgatcttctattgtgaaagcaaagaatttcatcaaaatattttaaattatgagtgaaaattgtgtatgttaattttgcagctataatattaatcaaattttgtgtaattctaatcacaaaatgacgtgccttaagtgcccctccagctgtgggttggcagtgtccagacagggagggcccatcaccgaaatcctgaacgattactagaccaattctattaaaaacatttcaaggcattttgggtgcaaactttgtttataaaagagaaatatccacctatgagaatttaaggagacgtctcctgtaggcagacatcgctctgcccaaaaattagcactgacacatgcgtgtgtgtgcgcgttgtgtgcgtgtgtgcgtgcacgtgctgttgctgcccttcctagctggtgtgaggaagccactggacacagctgtggcgcgacccctggatctgagcacagcccctccggtgcagacagatggggtcagagccccctgcggaggcctgtcattgcaggcacccgtgaggaggatgtgaccagtgaccgtgggtcccagcggtgaccctcacacagaatcagagcaaaacaccagtgagggctgcacactcaccaccattcgccctgggcactcattccagaagtaacaagaattccctctcagtgggaaaataaatgcatttttcattcttataagggacactctaatgactgtgaacactacgaattctaattcatatgcatttactgagcacttactgtatgccaggtgcactcaagacctgctgctaagtgggaagctgggttcagaggcacatggaacagctcgcccgctggatgccctgggaagagctacctcttctgagcccctgatgcttgttaagagctgcttctacttctcagttacttctcaagttttgattctttcaagaagtcccatttgtgaatttttcacatcttgtgaggatgaaataaaagcaaaatgtcaactctgccatctc

SEQ ID NO: 282935 - DNA, 1531 bp, Homo sapiens
  misc_feature (18)..(18): n is a, c, g, or t
agatggtcaggctgtacnggtccgagtctttgggatagctccttgctcaggaaaattaaactattcacgtttcagatcaagtgttgacagtcaccagtcaggaggagttcttaaagagttttatgttgactgaatattgcacattgagtccccattgagtccctggtgggaaaagtccacaatttcccattgatagctttttactgttgtgaaaaagggaagcgtcagccacacaaaagcctgcatgaccgctgcttcggagaagctctcgaccctaactgcagtcactgttacttggatcagatcaagcgcagtgactttttgggattcagtggttattctccacacttcgtagccatttcaaccaactctgagcacaaaatgcagccatcctctatgcagcaagccctgcccagtcagtgaccctactggacagatccaaggccagccctggttccctgctgcagccaccgtcctgacgttcatcggagcaggccggggcctggccttcccggcacaagtggctgttctgacaggcccccagtttgtcccatctgaactgctgggaggtttccgggtggccagaggagcaaagctgccttccaagtgcctgtctgtgcctgggagaacagagcaggagcgtcgtgcggtccaccgcgcagtgcatggcgattccaggcgctgaacaactcccctggacccttgggcctgcatctgactcccagctgcagagtcagaagctgagtccaggcaactgcttggccactcccgatcgctcctccctggacacccggttaccaaagtcagcaaagaagatgcggtaatcgccgcctgatctccacatggtgaacacaacactcccaccaacacctccttgactggtcggtcttcagcaccgggggtgggcaggcaggtgttctgtgttgacgagaattgcacaggctaaacacaaacacggaaccagagtgagaacacctcactcacggcagcccaggctgctccctaccaggtgacggagcgcgccggggctgtgggtgccaggggctgagtgctagggactcgtcatgagtggggatccccacgttcctgtcactgctgtcaaacagaaggtaaacagtcttatgaatgtatttccttaggaaaacttgtaaaaacttttattaggatatctatttaatactgaactttggcctactttgtgatagactataaacaaattgaggaaatcactatttctcacttctgtattttctcaaaaataattttgttacagagttcaatatactgtgtaccattgatcttctattgtgaaagcaaagaatttcatcaaaatattttaaattatgagtgaaaattgtgtatgttaattttgcagctataatattaatcaaattttgtgtaattctaatcacaaaatgacgtgccttaagtgcccctccagctgtgggttggcagtgtccagacagggagggcccatcaccgaaatcctgaacgattactagaccaattctattaaaaacatttcaaggca

SEQ ID NO: 282936 - DNA, 2248 bp, Homo sapiens
agcaggctggtactggtctggggtttatggatcgccgcgtgcacagccggcgctcgttccagcggcctcgcgcgcgccgccgccctgcgctgctgaagctggcgtcgctgccgccctcgtgccacgcaccgccgcacgcgctggagcaggaggagacgccgctgtgacgccgccggcgggaagggtccgcgcgccatggctggccgctcgcgccctttcccaccgctgccgggaaaccgaggctcgccccaaacggatttgcgtgaaaccagcccaaggttccgggcccccccagccgagccccgcgcccggggactgactcggggaccgactcagggacctcccgagcgccaggactcagggcccgacctgcagcggctgcaggcccagcgcccgcaagcggcctgggccgagcgccgtttccaggccctcgccaggtctttgaactgcaggtaaagtggcaggaacgtcttccgtctgctcagcgtttggggatttagactcctaaagccagtacctgccccgtttcccccccaggttccgtcctgcccgcgcccggtctcagggtggcggccccggacacggcccgtccccacagacgaggtctccggcctgagctgtcgcacctggcgcggaggtcgcccggggtgccctggctgggtgagaggtggcctggcgggcggagcttgccaagaatcacggccagtccttaagtggatggtggggcccagcagctgctctgtcccccttaacaaaccagggggcatggaggggcccagggcaccgcccccctaccaggctcaggccctccaaggagaacctgctgagacccctgagcctgtcctagaccccggacccctgacccttcccaccccttccagcgtcccagggcgaggccttggacagagctcctggtcctctgcagggagaccatccagcccaagctctgggaggcacagtccattgagtgggcggaggccgcggggtgctgagccggggagggtgctcggagtccatccatccctcagacggcaagtcccacagggtccaacccacctgaaacctgcctgcacggtggaagtggtggaggtggacactcctaggggcttttctaaagctagactcgcagctccttgctcaggaaaattaaactattcacgtttcagatcaagtgttgacagtcaccagtcaggaggagttcttaaagagttttatgttgactgaatattgcacattgagtccccattgagtccctggtgggaaaagtccacaatttcccattgatagctttttactgttgtgaaaaagggaagcgtcagccacacaaaagcctgcatgaccgctgcttcggagaagctctcgaccctaactgcagtcactgttacttggatcagatcaagcgcagtgactttttgggattcagtggttattctccacacttcgtagccatttcaaccaactctgagcacaaaatgcagccatcctctatgcagcaagccctgcccagtcagtgaccctactggacagatccaaggccagccctggttccctgctgcagccaccgtcctgacgttcatcggagcaggccggggcctggccttcccggcacaagtggctgttctgacaggcccccagtttgtcccatctgaactgctgggaggtttccgggtggccagaggagcaaagctgccttccaagtgcctgtctgtgcctgggagaacagagcaggagcgtcgtgcggtccaccgcgcagtgcatggcgattccaggcgctgaacaactcccctggacccttgggcctgcatctgactcccagctgcagagtcagaagctgagtccaggcaactgcttggccactcccgatcgctcctccctggacacccggttaccaaagtcagcaaagaagatgcggtaatcgccgcctgatctccacatggtgaacacaacactcccaccaacacctccttgactggtcggtcttcagcaccgggggtgggcaggcaggttgtatgccaggtgcactcaagacctgctgctaagtgggaagctgggttcagaggcacatggaacagctcgcccgctggatgccctgggaagagctacctcttctgagcccctgatgcttgttaagagctgcttctacttctcagttacttctcaagttttgattctttcaagaagtcccatttgtgaatttttcacatcttgtgaggatgaaataaaagcaaaatgtcaactctgccatctc

SEQ ID NO: 282937 - DNA, 855 bp, Homo sapiens
agcaggctggtactggtctggggtttatggatcgccgcgtgcacagccggcgctcgttccagcggcctcgcgcgcgccgccgccctgcgctgctgaagctggcgtcgctgccgccctcgtgccacgcaccgccgcacgcgctggagcaggaggagacgccgctgtgacgccgccggcgggaagggtccgcgcgccatggctggccgctcgcgccctttcccaccgctgccgggaaaccgaggctcgccccaaacggatttgcgtgaaaccagcccaaggttccgggcccccccagccgagccccgcgcccggggactgactcggggaccgactcagggacctcccgagcgccaggactcagggcccgacctgcagcggctgcaggcccagcgcccgcaagcggcctgggccgagcgccgtttccaggccctcgccaggtctttgaactgcagaaagatttttcaacactgcttttataaatctttgttccggcccaaccagaggggagaccgtggagagctcaagaccccgtttttccacgtttaaccagcgagatgatgggacggaggtgacgcggctgcagccatggaggtggccccttggggaagtggcaggtgccctgagacaggggccgcaaaggctggcctggggcctggagccagcatggtggaggggggacgtgcgtgggtccccttccctggacctggtactggggactccctgtaatcacgtcctcggaaggtgtctggtccaagctgcacttgggccctcccgagtccaccatgagcacagaggaaacttcctaaactcgccccactgaggccactccacagcccaaatcttccccaccacaca

SEQ ID NO: 282938 - DNA, 2622 bp, Homo sapiens
agcaggctggtactggtctggggtttatggatcgccgcgtgcacagccggcgctcgttccagcggcctcgcgcgcgccgccgccctgcgctgctgaagctggcgtcgctgccgccctcgtgccacgcaccgccgcacgcgctggagcaggaggagacgccgctgtgacgccgccggcgggaagggtccgcgcgccatggctggccgctcgcgccctttcccaccgctgccgggaaaccgaggctcgccccaaacggatttgcgtgaaaccagcccaaggttccgggcccccccagccgagccccgcgcccggggactgactcggggaccgactcagggacctcccgagcgccaggactcagggcccgacctgcagcggctgcaggcccagcgcccgcaagcggcctgggccgagcgccgtttccaggccctcgccaggtctttgaactgcaggtaaagtggcaggaacgtcttccgtctgctcagcgtttggggatttagactcctaaagccagtacctgccccgtttcccccccaggttccgtcctgcccgcgcccggtctcagggtggcggccccggacacggcccgtccccacagacgaggtctccggcctgagctgtcgcacctggcgcggaggtcgcccggggtgccctggctgggtgagaggtggcctggcgggcggagcttgccaagaatcacggccagtccttaagtggatggtggggcccagcagctgctctgtcccccttaacaaaccagggggcatggaggggcccagggcaccgcccccctaccaggctcaggccctccaaggagaacctgctgagacccctgagcctgtcctagaccccggacccctgacccttcccaccccttccagcgtcccagggcgaggccttggacagagctcctggtcctctgcagggagaccatccagcccaagctctgggaggcacagtccattgagtgggcggaggccgcggggtgctgagccggggagggtgctcggagtccatccatccctcagacggcaagtcccacagggtccaacccacctgaaacctgcctgcacggtggaagtggtggaggtggacactcctaggggcttttctaaagctagactcgcagctccttgctcaggaaaattaaactattcacgtttcagatcaagtgttgacagtcaccagtcaggaggagttcttaaagagttttatgttgactgaatattgcacattgagtccccattgagtccctggtgggaaaagtccacaatttcccattgatagctttttactgttgtgaaaaagggaagcgtcagccacacaaaagcctgcatgaccgctgcttcggagaagctctcgaccctaactgcagtcactgttacttggatcagatcaagcgcagtgactttttgggattcagtggttattctccacacttcgtagccatttcaaccaactctgagcacaaaatgcagccatcctctatgcagcaagccctgcccagtcagtgaccctactggacagatccaaggccagccctggttccctgctgcagccaccgtcctgacgttcatcggagcaggccggggcctggccttcccggcacaagtggctgttctgacaggcccccagtttgtcccatctgaactgctgggaggtttccgggtggccagaggagcaaagctgccttccaagtgcctgtctgtgcctgggagaacagagcaggagcgtcgtgcggtccaccgcgcagtgcatggcgattccaggcgctgaacaactcccctggacccttgggcctgcatctgactcccagctgcagagtcagaagctgagtccaggcaactgcttggccactcccgatcgctcctccctggacacccggttaccaaagtcagcaaagaagatgcggtaatcgccgcctgatctccacatggtgaacacaacactcccaccaacacctccttgactggtcggtcttcagcaccgggggtgggcaggcaggtgttctgtgttgacgagaattgcacaggctaaacacaaacacggaaccagagtgagaacacctcactcacggcagcccaggctgctccctaccaggtgacggagcgcgccggggctgtgggtgccaggggctgagtgctagggactcgtcatgagtggggatccccacgttcctgtcactgctgtcaaacagaaggtaaacagtcttatgaatgtatttccttaggaaaacttgtaaaaacttttattaggatatctatttaatactgaactttggcctactttgtgatagactataaacaaattgaggaaatcactatttctcacttctgtattttctcaaaaataattttgttacagagttcaatatactgtgtaccattgatcttctattgtgaaagcaaagaatttcatcaaaatattttaaattatgagtgaaaattgtgtatgttaattttgcagctataatattaatcaaattttgtgtaattctaatcacaaaatgacgtgccttaagtgcccctccagctgtgggttggcagtgtccagacagggagggcccatcaccgaaatcctgaacgattactagaccaattctattaaaaacatttcaaggca

SEQ ID NO: 282939 - DNA, 1908 bp, Homo sapiens
agcaggctggtactggtctggggtttatggatcgccgcgtgcacagccggcgctcgttccagcggcctcgcgcgcgccgccgccctgcgctgctgaagctggcgtcgctgccgccctcgtgccacgcaccgccgcacgcgctggagcaggaggagacgccgctgtgacgccgccggcgggaagggtccgcgcgccatggctggccgctcgcgccctttcccaccgctgccgggaaaccgaggctcgccccaaacggatttgcgtgaaaccagcccaaggttccgggcccccccagccgagccccgcgcccggggactgactcggggaccgactcagggacctcccgagcgccaggactcagggcccgacctgcagcggctgcaggcccagcgcccgcaagcggcctgggccgagcgccgtttccaggccctcgccaggtctttgaactgcagatcaagtgttgacagtcaccagtcaggaggagttcttaaagagttttatgttgactgaatattgcacattgagtccccattgagtccctggtgggaaaagtccacaatttcccattgatagctttttactgttgtgaaaaagggaagcgtcagccacacaaaagcctgcatgaccgctgcttcggagaagctctcgaccctaactgcagtcactgttacttggatcagatcaagcgcagtgactttttgggattcagtggttattctccacacttcgtagccatttcaaccaactctgagcacaaaatgcagccatcctctatgcagcaagccctgcccagtcagtgaccctactggacagatccaaggccagccctggttccctgctgcagccaccgtcctgacgttcatcggagcaggccggggcctggccttcccggcacaagtggctgttctgacaggcccccagtttgtcccatctgaactgctgggaggtttccgggtggccagaggagcaaagctgccttccaagtgcctgtctgtgcctgggagaacagagcaggagcgtcgtgcggtccaccgcgcagtgcatggcgattccaggcgctgaacaactcccctggacccttgggcctgcatctgactcccagctgcagagtcagaagctgagtccaggcaactgcttggccactcccgatcgctcctccctggacacccggttaccaaagtcagcaaagaagatgcggtaatcgccgcctgatctccacatggtgaacacaacactcccaccaacacctccttgactggtcggtcttcagcaccgggggtgggcaggcaggtgttctgtgttgacgagaattgcacaggctaaacacaaacacggaaccagagtgagaacacctcactcacggcagcccaggctgctccctaccaggtgacggagcgcgccggggctgtgggtgccaggggctgagtgctagggactcgtcatgagtggggatccccacgttcctgtcactgctgtcaaacagaaggtaaacagtcttatgaatgtatttccttaggaaaacttgtaaaaacttttattaggatatctatttaatactgaactttggcctactttgtgatagactataaacaaattgaggaaatcactatttctcacttctgtattttctcaaaaataattttgttacagagttcaatatactgtgtaccattgatcttctattgtgaaagcaaagaatttcatcaaaatattttaaattatgagtgaaaattgtgtatgttaattttgcagctataatattaatcaaattttgtgtaattctaatcacaaaatgacgtgccttaagtgcccctccagctgtgggttggcagtgtccagacagggagggcccatcaccgaaatcctgaacgattactagaccaattctattaaaaacatttcaaggca

SEQ ID NO: 282940 - DNA, 1153 bp, Homo sapiens
agcaggctggtactggtctggggtttatggatcgccgcgtgcacagccggcgctcgttccagcggcctcgcgcgcgccgccgccctgcgctgctgaagctggcgtcgctgccgccctcgtgccacgcaccgccgcacgcgctggagcaggaggagacgccgctgtgacgccgccggcgggaagggtccgcgcgccatggctggccgctcgcgccctttcccaccgctgccgggaaaccgaggctcgccccaaacggatttgcgtgaaaccagcccaaggttccgggcccccccagccgagccccgcgcccggggactgactcggggaccgactcagggacctcccgagcgccaggactcagggcccgacctgcagcggctgcaggcccagcgcccgcaagcggcctgggccgagcgccgtttccaggccctcgccaggtctttgaactgcaggtaaagtggcaggaacgtcttccgtctgctcagcgtttggggatttagactcctaaagccagtacctgccccgtttcccccccaggttctgtgttgacgagaattgcacaggctaaacacaaacacggaaccagagtgagaacacctcactcacggcagcccaggctgctccctaccaggtgacggagcgcgccggggctgtgggtgccaggggctgagtgctagggactcgtcatgagtggggatccccacgttcctgtcactgctgtcaaacagaaggtaaacagtcttatgaatgtatttccttaggaaaacttgtaaaaacttttattaggatatctatttaatactgaactttggcctactttgtgatagactataaacaaattgaggaaatcactatttctcacttctgtattttctcaaaaataattttgttacagagttcaatatactgtgtaccattgatcttctattgtgaaagcaaagaatttcatcaaaatattttaaattatgagtgaaaattgtgtatgttaattttgcagctataatattaatcaaattttgtgtaattctaatcacaaaatgacgtgccttaagtgcccctccagctgtgggttggcagtgtccagacagggagggcccatcaccgaaatcctgaacgattactagaccaattctattaaaaacatttcaaggca

SEQ ID NO: 282941 - DNA, 1308 bp, Homo sapiens
cggccgccggcagggttcgcgaggcacccacgctcctaaaaagagcacgacgcacccgatgctcggattggatgaagtgcaaagctttaatccctggaaaggccacgaacaatgaatccatttcatgcatcttgttggaacacctctgccgaacttttaaacaaatcctggaataaagagtttgcttatcaaactgccagtgtggtagatacagtcatcctcccttccatgattgggattatctgttcaacagggctggttggcaacatcctcattgtattcactataataagatccaggaaaaaaacagtccctgacatctatatctgcaacctggctgtggctgatttggtccacatagttggaatgccttttcttattcaccaatgggcccgagggggagagtgggtgtttggggggcctctctgcaccatcatcacatccctggatacttgtaaccaatttgcctgtagtgccatcatgactgtaatgagtgtggacaggtactttgccctcgtccaaccatttcgactgacacgttggagaacaaggtacaagaccatccggatcaatttgggcctttgggcagcttcctttatcctggcattgcctgtctgggtctactcgaaggtcatcaaatttaaagacggtgttgagagttgtgcttttgatttgacatcccctgacgatgtactctggtatacactttatttgacgataacaactttttttttccctctacccttgattttggtgtgctatattttaattttatgctatacttgggagatgtatcaacagaataaggatgccagatgctgcaatcccagtgtaccaaaacagagagtgatgaagttgacaaagatggtgctggtgctggtggtagtctttatcctgagtgctgccccttatcatgtgatacaactggtgaacttacagatggaacagcccacactggccttctatgtgggttattacctctccatctgtctcagctatgccagcagcagcattaacccttttctctacatcctgctgagtggaaatttccagaaacgtctgcctcaaatccaaagaagagcgactgagaaggaaatcaacaatatgggaaacactctgaaatcacacttttaggaaagtacatggatcaccatgagtctagacatgattgtctatcttactggtattattagaaagggcaggtgtaccgatatgtttatgcccattcttcttgtgtacttgtgactcttagcagcatggaagagaagtgtaaccatgcaaatacaatgagcttaatatgctaactgt

SEQ ID NO: 282942 - DNA, 810 bp, Homo sapiens
cgcccgggctgtccgccgcgcggggaggacgcgagcacccagctttaatccctggaaaggccacgaacaatgaatccatttcatgcatcttgttggaacacctctgccgaacttttaaacaaatcctggaataaagagtttgcttatcaaactgccagtgtggtagatacagtcatcctcccttccatgattgggattatctgttcaacagggctggttggcaacatcctcattgtattcactataataagatccaggaaaaaaacagtccctgacatctatatctgcaacctggctgtggctgatttggtccacatagttggaatgccttttcttattcaccaatgggcccgagggggagagtgggtgtttggggggcctctctgcaccatcatcacatccctggatacttgtaaccaatttgcctgtagtgccatcatgactgtaatgagtgtggacaggtactttgccctcgtccaaccatttcgactgacacgttggagaacaaggtacaagaccatccggatcaatttgggcctttgggcagcttcctttatcctggcattgcctgtctgggtctactcgaaggtcatcaaatttaaagacggtgttgagagttgtgcttttgatttgacatcccctgacgatgtactctggtaagttgtgaaaacttaagaaaaacgagttgaattaagttgtgaagaacttcattctccttgtcaacatgtgagcagcctcaaagagtatccttatggatcctcttctcgccagtatctccattaggtttctccacacatacaatcaaggtga

SEQ ID NO: 282943 - DNA, 730 bp, Homo sapiens
actagtacgaggctggtgttaatcggccgtgcgggttccgcggcggctatgtggaggtggtgaacatggacgctgcagtgcagcagcagatgctgaagctgatgagtgtgcggctgtgcccgccggtgccaggacaggccctgctggacctggtggtcagcccgcccgcgcccaccgacccctcctttgcgcagttccaggctgagaagcaggcagtgctggcagagctggcggccaaggccaagctcaccgagcaggtcttcaatgaggctcctggcatcagctgcaacccagtgcagggcgccatgtactccttcccgcgcgtgcagctgcccccgcgggcggtggagcgcgctcaggagctgggcctggcccccgatatgttcttctgcctgcgcctcctggaggagaccggcatctgcgtggtgccagggagcggctttgggcagcgggaaggcacctaccacttccggatgaccattctgccccccttggagaaactgcggctgctgctggagaagctgagcaggttccatgccaagttcaccctcgagtactcctgagcaccccagctggggccaggctgggtcgccctggactgtgtgctcaggagccctgggaggctctggagcccactgtacttgctcttgatgcctggcggggtggggtggggggggtgctgggcccctgcctctctgcaggtccctaataaagctgtgtggcagtctga

SEQ ID NO: 282944 - DNA, 1814 bp, Homo sapiens
gggctgccacttggactcccttgccagggggcgggcaggggctggctctgcctggggccaggcccatgttaacctgtgccccggcctgggggccagaggggcaggcctgcgcacggggaggctgttgtggcagcggaacagagacgtgcacgagtcatggcctcgagcacaggtgaccggagccaggcggtgaggcatggactgagggcgaaggtgctgacgctggacggcatgaacccgcgtgtgcggagagtggagtacgcagtgcgtggccccatagtgcagcgagccttggagctggagcaggagctgcgccagggtgtgaagaagcctttcaccgaggtcatccgtgccaacatcggggacgcacaggctatggggcagaggcccatcaccttcctgcgccaggtcttggccctctgtgttaaccctgatcttctgagcagccccaacttccctgacgatgccaagaaaagggcggagcgcatcttgcaggcgtgtgggggccacagtctgggggcctacagcgtcagctccggcatccagctgatccgggaggacgtggcgcggtacattgagaggcgtgacggaggcatccctgcggaccccaacaacgtcttcctgtccacaggggccagcgatgccatcgtgacggtgctgaagctgctggtggccggcgagggccacacacgcacgggtgtgctcatccccatcccccagtacccactctactcggccacgctggcagagctgggcgcagtgcaggtggattactacctggacgaggagcgtgcctgggcgctggacgtggccgagcttcaccgtgcactgggccaggcgcgtgaccactgccgccctcgtgcgctctgtgtcatcaaccctggcaaccccaccgggcaggtgcagacccgcgagtgcatcgaggccgtgatccgcttcgccttcgaagagcggctctttctgctggcggacgaggtgtaccaggacaacgtgtacgccgcgggttcgcagttccactcattcaagaaggtgctcatggagatggggccgccctacgccgggcagcaggagcttgcctccttccactccacctccaagggctacatgggcgagtgcgggttccgcggcggctatgtggaggtggtgaacatggacgctgcagtgcagcagcagatgctgaagctgatgagtgtgcggctgtgcccgccggtgccaggacaggccctgctggacctggtggtcagcccgcccgcgcccaccgacccctcctttgcgcagttccaggctgagaagcaggcagtgctggcagagctggcggccaaggccaagctcaccgagcaggtcttcaatgaggctcctggcatcagctgcaacccagtgcagggcgccatgtactccttcccgcgcgtgcagctgcccccgcgggcggtggagcgcgctcaggagctgggcctggcccccgatatgttcttctgcctgcgcctcctggaggagaccggcatctgcgtggtgccagggagcggctttgggcagcgggaaggcacctaccacttccggatgaccattctgccccccttggagaaactgcggctgctgctggagaagctgagcaggttccatgccaagttcaccctcgagtactcctgagcaccccagctggggccaggctgggtcgccctggactgtgtgctcaggagccctgggaggctctggagcccactgtacttgctcttgatgcctggcggggtggggtggggggggtgctgggcccctgcctctctgcaggtccctaataaagctgtgtggcagtctga

SEQ ID NO: 282945 - DNA, 2060 bp, Homo sapiens
  misc_feature (5)..(5): n is a, c, g, or t
ccccncctcacccactgcctctgcctccctggggcagagctgttcccagacgggtggggcggggcccaactgtcccagctccttcagccctttctgtccctcccagtgaggccagctgcggtgaagagggtgctctcttgcctggagttccctctgctacggctgccccctcccagccctggcccactaagccagacccagctgtcgccattcccacttctggtcctgccacctcctgagctgccttcccgcctggtctgggtagagtcatggcctcgagcacaggtgaccggagccaggcggtgaggcatggactgagggcgaaggtgctgacgctggacggcatgaacccgcgtgtgcggagagtggagtacgcagtgcgtggccccatagtgcagcgagccttggagctggagcaggagctgcgccagggtgtgaagaagcctttcaccgaggtcatccgtgccaacatcggggacgcacaggctatggggcagaggcccatcaccttcctgcgccaggtcttggccctctgtgttaaccctgatcttctgagcagccccaacttccctgacgatgccaagaaaagggcggagcgcatcttgcaggcgtgtgggggccacagtctgggggcctacagcgtcagctccggcatccagctgatccgggaggacgtggcgcggtacattgagaggcgtgacggaggcatccctgcggaccccaacaacgtcttcctgtccacaggggccagcgatgccatcgtgacggtgctgaagctgctggtggccggcgagggccacacacgcacgggtgtgctcatccccatcccccagtacccactctactcggccacgctggcagagctgggcgcagtgcaggtggattactacctggacgaggagcgtgcctgggcgctggacgtggccgagcttcaccgtgcactgggccaggcgcgtgaccactgccgccctcgtgcgctctgtgtcatcaaccctggcaaccccaccgggcaggtgcagacccgcgagtgcatcgaggccgtgatccgcttcgccttcgaagagcggctctttctgctggcggacgaggtgcgcggcgcgggggagcgggaagccgggcaacagtccgcccccgtgacgccttgcgcccttccaggtgtaccaggacaacgtgtacgccgcgggttcgcagttccactcattcaagaaggtgctcatggagatggggccgccctacgccgggcagcaggagcttgcctccttccactccacctccaagggctacatgggcgagtgcgggttccgcggcggctatgtggaggtggtgaacatggacgctgcagtgcagcagcagatgctgaagctgatgagtgtgcggctgtgcccgccggtgccaggacaggccctgctggacctggtggtcagcccgcccgcgcccaccgacccctcctttgcgcagttccaggctgagaagcaggcagtgctggcagagctggcggccaaggccaagctcaccgagcaggtcttcaatgaggctcctggcatcagctgcaacccagtgcagggcgccatgtactccttcccgcgcgtgcagctgcccccgcgggcggtggagcgcgctcaggagctgggcctggcccccgatatgttcttctgcctgcgcctcctggaggagaccggcatctgcgtggtgccagggagcggctttgggcagcgggaaggcacctaccacttccggtgaggcctggccctcactccctgtcccgccaccctggcccttcactcactgtcaactcctttcaggatgaccattctgccccccttggagaaactgcggctgctgctggagaagctgagcaggttccatgccaagttcaccctcgagtactcctgagcaccccagctggggccaggctgggtcgccctggactgtgtgctcaggagccctgggaggctctggagcccactgtacttgctcttgatgcctggcggggtggggtggggggggtgctgggcccctgcctctctgcaggtccctaataaagctgtgtggcagtctga

SEQ ID NO: 282946 - DNA, 1927 bp, Homo sapiens
  misc_feature (5)..(5): n is a, c, g, or t
ccccncctcacccactgcctctgcctccctggggcagagctgttcccagacgggtggggcggggcccaactgtcccagctccttcagccctttctgtccctcccagtgaggccagctgcggtgaagagggtgctctcttgcctggagttccctctgctacggctgccccctcccagccctggcccactaagccagacccagctgtcgccattcccacttctggtcctgccacctcctgagctgccttcccgcctggtctgggtagagtcatggcctcgagcacaggtgaccggagccaggcggtgaggcatggactgagggcgaaggtgctgacgctggacggcatgaacccgcgtgtgcggagagtggagtacgcagtgcgtggccccatagtgcagcgagccttggagctggagcaggagctgcgccagggtgtgaagaagcctttcaccgaggtcatccgtgccaacatcggggacgcacaggctatggggcagaggcccatcaccttcctgcgccaggtcttggccctctgtgttaaccctgatcttctgagcagccccaacttccctgacgatgccaagaaaagggcggagcgcatcttgcaggcgtgtgggggccacagtctgggggcctacagcgtcagctccggcatccagctgatccgggaggacgtggcgcggtacattgagaggcgtgacggaggcatccctgcggaccccaacaacgtcttcctgtccacaggggccagcgatgccatcgtgacggtgctgaagctgctggtggccggcgagggccacacacgcacgggtgtgctcatccccatcccccagtacccactctactcggccacgctggcagagctgggcgcagtgcaggtggattactacctggacgaggagcgtgcctgggcgctggacgtggccgagcttcaccgtgcactgggccaggcgcgtgaccactgccgccctcgtgcgctctgtgtcatcaaccctggcaaccccaccgggcaggtgcagacccgcgagtgcatcgaggccgtgatccgcttcgccttcgaagagcggctctttctgctggcggacgaggtgtaccaggacaacgtgtacgccgcgggttcgcagttccactcattcaagaaggtgctcatggagatggggccgccctacgccgggcagcaggagcttgcctccttccactccacctccaagggctacatgggcgagtgcgggttccgcggcggctatgtggaggtggtgaacatggacgctgcagtgcagcagcagatgctgaagctgatgagtgtgcggctgtgcccgccggtgccaggacaggccctgctggacctggtggtcagcccgcccgcgcccaccgacccctcctttgcgcagttccaggctgagaagcaggcagtgctggcagagctggcggccaaggccaagctcaccgagcaggtcttcaatgaggctcctggcatcagctgcaacccagtgcagggcgccatgtactccttcccgcgcgtgcagctgcccccgcgggcggtggagcgcgctcaggagctgggcctggcccccgatatgttcttctgcctgcgcctcctggaggagaccggcatctgcgtggtgccagggagcggctttgggcagcgggaaggcacctaccacttccggatgaccattctgccccccttggagaaactgcggctgctgctggagaagctgagcaggttccatgccaagttcaccctcgagtactcctgagcaccccagctggggccaggctgggtcgccctggactgtgtgctcaggagccctgggaggctctggagcccactgtacttgctcttgatgcctggcggggtggggtggggggggtgctgggcccctgcctctctgcaggtccctaataaagctgtgtggcagtctga

SEQ ID NO: 282947 - DNA, 1821 bp, Homo sapiens
tgtacgcgcggaattatgggatggtgctctcttgcctggagttccctctgctacggctgccccctcccagccctggcccactaagccagacccagctgtcgccattcccacttctggtcctgccacctcctgagctgccttcccgcctggtctgggtagagtcatggcctcgagcacaggtgaccggagccaggcggtgaggcatggactgagggcgaaggtgctgacgctggacggcatgaacccgcgtgtgcggagagtggagtacgcagtgcgtggccccatagtgcagcgagccttggagctggagcaggagctgcgccagggtgtgaagaagcctttcaccgaggtcatccgtgccaacatcggggacgcacaggctatggggcagaggcccatcaccttcctgcgccaggtcttggccctctgtgttaaccctgatcttctgagcagccccaacttccctgacgatgccaagaaaagggcggagcgcatcttgcaggcgtgtgggggccacagtctgggggcctacagcgtcagctccggcatccagctgatccgggaggacgtggcgcggtacattgagaggcgtgacggaggcatccctgcggaccccaacaacgtcttcctgtccacaggggccagcgatgccatcgtgacggtgctgaagctgctggtggccggcgagggccacacacgcacgggtgtgctcatccccatcccccagtacccactctactcggccacgctggcagagctgggcgcagtgcaggtggattactacctggacgaggagcgtgcctgggcgctggacgtggccgagcttcaccgtgcactgggccaggcgcgtgaccactgccgccctcgtgcgctctgtgtcatcaaccctggcaaccccaccgggcaggtgcagacccgcgagtgcatcgaggccgtgatccgcttcgccttcgaagagcggctctttctgctggcggacgaggtgtaccaggacaacgtgtacgccgcgggttcgcagttccactcattcaagaaggtgctcatggagatggggccgccctacgccgggcagcaggagcttgcctccttccactccacctccaagggctacatgggcgagtgcgggttccgcggcggctatgtggaggtggtgaacatggacgctgcagtgcagcagcagatgctgaagctgatgagtgtgcggctgtgcccgccggtgccaggacaggccctgctggacctggtggtcagcccgcccgcgcccaccgacccctcctttgcgcagttccaggctgagaagcaggcagtgctggcagagctggcggccaaggccaagctcaccgagcaggtcttcaatgaggctcctggcatcagctgcaacccagtgcagggcgccatgtactccttcccgcgcgtgcagctgcccccgcgggcggtggagcgcgctcaggagctgggcctggcccccgatatgttcttctgcctgcgcctcctggaggagaccggcatctgcgtggtgccagggagcggctttgggcagcgggaaggcacctaccacttccggatgaccattctgccccccttggagaaactgcggctgctgctggagaagctgagcaggttccatgccaagttcaccctcgagtactcctgagcaccccagctggggccaggctgggtcgccctggactgtgtgctcaggagccctgggaggctctggagcccactgtacttgctcttgatgcctggcggggtggggtggggggggtgctgggcccctgcctctctgcaggtccctaataaagctgtgtggcagtctga

SEQ ID NO: 282948 - DNA, 1403 bp, Homo sapiens
cttcacctgtacttcccatcctgtcctgcccgagtccaggggcctacagcgtcagctccggcatccagctgatccgggaggacgtggcgcggtacattgagaggcgtgacggaggcatccctgcggaccccaacaacgtcttcctgtccacaggggccagcgatgccatcgtgacggtgctgaagctgctggtggccggcgagggccacacacgcacgggtgtgctcatccccatcccccagtacccactctactcggccacgctggcagagctgggcgcagtgcaggtggattactacctggacgaggagcgtgcctgggcgctggacgtggccgagcttcaccgtgcactgggccaggcgcgtgaccactgccgccctcgtgcgctctgtgtcatcaaccctggcaaccccaccgggcaggtgcagacccgcgagtgcatcgaggccgtgatccgcttcgccttcgaagagcggctctttctgctggcggacgaggtgcgcggcgcgggggagcgggaagccgggcaacagtccgcccccgtgacgccttgcgcccttccaggtgtaccaggacaacgtgtacgccgcgggttcgcagttccactcattcaagaaggtgctcatggagatggggccgccctacgccgggcagcaggagcttgcctccttccactccacctccaagggctacatgggcgagtgcgggttccgcggcggctatgtggaggtggtgaacatggacgctgcagtgcagcagcagatgctgaagctgatgagtgtgcggctgtgcccgccggtgccaggacaggccctgctggacctggtggtcagcccgcccgcgcccaccgacccctcctttgcgcagttccaggctgagaagcaggcagtgctggcagagctggcggccaaggccaagctcaccgagcaggtcttcaatgaggctcctggcatcagctgcaacccagtgcagggcgccatgtactccttcccgcgcgtgcagctgcccccgcgggcggtggagcgcgctcaggagctgggcctggcccccgatatgttcttctgcctgcgcctcctggaggagaccggcatctgcgtggtgccagggagcggctttgggcagcgggaaggcacctaccacttccggatgaccattctgccccccttggagaaactgcggctgctgctggagaagctgagcaggttccatgccaagttcaccctcgagtactcctgagcaccccagctggggccaggctgggtcgccctggactgtgtgctcaggagccctgggaggctctggagcccactgtacttgctcttgatgcctggcggggtggggtggggggggtgctgggcccctgcctctctgcaggtccctaataaagctgtgtggcagtctga

SEQ ID NO: 282949 - DNA, 466 bp, Homo sapiens
atccctctctgacggctctccgtccacaggagctgggcctggcccccgatatgttcttctgcctgcgcctcctggaggagaccggcatctgcgtggtgccagggagcggctttgggcagcgggaaggcacctaccacttccggtgaggcctggccctcactccctgtcccgccaccctggcccttcactcactgtcaactcctttcaggatgaccattctgccccccttggagaaactgcggctgctgctggagaagctgagcaggttccatgccaagttcaccctcgagtactcctgagcaccccagctggggccaggctgggtcgccctggactgtgtgctcaggagccctgggaggctctggagcccactgtacttgctcttgatgcctggcggggtggggtggggggggtgctgggcccctgcctctctgcaggtccctaataaagctgtgtggcagtctga

SEQ ID NO: 282950 - DNA, 884 bp, Homo sapiens
caggcggctagcggggagagaggggaaagtctggggcccactgtcccaaggcagggagctgactctaggcataaggaggaaaagccccagatggaaggggtggaagggggctatgctgcacagaggaccgagggtggtcgctcacccaggcaggtagctctcgatgactcatatagagagttttcgcagtgagctgctcctcgtcgtccagtagctgcctcgctgctcgaaggctccgttctttctcgtcgcggacccggcgccagcccaggtagagggcgaggccgaagagcacgaaacccacgctgagtcccactgccccggccaaatacacagggtatttttttcttctaaaaccagtgctggaacctgtgctgtgcagaagagaggacaagacgagggatgttcccaaattcccataagaggacacagcccctcagtcagtccttcctctctgctggcttcagtctgcactcctctgcaagcccccactgtgaggcttgaagatggacaagaggaccctcataaaagggaggtgacggaacttgcacttggctcctctctgacagtcacccttgagaaagtcacggcagatagggacctcctccttgccatttggtaggtcagccggtgaaaggccaaggccagctgctactttctgcctcagccgtgggggaagctctcctgtcttcttatagccatcctcatcctccttggagccatggatgaaacggcaatttgggcggctacactccttgttctggaagtcatggcagaagatgaactcgtttttgctcacccccaagttggacacctcgctcatgtctgggtggcgatatcggcaacgcttgcctcgcttgcacacattcctcaagaagtctcta

SEQ ID NO: 282951 - DNA, 345 bp, Homo sapiens
cgtaagacatgcctttcaccttccgccatgattgtgaagcctccccagccacgcggacctgtgagtccatcgaacctatttttctttataaattacccagtctcaggtacatgccttcagctgaacgagaccttgagcagcatgaagacataattccttctggatgttgtgccgaatttcatgttgagcagagtattcaaagtactatggaaggaatagcactgttactgacaaaagcaacccatgtgctcagttgcaaaataaataaataaatcagcaactcgttaaataataaagtcatttctatttcaacaaaataatacaataaaaatagttattagaaac

SEQ ID NO: 282952 - DNA, 3820 bp, Homo sapiens
  misc_feature (1336)..(1336): n is a, c, g, or t
  misc_feature (1452)..(1452): n is a, c, g, or t
  misc_feature (1549)..(1549): n is a, c, g, or t
  misc_feature (1604)..(1604): n is a, c, g, or t
  misc_feature (2350)..(2350): n is a, c, g, or t
  misc_feature (2379)..(2379): n is a, c, g, or t
  misc_feature (2383)..(2383): n is a, c, g, or t
  misc_feature (2389)..(2389): n is a, c, g, or t
  misc_feature (2421)..(2421): n is a, c, g, or t
  misc_feature (2424)..(2424): n is a, c, g, or t
agtcaccgatgctggaagggtttctttggccctgagtgaagagagacccagagggaacactgaggtgcctgcccaaccactctgtcccggtttccttcagcaggaccagccatgctggtcgttcagatgcctttctcctttcccatggcccacttcatcctctttgtctttacggtttccactatatttcacgttcagcagcggctagcgaagattcaagccatgtgggagttaccggtgcagataccagtgctagcctcaacatcaaaggcactgggacccagccagctcagggggatgtggacgatcaatgcaataggccgcctggggaaccagatgggcgagtacgccacactgtacgccctggccaagatgaacgggcggcccgccttcatcccggcccagatgcacagcaccctggcccccatcttcagaatcaccctgccggtgctgcacagcgccacggccagcaggatcccctggcagaactaccacctgaacgactggatggaggaggaataccgccacatcccgggggagtacgtccgcttcaccggctacccctgctcctggaccttctaccaccacctccgccaggagatcctccaggagttcaccctgcacgaccacgtgcgggaggaggcccagaagttcctgcggggcctgcaggtgaacgggagccggccgggcacctttgtaggggtccatgttcgccgaggggactatgtccatgtcatgccaaaagtgtggaagggggtggtggccgaccggcgatacctacagcaggccctggactggttccgagctcgctacagctccctcatcttcgtggtcaccagtaatggcatggcctggtgtcgggagaacattgacacctcccacggtgatgtggtgtttgctggcgatggcattgagggctcacctgccaaagattttgctctactcacacagtgtaaccacaccatcatgaccattgggacgttcgggatctgggccgcatacctcacgggcggagacaccatctacctggccaattacaccctccccgactcccctttcctcaaaatctttaagccagaggcagccttcctgccggagtggacagggattgccgcagacctgtcccccttactcaagcactaatgctggcccattctttgagaccttttctccttctctgcctccctcaagatgagtgcccgggcatgagaagcacatggttccatgagcaggacccatctctcttctgtgaagatgcgttgggctgcaagtaacagaaatctcagtgaacagtggcctggcgtggtggctcatgcctgtaatgctcgcactttgngaggccagggtgggtggatcacttgaggtcaggagttcaagactagcctggccaacatggtgaaaccccatctcgactaaaaatacaaaaattagccaggcgtggtggtgcacacntgtaatcccagctactcgggaggctgaggcaagagaatcacttgaacccaggaggcggaggttgcagtgagccaagatggtgccgctgcactccagnctgggtgacacagcaagactccatctcaaaaaaaaaaaaagaaaaagaaatgaangggttcaaagaccataatcatgcatatcacataagaccagaagtggcccaggtccagggtcagttaatttagcggctccacaaagtcatcagtcacctgagctccatccatcttcacatgctgtgctaccatttcttagctgtatcatcccatggtcccaaaagggctgctacacatccagccatcacatgcagataattcctttcaaaaacagcagaaagaggctcgttcttgtcttggtcccttttgaagaatgaatgaaaccttcctaagccttccagcaatttccccccaactccgatgggtaggaattgtcacatacccatgtgacccgataggaggcaaaagaaatgagacttctgggattagtttagcctcagattctgcagctgagaagttgatcagccacctctgaaggacatgcagcttgcagaaaattagggtggtgttaccaaggtgaaaaggggaaatggctttagagtagacaacagagatgccctgaggggttgtgtaggttgttcactgcaggaagtcccctggttaagaaggcaagtggggtttaaacagacccacagtctactcatcaaaccaggtgtccttggcattgtgtccacccagagagctcactgttttcttttctttttcttttctttttttttttttgagatggagtcttgctgcatcccccaggctggagtgcagtggcatgatcttggctcactgcagcctccgcctcccaggttcangcgattctcctgcctcagcctcccgagtngctnggattncaggtgcgtgccaccacgcccagctaattttntangtttagtggaaatggagtttcaccatgttggtcaggctggtctcaaactcctgacctcatgatccgccttcctcggcctcccaaagtgctgggattacaggtgttagccactgcgcccggccctagagctcactgttttctagttagtccatctggaagtggagcctttttccagtttgcacaaatgtgccatattggcttgtagctggcatgcatccaagtccataggtcctgcctcttcaatcctggctttctagggcctgggatgatcattgctagaactgagagaccagcctggctcagtgaacttcagggcgttccgttcattctttcagtaaatgtttgcagcacatgtgttacatgtcaggcagtgaaaccccccacagcagccttccctctcagaggatacatttgtaaccattacacagtcatcagaggaataattttttttaatcaccagtgtgcatacagtcatggagttgggtattcccagctaccagggaggctgaggtgggaggattgcttgatgccaggagttagggaatatagtgcaccgtgattggacttgcgaatagccactgcactgcggcctggacgacgtagtgataccctgactcttataaataaataaatgaataaacacaattatgactttgcggatgggagaaaaggttctctgagaacgtattacataagtatcacatgaactccaaaatacatcttaggccaggcatggtggctgtaatcccagcactttgggagggtaaggcgggcagatcacttgaggtcaggagtccgagactagcctgggcaacatagtgaaaccctgtctctactaaacatacaaaacattagccaggggtggtggtgcagacctgtagtcccagctacttggcaggcttaagcaggagaatcgtttgcaccagggaggcagaggttgcagtgagccaggatcacaccattgcactctagcctggacaacagagtgagactccatctcaaaaaaaaaaaaaaaattcttaagagtagatggaatcctattacaagtctggatcaaaaaggcagctttggctgggtgcagtggctcacacctgtaatcccagcactttgggaagctgaggcagatggatcacttgaggttaggagttcaagaccagcctggccaacatagtgaaaccctgtctctactaaaaatacaaaattagctaggcgtggtggtgcatgcctgtaatcccagctgctagggaggctgagacagaagaatcgcttgaacctgggagatggaggttgcagtgagctgagatcacaccattgcactgcagcctgggcaacaagagcgaaacttggtcaaaaaaaagaacaaggcaacttttacaacgattttttagatctcaat

SEQ ID NO: 282953 - DNA, 1788 bp, Homo sapiens
agtcaccgatgctggaagggtttctttggccctgagtgaagagagacccagagggaacactgaggtgcctgcccaaccactctgtcccggtttccttcagcaggaccagccatgctggtcgttcagatgcctttctcctttcccatggcccacttcatcctctttgtctttacggtttccactatatttcacgttcagcagcggctagcgaagattcaagccatgtgggagttaccggtgcagataccagtgctagcctcaacatcaaaggcactgggacccagccagctcagggggatgtggacgatcaatgcaataggccgcctggggaaccagatgggcgagtacgccacactgtacgccctggccaagatgaacgggcggcccgccttcatcccggcccagatgcacagcaccctggcccccatcttcagaatcaccctgccggtgctgcacagcgccacggccagcaggatcccctggcagaactaccacctgaacgactggatggaggaggaataccgccacatcccgggggagtacgtccgcttcaccggctacccctgctcctggaccttctaccaccacctccgccaggagatcctccaggagttcaccctgcacgaccacgtgcgggaggaggcccagaagttcctgcggggcctgcaggtgaacgggagccggccgggcacctttgtaggggtccatgttcgccgaggggactatgtccatgtcatgccaaaagtgtggaagggggtggtggccgaccggcgatacctacagcaggccctggactggttccgagctcgctacagctccctcatcttcgtggtcaccagtaatggcatggcctggtgtcgggagaacattgacacctcccacggtgatgtggtgtttgctggcgatggcattgagggctcacctgccaaagattttgctctactcacacagtgtaaccacaccatcatgaccattgggacgttcgggatctgggccgcatacctcacgggcggagacaccatctacctggccaattacaccctccccgactcccctttcctcaaaatctttaagccagaggcagccttcctgccggagtggacagggattgccgcagacctgtcccccttactcaagcactaatgctggcccattctttgagaccttttctccttctctgcctccctcaagatgagtgcccgggcatgagaagcacatggttccatgagcaggacccatctctcttctgtgaagatgcgttgggctgcaagtaacagaaatctcagtgaacagtggcctggcgtggtggctcatgcctgtaatgaaagtgctgggattacaggtgttagccactgcgcccggccctagagctcactgttttctagttagtccatctggaagtggagcctttttccagtttgcacaaatgtgccatattggcttgtagctggcatgcatccaagtccataggtcctgcctcttcaatcctggctttctagggcctgggatgatcattgctagaactgagagaccagcctggctcagtgaacttcagggcgttccgttcattctttcagtaaatgtttgcagcacatgtgttacatgtcaggcagtgaaaccccccacagcagccttccctctcagaggatacatttgtaaccattacacagtcatcagaggaataattttttttaatcaccgtgattggacttgcgaatagccactgcactgcggcctggacgacgtagtgataccctgactcttataaataaataaatgaataaacac

SEQ ID NO: 282954 - DNA, 374 bp, Homo sapiens
agtcaccgatgctggaagggtttctttggccctgagtgaagagagacccagagggaacactgaggtgcctgcccaaccactctgtcccggtttccttcagcaggaccaggtccttccttgtctccttcccctcagcagtttctatgaaccaccctggcagtaatggtgcagatggctcgcgcacagctggtggtgacccgactttcctgcctccaccctggggctcctcagaggcttcatggaacccaaactgctggtctcacctccgagccctgccgtcgcccagggagggcggctccgtccctcctgcactccctaatcccgctctgaatcaccgcttctgttctgggtcggagaataaaggtggggtttcc

SEQ ID NO: 282955 - DNA, 1406 bp, Homo sapiens
gcccaggctggagtgcaatggcacgatctcggctcaccaccacctccgcctcccgggttcaggtgattctcctgcctcagcctcctgagtagaaagtgctgggattacaggtgttagccactgcgcccggccctagagctcactgttttctagttagtccatctggaagtggagcctttttccagtttgcacaaatgtgccatattggcttgtagctggcatgcatccaagtccataggtcctgcctcttcaatcctggctttctagggcctgggatgatcattgctagaactgagagaccagcctggctcagtgaacttcagggcgttccgttcattctttcagtaaatgtttgcagcacatgtgttacatgtcaggcagtgaaaccccccacagcagccttccctctcagaggatacatttgtaaccattacacagtcatcagaggaataattttttttaatcaccagtgtgcatacagtcatggagttgggtattcccagctaccagggaggctgaggtgggaggattgcttgatgccaggagttagggaatatagtgcaccgtgattggacttgcgaatagccactgcactgcggcctggacgacgtagtgataccctgactcttataaataaataaatgaataaacacaattatgactttgcggatgggagaaaaggttctctgagaacgtattacataagtatcacatgaactccaaaatacatcttaggccaggcatggtggctgtaatcccagcactttgggagggtaaggcgggcagatcacttgaggtcaggagtccgagactagcctgggcaacatagtgaaaccctgtctctactaaacatacaaaacattagccaggggtggtggtgcagacctgtagtcccagctacttggcaggcttaagcaggagaatcgtttgcaccagggaggcagaggttgcagtgagccaggatcacaccattgcactctagcctggacaacagagtgagactccatctcaaaaaaaaaaaaaaaattcttaagagtagatggaatcctattacaagtctggatcaaaaaggcagctttggctgggtgcagtggctcacacctgtaatcccagcactttgggaagctgaggcagatggatcacttgaggttaggagttcaagaccagcctggccaacatagtgaaaccctgtctctactaaaaatacaaaattagctaggcgtggtggtgcatgcctgtaatcccagctgctagggaggctgagacagaagaatcgcttgaacctgggagatggaggttgcagtgagctgagatcacaccattgcactgcagcctgggcaacaagagcgaaacttggtcaaaaaaaagaacaaggcaacttttacaacgattttttagatctcaat

SEQ ID NO: 282956 - DNA, 3067 bp, Homo sapiens
  misc_feature (1336)..(1336): n is a, c, g, or t
  misc_feature (1452)..(1452): n is a, c, g, or t
  misc_feature (1549)..(1549): n is a, c, g, or t
  misc_feature (1604)..(1604): n is a, c, g, or t
  misc_feature (2350)..(2350): n is a, c, g, or t
  misc_feature (2379)..(2379): n is a, c, g, or t
  misc_feature (2383)..(2383): n is a, c, g, or t
  misc_feature (2389)..(2389): n is a, c, g, or t
  misc_feature (2421)..(2421): n is a, c, g, or t
  misc_feature (2424)..(2424): n is a, c, g, or t
agtcaccgatgctggaagggtttctttggccctgagtgaagagagacccagagggaacactgaggtgcctgcccaaccactctgtcccggtttccttcagcaggaccagccatgctggtcgttcagatgcctttctcctttcccatggcccacttcatcctctttgtctttacggtttccactatatttcacgttcagcagcggctagcgaagattcaagccatgtgggagttaccggtgcagataccagtgctagcctcaacatcaaaggcactgggacccagccagctcagggggatgtggacgatcaatgcaataggccgcctggggaaccagatgggcgagtacgccacactgtacgccctggccaagatgaacgggcggcccgccttcatcccggcccagatgcacagcaccctggcccccatcttcagaatcaccctgccggtgctgcacagcgccacggccagcaggatcccctggcagaactaccacctgaacgactggatggaggaggaataccgccacatcccgggggagtacgtccgcttcaccggctacccctgctcctggaccttctaccaccacctccgccaggagatcctccaggagttcaccctgcacgaccacgtgcgggaggaggcccagaagttcctgcggggcctgcaggtgaacgggagccggccgggcacctttgtaggggtccatgttcgccgaggggactatgtccatgtcatgccaaaagtgtggaagggggtggtggccgaccggcgatacctacagcaggccctggactggttccgagctcgctacagctccctcatcttcgtggtcaccagtaatggcatggcctggtgtcgggagaacattgacacctcccacggtgatgtggtgtttgctggcgatggcattgagggctcacctgccaaagattttgctctactcacacagtgtaaccacaccatcatgaccattgggacgttcgggatctgggccgcatacctcacgggcggagacaccatctacctggccaattacaccctccccgactcccctttcctcaaaatctttaagccagaggcagccttcctgccggagtggacagggattgccgcagacctgtcccccttactcaagcactaatgctggcccattctttgagaccttttctccttctctgcctccctcaagatgagtgcccgggcatgagaagcacatggttccatgagcaggacccatctctcttctgtgaagatgcgttgggctgcaagtaacagaaatctcagtgaacagtggcctggcgtggtggctcatgcctgtaatgctcgcactttgngaggccagggtgggtggatcacttgaggtcaggagttcaagactagcctggccaacatggtgaaaccccatctcgactaaaaatacaaaaattagccaggcgtggtggtgcacacntgtaatcccagctactcgggaggctgaggcaagagaatcacttgaacccaggaggcggaggttgcagtgagccaagatggtgccgctgcactccagnctgggtgacacagcaagactccatctcaaaaaaaaaaaaagaaaaagaaatgaangggttcaaagaccataatcatgcatatcacataagaccagaagtggcccaggtccagggtcagttaatttagcggctccacaaagtcatcagtcacctgagctccatccatcttcacatgctgtgctaccatttcttagctgtatcatcccatggtcccaaaagggctgctacacatccagccatcacatgcagataattcctttcaaaaacagcagaaagaggctcgttcttgtcttggtcccttttgaagaatgaatgaaaccttcctaagccttccagcaatttccccccaactccgatgggtaggaattgtcacatacccatgtgacccgataggaggcaaaagaaatgagacttctgggattagtttagcctcagattctgcagctgagaagttgatcagccacctctgaaggacatgcagcttgcagaaaattagggtggtgttaccaaggtgaaaaggggaaatggctttagagtagacaacagagatgccctgaggggttgtgtaggttgttcactgcaggaagtcccctggttaagaaggcaagtggggtttaaacagacccacagtctactcatcaaaccaggtgtccttggcattgtgtccacccagagagctcactgttttcttttctttttcttttctttttttttttttgagatggagtcttgctgcatcccccaggctggagtgcagtggcatgatcttggctcactgcagcctccgcctcccaggttcangcgattctcctgcctcagcctcccgagtngctnggattncaggtgcgtgccaccacgcccagctaattttntangtttagtggaaatggagtttcaccatgttggtcaggctggtctcaaactcctgacctcatgatccgccttcctcggcctcccaaagtgctgggattacaggtgttagccactgcgcccggccctagagctcactgttttctagttagtccatctggaagtggagcctttttccagtttgcacaaatgtgccatattggcttgtagctggcatgcatccaagtccataggtcctgcctcttcaatcctggctttctagggcctgggatgatcattgctagaactgagagaccagcctggctcagtgaacttcagggcgttccgttcattctttcagtaaatgtttgcagcacatgtgttacatgtcaggcagtgaaaccccccacagcagccttccctctcagaggatacatttgtaaccattacacagtcatcagaggaataattttttttaatcaccagtgtgcatacagtcatggagttgggtattcccagctaccagggaggctgaggtgggaggattgcttgatgccaggagttagggaatatagtgcaccgtgattggacttgcgaatagccactgcactgcggcctggacgacgtagtgataccctgactcttataaataaataaatgaataaacac

SEQ ID NO: 282957 - DNA, 1881 bp, Homo sapiens
attagacagcacactgctgactgttttcagttgtttctgtaacagcagaaagtgcactcactaggagtagtcagaattcaaaatgctcaagagaaagccatccaatgtttcagagaaggagaaacatcaaaaaccaaagcgaagcagcagttttgggaatttcgatcgttttcggaataattctttatcaaaaccagatgattcaactgaggcacatgaaggagatcccacaaatggaagtggagaacaaagtaaaacttcaaataatggaggcggtttgggtaaaaaaatgagagctatttcatggacaatgaagaaaaaagtgggtaaaaagtacatcaaagccctttctgaggaaaaggatgaggaagatggagagaatgcccacccatatagaaacagtgaccctgtgattgggacccacacagagaaggtgtccctcaaagccagtgactccatggatagtctctacagtggacagagctcatcaagtggcataacaagctgttcagatggtacaagtaaccgggacagctttcgactggatgacgatggcccctattcaggaccattctgtggccgtgccagagtgcatacggatttcacgccaagtccctatgacactgactccctcaaaatcaagaaaggagacatcatagacattatttgcaaaacaccaatggggatgtggacaggaatgttgaacaataaagtgggaaacttcaaattcatttatgtggatgtcatctcagaagaggaagcagcccccaagaaaataaaggcaaaccgaaggagtaacagcaaaaaatccaagactctgcaggagttcctagagaggattcatctgcaggaatacacctcaacacttttgctcaatggttatgagactctagaagatttaaaagatataaaagagagtcacctcattgaattaaatattgaaaacccagatgacagaagaaggttactatcagctgctgaaaacttccttgaagaagaaattattcaagagcaagaaaatgaacctgagcccctatccttgagctcagacatctccttaaataagtcacagttagatgactgcccaagggactctggttgctatatctcatcaggaaattcagataatggcaaagaggatctggagtctgaaaatctgtctgacatggtacataagattattatcacagagccaagtgactgaacacgcattcccaactatatatctacagatgcattccattttaactcttcttgagctaaaacgtcaaataggagaggaagataagataaatatttgtaaataaaacctaaagtttaaatgttttaatctgaataattgtacataaaattttgtatctctaacattccaaattactgtcaataaaatatatatttattattttaaatgctatgtgttaatatttcacttgcttgtattagaaaggcaaaatgtaagactttggtatgtgtgacatatgctttatttggctttattttacaagtacagtatctgcaaaaaacaaagtaaccttttttcatacctgccagttttgaatttatatatgttattgaacaaatagtaatagaggattcgctgttgaaacaagttgtccaagcaatgttatattcatttttatacttattgggaaagtgtgagttaatattggacacattttatcctgatccacagtggagttttagtaattatattttgttgatttcttcattttgttttctggtataaaagtagagataatgtgtagtcacttctgatttagtgaaaccaattgtaataattgtggaaatgttttgtctttaagtgtaaatattttaaaatttgacataccctaatgttaataataaaaagaactatttgca

SEQ ID NO: 282958 - DNA, 666 bp, Homo sapiens
attagacagcacactgctgactgttttcagttgtttctgtaacagcagaaagtgcactcactaggagtagtcagaattcaaaatgctcaagagaaagccatccaatgtttcagagaaggagaaacatcaaaaaccaaagcgaagcagcagttttgggaatttcgatcgttttcggaataattctttatcaaaaccagatgattcaactgaggcacatgaaggagatcccacaaatggaagtggagaacaaagtaaaacttcaaataatggaggcggtttgggtaaaaaaatgagagctatttcatggacaatgaagaaaaaagtgggtaaaaagtacatcaaagccctttctgaggaaaaggatgaggaagatggagagaatgcccacccatatagaaacagtgaccctgtgattgggacccacacagagaaggtgtccctcaaagccagtgactccatggatagtctctacagtggacagagctcatcaagtggcataacaagctgttcagatggtacaagtaaccgggacagctttcgactggatgacgatggcccctattcaggaccattctgtggccgtgccagatttctttaccccttctcccctagtttctatcccttccttcctctatacttacaggggcgctattttgatattttttt

SEQ ID NO: 282959 - DNA, 796 bp, Homo sapiens
attagacagcacactgctgactgttttcagttgtttctgtaacagcagaaagtgcactcactaggagtagtcagaattcaaaatgctcaagagaaagccatccaatgtttcagagaaggagaaacatcaaaaaccaaaggtaaggtgatttcatacatagttaaataaaatcaaactatttaatagaaaataaacacatatgtgtgtttgaacacatacaatgttctcatctgtcagtcataagtcaaacatagggtttaatgcctcatggcaaatacggaaaaattaaattgcaaagttagattttaaatcacacctagcaattattgtctctgtaattttgtcttatggtgcatattggaacatttacatctgtaagtgaagtttgagttcagttcaacttcaagaaaatcaatttagtggtctctgagtgtttgttattataaaatcttcttgcatgtttttaatgactatgagattgtcaacgtctattgaacagtctactgaatgaattttatctcttaagtaattagctcttcaaaatagagttataagaaggttgtaaaatggaaatgttatggttaaatataagacttttctcatttttgaatgttaaatcatgatagctcgttgtaaagatgtatatttgctattctctcgaactaatgttattactacacaaaaaatcgggctgtgttttgagaagcatcaaaacaccatatactggtagacttgacaaattggtaatatgtggaatgttactctgttctttgtcttggcaataagtgctactttt

SEQ ID NO: 282960 - DNA, 899 bp, Homo sapiens
attagacagcacactgctgactgttttcagttgtttctgtaacagcagaaagtgcactcactaggagtagtcagaattcaaaatgctcaagagaaagccatccaatgtttcagagaaggagaaacatcaaaaaccaaagtggccattgatgatcattgcctggatccaacattgcattaggggtttgcaaaatgcgaagcagcagttttgggaatttcgatcgttttcggaataattctttatcaaaaccagatgattcaactgaggcacatgaaggagatcccacaaatggaagtggagaacaaagtaaaacttcaaataatggaggcggtttgggtaaaaaaatgagagctatttcatggacaatgaagaaaaaagtgggtaaaaagtacatcaaagccctttctgaggaaaagaggtaaatattctctgataatcatttgtatttttctactaaaactttcttaaactattcagctagactatagaagtgcttggtactttatgaagtacttaagcatttgttttcttcctcagtcattatgcccagaacttgggtggaaggaagtattactttcattttaacagaagaaactgacactcagaaagatcatgcatctgctgggtgcagtggctcacacctgtaatccgagcactttggaggccgtggcgggaagatcacctgaagtcaggagttcaagaccagcctggccaacatggtgaaaccccgtctctactaaaaatacaaaaattagctgagcatggtggtgcacgcctgtagtcctagctactcaggaggctgaggaaggagaatcgcttgaacccgggaggcgggggttccagtgagccctgattgcaccactgaacttcagcctggcaacagagcaagatggcgtctc

SEQ ID NO: 282961 - DNA, 1836 bp, Homo sapiens
attagacagcacactgctgactgttttcagttgtttctgtaacagcagaaagtgcactcactaggagtagtcagaattcaaaatgctcaagagaaagccatccaatgtttcagagaaggagaaacatcaaaaaccaaagcgaagcagcagttttgggaatttcgatcgttttcggaataattctttatcaaaaccagatgattcaactgaggcacatgaaggagatcccacaaatggaagtggagaacaaagtaaaacttcaaataatggaggcggtttgggtaaaaaaatgagagctatttcatggacaatgaagaaaaaagtgggtaaaaagtacatcaaagccctttctgaggaaaaggatgaggaagatggagagaatgcccacccatatagaaacagtgaccctgtgattgggacccacacagagaaggtgtccctcaaagccagtgactccatggatagtctctacagtggacagagctcatcaagtggcataacaagctgttcagatggtacaagtaaccgggacagctttcgactggatgacgatggcccctattcaggaccattctgtggccgtgccagagtgcatacggatttcacgccaagtccctatgacactgactccctcaaaatcaagtggacaggaatgttgaacaataaagtgggaaacttcaaattcatttatgtggatgtcatctcagaagaggaagcagcccccaagaaaataaaggcaaaccgaaggagtaacagcaaaaaatccaagactctgcaggagttcctagagaggattcatctgcaggaatacacctcaacacttttgctcaatggttatgagactctagaagatttaaaagatataaaagagagtcacctcattgaattaaatattgaaaacccagatgacagaagaaggttactatcagctgctgaaaacttccttgaagaagaaattattcaagagcaagaaaatgaacctgagcccctatccttgagctcagacatctccttaaataagtcacagttagatgactgcccaagggactctggttgctatatctcatcaggaaattcagataatggcaaagaggatctggagtctgaaaatctgtctgacatggtacataagattattatcacagagccaagtgactgaacacgcattcccaactatatatctacagatgcattccattttaactcttcttgagctaaaacgtcaaataggagaggaagataagataaatatttgtaaataaaacctaaagtttaaatgttttaatctgaataattgtacataaaattttgtatctctaacattccaaattactgtcaataaaatatatatttattattttaaatgctatgtgttaatatttcacttgcttgtattagaaaggcaaaatgtaagactttggtatgtgtgacatatgctttatttggctttattttacaagtacagtatctgcaaaaaacaaagtaaccttttttcatacctgccagttttgaatttatatatgttattgaacaaatagtaatagaggattcgctgttgaaacaagttgtccaagcaatgttatattcatttttatacttattgggaaagtgtgagttaatattggacacattttatcctgatccacagtggagttttagtaattatattttgttgatttcttcattttgttttctggtataaaagtagagataatgtgtagtcacttctgatttagtgaaaccaattgtaataattgtggaaatgttttgtctttaagtgtaaatattttaaaatttgacataccctaatgttaataataaaaagaactatttgca

SEQ ID NO: 282962 - DNA, 1580 bp, Homo sapiens
attagacagcacactgctgactgttttcagttgtttctgtaacagcagaaagtgcactcactaggagtagtcagaattcaaaatgctcaagagaaagccatccaatgtttcagagaaggagaaacatcaaaaaccaaagcgaagcagcagttttgggaatttcgatcgttttcggaataattctttatcaaaaccagatgattcaactgaggcacatgaaggagatcccacaaatggaagtggagaacaaagtaaaacttcaaataatggaggcggtttgggtaaaaaaatgagagctatttcatggacaatgaagaaaaaagtgggtaaaaagtacatcaaagccctttctgaggaaaaggatgaggaagatggagagaatgcccacccatatagaaacagtgaccctgtgattgggacccacacagagaaggtgtccctcaaagccagtgactccatggatagtctctacagtggacagagctcatcaagtggcataacaagctgttcagatggtacaagtaaccgggacagctttcgactggatgacgatggcccctattcaggaccattctgtggccgtgccagagtgcatacggatttcacgccaagtccctatgacactgactccctcaaaatcaagaaaggagacatcatagacattatttgcaaaacaccaatggggatgtggacaggaatgttgaacaataaagtgggaaacttcaaattcatttatgtggatgtcatctcagaagaggaagcagcccccaagaaaataaaggcaaaccgaaggagtaacagcaaaaaatccaagactctgcaggagttcctagagaggattcatctgcaggaatacacctcaacacttttgctcaatggttatgagactctagaagatttaaaagatataaaagagagtcacctcattgaattaaatattgaaaacccagatgacagaagaaggttactatcagctgctgaaaacttccttgaagaagaaattattcaagagcaagaaaatgaacctgagcccctatccttgagctcagacatctccttaaataagtcacagttagatgactgcccaagggactctggttgctatatctcatcaggaaattcagataatggcaaagaggatctggagtctgaaaatctgtctgacatggtacataagattattatcacagagccaagtgactgaacacgcattcccaactatatatctacagatgcattccattttaactcttcttgagctaaaacgtcaaataggagaggaagataagataaatatttgtaaataaaacctaaagtttaaatgttttaatctgaataattgtacataaaattttgtatctctaacattccaaattactgtcaataaaatatatatttattattttaaatgctatgtgttaatatttcacttgttttctggtataaaagtagagataatgtgtagtcacttctgatttagtgaaaccaattgtaataattgtggaaatgttttgtctttaagtgtaaatattttaaaatttgacataccctaatgttaataataaaaagaactatttgca

SEQ ID NO: 282963 - DNA, 161 bp, Homo sapiens
atacaagtgaagttaagtaaaagttctattggcacctttggtccccatgtgcatctctatactttctttaaatctaaagagaactaaaaataaaatatttgaatctgactaatttgctttatattttttgtcttacaggaatacacctcaacacttttgct

SEQ ID NO: 282964 - DNA, 498 bp, Homo sapiens
aagatggagagaatgcccacccatatagaaacagtgaccctgtgattgggacccacacagagaaggtgtccctcaaagccagtgactccatggatagtctctacagtggacagagctcatcaagtaaggctaatgaatcagggacaagatcctgggtgtgaggtctgggttaaattaattaaaaaacaacaagttaaatcagccacaaggttccagctacttgataagagaaatggtaaaaatgtaagatatattaaatctatatagagttgctattgtttaaataatacataatatatttgacacagtcatatagtgtgtgaaaacttttaacactgtagtcaacggggctcctcgggatactcctcaaaaaagccatattaggagattaaacctgcatctttaaaataaacacctttgttggagtgagccacctttatcttgagtcaacatatttcaaaatgacttgaagtattcagataaatgaaatttattttc

SEQ ID NO: 282965 - DNA, 2178 bp, Homo sapiens
  misc_feature (76)..(76): n is a, c, g, or t
  misc_feature (233)..(233): n is a, c, g, or t
  misc_feature (365)..(365): n is a, c, g, or t
ggaagctcagcagtgtccactgtcgccattccttggccatagaaaacaatgtatttgaattttgatgtaagcatancaaattgaagatgaagatgacacgttgatttcttgtttgaaattaaccaagtcccgagaaaagaaagtgaatagtgttagcacgaggaggaaggaagaaatggagattagattggatactctttctgcatcactgggtagatccagcactttaaatnactgcaacttggaagataaattagcttggtatgaaggtgaagcttacatgtggcatcactggaagccttttcctgaaaaccctctctggacatgtcttgatttccaaatagcacaagttggaccctgggacnactgctcctcttgtattcgccacacacgtctcaagtcttcctgctcagatatggatctcctacattcatggcgaagcagcagttttgggaatttcgatcgttttcggaataattctttatcaaaaccagatgattcaactgaggcacatgaaggagatcccacaaatggaagtggagaacaaagtaaaacttcaaataatggaggcggtttgggtaaaaaaatgagagctatttcatggacaatgaagaaaaaagtgggtaaaaagtacatcaaagccctttctgaggaaaaggatgaggaagatggagagaatgcccacccatatagaaacagtgaccctgtgattgggacccacacagagaaggtgtccctcaaagccagtgactccatggatagtctctacagtggacagagctcatcaagtggcataacaagctgttcagatggtacaagtaaccgggacagctttcgactggatgacgatggcccctattcaggaccattctgtggccgtgccagagtgcatacggatttcacgccaagtccctatgacactgactccctcaaaatcaagaaaggagacatcatagacattatttgcaaaacaccaatggggatgtggacaggaatgttgaacaataaagtgggaaacttcaaattcatttatgtggatgtcatctcagaagaggaagcagcccccaagaaaataaaggcaaaccgaaggagtaacagcaaaaaatccaagactctgcaggagttcctagagaggattcatctgcaggaatacacctcaacacttttgctcaatggttatgagactctagaagatttaaaagatataaaagagagtcacctcattgaattaaatattgaaaacccagatgacagaagaaggttactatcagctgctgaaaacttccttgaagaagaaattattcaagagcaagaaaatgaacctgagcccctatccttgagctcagacatctccttaaataagtcacagttagatgactgcccaagggactctggttgctatatctcatcaggaaattcagataatggcaaagaggatctggagtctgaaaatctgtctgacatggtacataagattattatcacagagccaagtgactgaacacgcattcccaactatatatctacagatgcattccattttaactcttcttgagctaaaacgtcaaataggagaggaagataagataaatatttgtaaataaaacctaaagtttaaatgttttaatctgaataattgtacataaaattttgtatctctaacattccaaattactgtcaataaaatatatatttattattttaaatgctatgtgttaatatttcacttgcttgtattagaaaggcaaaatgtaagactttggtatgtgtgacatatgctttatttggctttattttacaagtacagtatctgcaaaaaacaaagtaaccttttttcatacctgccagttttgaatttatatatgttattgaacaaatagtaatagaggattcgctgttgaaacaagttgtccaagcaatgttatattcatttttatacttattgggaaagtgtgagttaatattggacacattttatcctgatccacagtggagttttagtaattatattttgttgatttcttcattttgttttctggtataaaagtagagataatgtgtagtcacttctgatttagtgaaaccaattgtaataattgtggaaatgttttgtctttaagtgtaaatattttaaaatttgacataccctaatgttaataataaaaagaactatttgca

SEQ ID NO: 282966 - DNA, 1833 bp, Homo sapiens
attagacagcacactgctgactgttttcagttgtttctgtaacagcagaaagtgcactcactaggagtagtcagaattcaaaatgctcaagagaaagccatccaatgtttcagagaaggagaaacatcaaaaaccaaagcgaagcagcagttttgggaatttcgatcgttttcggaataattctttatcaaaaccagatgattcaactgaggcacatgaaggagatcccacaaatggaagtggagaacaaagtaaaacttcaaataatggaggcggtttgggtaaaaaaatgagagctatttcatggacaatgaagaaaaaagtgggtaaaaagtacatcaaagccctttctgaggaaaaggtgattgggacccacacagagaaggtgtccctcaaagccagtgactccatggatagtctctacagtggacagagctcatcaagtggcataacaagctgttcagatggtacaagtaaccgggacagctttcgactggatgacgatggcccctattcaggaccattctgtggccgtgccagagtgcatacggatttcacgccaagtccctatgacactgactccctcaaaatcaagaaaggagacatcatagacattatttgcaaaacaccaatggggatgtggacaggaatgttgaacaataaagtgggaaacttcaaattcatttatgtggatgtcatctcagaagaggaagcagcccccaagaaaataaaggcaaaccgaaggagtaacagcaaaaaatccaagactctgcaggagttcctagagaggattcatctgcaggaatacacctcaacacttttgctcaatggttatgagactctagaagatttaaaagatataaaagagagtcacctcattgaattaaatattgaaaacccagatgacagaagaaggttactatcagctgctgaaaacttccttgaagaagaaattattcaagagcaagaaaatgaacctgagcccctatccttgagctcagacatctccttaaataagtcacagttagatgactgcccaagggactctggttgctatatctcatcaggaaattcagataatggcaaagaggatctggagtctgaaaatctgtctgacatggtacataagattattatcacagagccaagtgactgaacacgcattcccaactatatatctacagatgcattccattttaactcttcttgagctaaaacgtcaaataggagaggaagataagataaatatttgtaaataaaacctaaagtttaaatgttttaatctgaataattgtacataaaattttgtatctctaacattccaaattactgtcaataaaatatatatttattattttaaatgctatgtgttaatatttcacttgcttgtattagaaaggcaaaatgtaagactttggtatgtgtgacatatgctttatttggctttattttacaagtacagtatctgcaaaaaacaaagtaaccttttttcatacctgccagttttgaatttatatatgttattgaacaaatagtaatagaggattcgctgttgaaacaagttgtccaagcaatgttatattcatttttatacttattgggaaagtgtgagttaatattggacacattttatcctgatccacagtggagttttagtaattatattttgttgatttcttcattttgttttctggtataaaagtagagataatgtgtagtcacttctgatttagtgaaaccaattgtaataattgtggaaatgttttgtctttaagtgtaaatattttaaaatttgacataccctaatgttaataataaaaagaactatttgca

SEQ ID NO: 282967 - DNA, 1407 bp, Homo sapiens
ctcgcgtcacagtgacagccaccgttgcctggggacgggccctagcggcttggcggagctggagccctccctggcagtgcgtcggcgctgggctatggccccctcctctccgggggatcgtcgccttggtcccccgaccctaggagtcgggcagggcagaaccaggctaaagaaacgtccagcgtagcttcaaggatgcaccgcgtgatccctatcggatctccccgacgcgtcaggcctgcctagacggtgctgggagcgcgtctccttgaacgttgtcccgcctgggattgcgaggaattatccgatgaaaagtagaagaggttgaatgactttcagtggccttttcttcacagggctcacctgaaacttcatgtaccattgcacttcctgagaagctgtccccaatcccaggctcctagcaatgctgttccagtaatctctcttctgtaagacagccactccacccactgcagtctacaaggaaagcctccatagctgtgattattcagtaagaacagtctcaggaaaacaggaccttcaacagagataagagaattaaaatatgcagactaacaactctgggaatgggctgaccagcctgataagaataggctgatggcacctacagaaggccacaaaacactgaccaagaaagcaatgaccaacaaagcaatgacctgagactgcacatttcacaagaatgttttgatcatcattttttctaatttcccttaaaaacccctgatatggagacagaactcggcggtctttgaacactagttcactgcctcccctgggttgttggattcctgaatagagctaaccatcctttcaccaatgctcatctcttaaactttcaagtgacaagtggtctggacctgaatttcgttacaaaacctatgtataccttaccttacatggcaaaggggactttagaagtgcaattaaattaaggatcttgagagggggttatcctggattatctggttgggcccaatgtatttgtaagtgatagagggaggcaggtgagtaaaaaaaggaaacgtgatgatgaaagcacaagtcaaaatgtgattgctggctttgaaaatggatggaagccacaccccagggatcgtggacagcctttagaaccagaaaaggacaaggaaacagattctccagtcccctagaacctccagaaggaacatggctctgctaatactatgatattagccctttcagactgatttcagacttctgaccagcagaggtataaatcataattatatcgatttaagccactaaattagtggttattagtaacggcagcaacaggaaactatatcagcaacaagactccttccttcatagaacccaattcccaaccaattttcaaactttcacagaaaatcttgccacaca

SEQ ID NO: 282968 - DNA, 1260 bp, Homo sapiens
ctcgcgtcacagtgacagccaccgttgcctggggacgggccctagcggcttggcggagctggagccctccctggcagtgcgtcggcgctgggctatggccccctcctctccgggggatcgtcgccttggtcccccgaccctaggagtcgggcagggcagaaccaggctaaagaaacgtccagcgtagcttcaaggatgcaccgcgtgatccctatcggatctccccgacgcgtcaggcctgcctagacggtgctgggagcgcgtctccttgaacgttgtcccgcctgggattgcgaggaattatccgatgaaaagtagaagaggttgaatgactttcagtggccttttcttcacagattattcagtaagaacagtctcaggaaaacaggaccttcaacagagataagagaattaaaatatgcagactaacaactctgggaatgggctgaccagcctgataagaataggctgatggcacctacagaaggccacaaaacactgaccaagaaagcaatgaccaacaaagcaatgacctgagactgcacatttcacaagaatgttttgatcatcattttttctaatttcccttaaaaacccctgatatggagacagaactcggcggtctttgaacactagttcactgcctcccctgggttgttggattcctgaatagagctaaccatcctttcaccaatgctcatctcttaaactttcaagtgacaagtggtctggacctgaatttcgttacaaaacctatgtataccttaccttacatggcaaaggggactttagaagtgcaattaaattaaggatcttgagagggggttatcctggattatctggttgggcccaatgtatttgtaagtgatagagggaggcaggtgagtaaaaaaaggaaacgtgatgatgaaagcacaagtcaaaatgtgattgctggctttgaaaatggatggaagccacaccccagggatcgtggacagcctttagaaccagaaaaggacaaggaaacagattctccagtcccctagaacctccagaaggaacatggctctgctaatactatgatattagccctttcagactgatttcagacttctgaccagcagaggtataaatcataattatatcgatttaagccactaaattagtggttattagtaacggcagcaacaggaaactatatcagcaacaagactccttccttcatagaacccaattcccaaccaattttcaaactttcacagaaaatcttgccacaca

SEQ ID NO: 282969 - DNA, 1585 bp, Homo sapiens
agcgggtgtggcagtgcgtcccctctccgcgggatcgtcgccatggtcctgcgatcctaggagtcgggcaaggccgaacctgcctgaagaaacctcaagcggagattcaaggaagcaccacgtgatccctaaggatcccaaagatgcgtcgggcatgcatgggcggtgtgagggtgcgtctccctgacaggtgtccccgctgggatttcgagcaatgctgagaagccgaaggccctggtcttggagaccaggacagggccctgggaggcccaggtcgaaagggggccagtcagctcatggggcgagggaatgtcctgctcacaccctccactggggtctcaggaattatccgatgaaaagtagaagaggttgaatgactttcagtggccttttcttcacagattttccatatgctgttccatctgccaagaatgctctcaaagtggccacctcctttgcgtgtgaaatgtcctagcttaaatgtcagctgctcagaaagactatcctggatcactttaattaggtccatgccagggctcacctgaaacttcatgtaccattgcacttcctgagaagctgtccccaatcccaggctcctagcaatgctgttccagtaatctctcttctgtaagacagccactccacccactgcagtctacaaggaaagcctccatagctgtgattattcagtaagaacagtctcaggaaaacaggaccttcaacagagataagagaattaaaatatgcagactaacaactctgggaatgggctgaccagcctgataagaataggctgatggcacctacagaaggccacaaaacactgaccaagaaagcaatgaccaacaaagcaatgacctgagactgcacatttcacaagaatgttttgatcatcattttttctaatttcccttaaaaacccctgatatggagacagaactcggcggtctttgaacactagttcactgcctcccctgggttgttggattcctgaatagagctaaccatcctttcaccaatgctcatctcttaaactttcaagtgacaagtggtctggacctgaatttcgttacaaaacctatgtataccttaccttacatggcaaaggggactttagaagtgcaattaaattaaggatcttgagagggggttatcctggattatctggttgggcccaatgtatttgtaagtgatagagggaggcaggtgagtaaaaaaaggaaacgtgatgatgaaagcacaagtcaaaatgtgattgctggctttgaaaatggatggaagccacaccccagggatcgtggacagcctttagaaccagaaaaggacaaggaaacagattctccagtcccctagaacctccagaaggaacatggctctgctaatactatgatattagccctttcagactgatttcagacttctgaccagcagaggtataaatcataattatatcgatttaagccactaaattagtggttattagtaacggcagcaacaggaaactatatcagcaacaagactccttccttcatagaacccaattcccaaccaattttcaaactttcacagaaaatcttgccacaca

SEQ ID NO: 282970 - DNA, 1530 bp, Homo sapiens
ctcgcgtcacagtgacagccaccgttgcctggggacgggccctagcggcttggcggagctggagccctccctggcagtgcgtcggcgctgggctatggccccctcctctccgggggatcgtcgccttggtcccccgaccctaggagtcgggcagggcagaaccaggctaaagaaacgtccagcgtagcttcaaggatgcaccgcgtgatccctatcggatctccccgacgcgtcaggcctgcctagacggtgctgggagcgcgtctccttgaacgttgtcccgcctgggattgcgaggaattatccgatgaaaagtagaagaggttgaatgactttcagtggccttttcttcacaggcacaaggagagaataaagaaaaaggagagcttataggaaagaagggctcacctgaaacttcatgtaccattgcacttcctgagaagctgtccccaatcccaggctcctagcaatgctgttccagtaatctctcttctgtaagacagccactccacccactgcagtctacaaggaaagcctccatagctgtggctatagcaaggtactggatgccagtccaggcacacagagacatcactctgaactggtacattccgggaaatcccaagattattcagtaagaacagtctcaggaaaacaggaccttcaacagagataagagaattaaaatatgcagactaacaactctgggaatgggctgaccagcctgataagaataggctgatggcacctacagaaggccacaaaacactgaccaagaaagcaatgaccaacaaagcaatgacctgagactgcacatttcacaagaatgttttgatcatcattttttctaatttcccttaaaaacccctgatatggagacagaactcggcggtctttgaacactagttcactgcctcccctgggttgttggattcctgaatagagctaaccatcctttcaccaatgctcatctcttaaactttcaagtgacaagtggtctggacctgaatttcgttacaaaacctatgtataccttaccttacatggcaaaggggactttagaagtgcaattaaattaaggatcttgagagggggttatcctggattatctggttgggcccaatgtatttgtaagtgatagagggaggcaggtgagtaaaaaaaggaaacgtgatgatgaaagcacaagtcaaaatgtgattgctggctttgaaaatggatggaagccacaccccagggatcgtggacagcctttagaaccagaaaaggacaaggaaacagattctccagtcccctagaacctccagaaggaacatggctctgctaatactatgatattagccctttcagactgatttcagacttctgaccagcagaggtataaatcataattatatcgatttaagccactaaattagtggttattagtaacggcagcaacaggaaactatatcagcaacaagactccttccttcatagaacccaattcccaaccaattttcaaactttcacagaaaatcttgccacaca

SEQ ID NO: 282971 - DNA, 1577 bp, Homo sapiens
agcgggtgtggcagtgcgtcccctctccgcgggatcgtcgccatggtcctgcgatcctaggagtcgggcaaggccgaacctgcctgaagaaacctcaagcggagattcaaggaagcaccacgtgatccctaaggatcccaaagatgcgtcgggcatgcatgggcggtgtgagggtgcgtctccctgacaggtgtccccgctgggatttcgaggaattatccgatgaaaagtagaagaggttgaatgactttcagtggccttttcttcacagggctcacctgaaacttcatgtaccattgcacttcctgagaagctgtccccaatcccaggctcctagcaatgctgttccagtaatctctcttctgtaagacagccactccacccactgcagtctacaaggaaagcctccatagctgtggctatagcaaggtactggatgccagtccaggcacacagagacatcactctgaactggtacattccgggaaatcccaaggtgaacttgactatgatcatcctctctcattggttcctgggcaagagggttgtagaaggcagaataaaggccccccaaacatgtccacaacctaatccctgaaacagtaacagtactgactcaatgataaagaaaagcttgcttgcttaaatataattactttgcttgactttgtagattattcagtaagaacagtctcaggaaaacaggaccttcaacagagataagagaattaaaatatgcagactaacaactctgggaatgggctgaccagcctgataagaataggctgatggcacctacagaaggccacaaaacactgaccaagaaagcaatgaccaacaaagcaatgacctgagactgcacatttcacaagaatgttttgatcatcattttttctaatttcccttaaaaacccctgatatggagacagaactcggcggtctttgaacactagttcactgcctcccctgggttgttggattcctgaatagagctaaccatcctttcaccaatgctcatctcttaaactttcaagtgacaagtggtctggacctgaatttcgttacaaaacctatgtataccttaccttacatggcaaaggggactttagaagtgcaattaaattaaggatcttgagagggggttatcctggattatctggttgggcccaatgtatttgtaagtgatagagggaggcaggtgagtaaaaaaaggaaacgtgatgatgaaagcacaagtcaaaatgtgattgctggctttgaaaatggatggaagccacaccccagggatcgtggacagcctttagaaccagaaaaggacaaggaaacagattctccagtcccctagaacctccagaaggaacatggctctgctaatactatgatattagccctttcagactgatttcagacttctgaccagcagaggtataaatcataattatatcgatttaagccactaaattagtggttattagtaacggcagcaacaggaaactatatcagcaacaagactccttccttcatagaacccaattcccaaccaattttcaaactttcacagaaaatcttgccacaca

SEQ ID NO: 282972 - DNA, 1322 bp, Homo sapiens
agcgggtgtggcagtgcgtcccctctccgcgggatcgtcgccatggtcctgcgatcctaggagtcgggcaaggccgaacctgcctgaagaaacctcaagcggagattcaaggaagcaccacgtgatccctaaggatcccaaagatgcgtcgggcatgcatgggcggtgtgagggtgcgtctccctgacaggtgtccccgctgggatttcgaggaattatccgatgaaaagtagaagaggttgaatgactttcagtggccttttcttcacagggctcacctgaaacttcatgtaccattgcacttcctgagaagctgtccccaatcccaggctcctagcaatgctgttccagtaatctctcttctgtaagacagccactccacccactgcagtctacaaggaaagcctccatagctgtgattattcagtaagaacagtctcaggaaaacaggaccttcaacagagataagagaattaaaatatgcagactaacaactctgggaatgggctgaccagcctgataagaataggctgatggcacctacagaaggccacaaaacactgaccaagaaagcaatgaccaacaaagcaatgacctgagactgcacatttcacaagaatgttttgatcatcattttttctaatttcccttaaaaacccctgatatggagacagaactcggcggtctttgaacactagttcactgcctcccctgggttgttggattcctgaatagagctaaccatcctttcaccaatgctcatctcttaaactttcaagtgacaagtggtctggacctgaatttcgttacaaaacctatgtataccttaccttacatggcaaaggggactttagaagtgcaattaaattaaggatcttgagagggggttatcctggattatctggttgggcccaatgtatttgtaagtgatagagggaggcaggtgagtaaaaaaaggaaacgtgatgatgaaagcacaagtcaaaatgtgattgctggctttgaaaatggatggaagccacaccccagggatcgtggacagcctttagaaccagaaaaggacaaggaaacagattctccagtcccctagaacctccagaaggaacatggctctgctaatactatgatattagccctttcagactgatttcagacttctgaccagcagaggtataaatcataattatatcgatttaagccactaaattagtggttattagtaacggcagcaacaggaaactatatcagcaacaagactccttccttcatagaacccaattcccaaccaattttcaaactttcacagaaaatcttgccacaca

SEQ ID NO: 282973 - DNA, 1348 bp, Homo sapiens
ctcgcgtcacagtgacagccaccgttgcctggggacgggccctagcggcttggcggagctggagccctccctggcagtgcgtcggcgctgggctatggccccctcctctccgggggatcgtcgccttggtcccccgaccctaggagtcgggcagggcagaaccaggctaaagaaacgtccagcgtagcttcaaggatgcaccgcgtgatccctatcggatctccccgacgcgtcaggcctgcctagacggtgctgggagcgcgtctccttgaacgttgtcccgcctgggattgcgagggctcacctgaaacttcatgtaccattgcacttcctgagaagctgtccccaatcccaggctcctagcaatgctgttccagtaatctctcttctgtaagacagccactccacccactgcagtctacaaggaaagcctccatagctgtgattattcagtaagaacagtctcaggaaaacaggaccttcaacagagataagagaattaaaatatgcagactaacaactctgggaatgggctgaccagcctgataagaataggctgatggcacctacagaaggccacaaaacactgaccaagaaagcaatgaccaacaaagcaatgacctgagactgcacatttcacaagaatgttttgatcatcattttttctaatttcccttaaaaacccctgatatggagacagaactcggcggtctttgaacactagttcactgcctcccctgggttgttggattcctgaatagagctaaccatcctttcaccaatgctcatctcttaaactttcaagtgacaagtggtctggacctgaatttcgttacaaaacctatgtataccttaccttacatggcaaaggggactttagaagtgcaattaaattaaggatcttgagagggggttatcctggattatctggttgggcccaatgtatttgtaagtgatagagggaggcaggtgagtaaaaaaaggaaacgtgatgatgaaagcacaagtcaaaatgtgattgctggctttgaaaatggatggaagccacaccccagggatcgtggacagcctttagaaccagaaaaggacaaggaaacagattctccagtcccctagaacctccagaaggaacatggctctgctaatactatgatattagccctttcagactgatttcagacttctgaccagcagaggtataaatcataattatatcgatttaagccactaaattagtggttattagtaacggcagcaacaggaaactatatcagcaacaagactccttccttcatagaacccaattcccaaccaattttcaaactttcacagaaaatcttgccacaca

SEQ ID NO: 282974 - DNA, 751 bp, Homo sapiens
agcgggtgtggcagtgcgtcccctctccgcgggatcgtcgccatggtcctgcgatcctaggagtcgggcaaggccgaacctgcctgaagaaacctcaagcggagattcaaggaagcaccacgtgatccctaaggatcccaaagatgcgtcgggcatgcatgggcggtgtgagggtgcgtctccctgacaggtgtccccgctgggatttcgaggaattatccgatgaaaagtagaagaggttgaatgactttcagtggccttttcttcacagggctcacctgaaacttcatgtaccattgcacttcctgagaagctgtccccaatcccaggctcctagcaatgctgttccagtaatctctcttctgtaagacagccactccacccactgcagtctacaaggaaagcctccatagctgtgccttctttccacaggcctttgaagagagcttcaggcacacacctcaaagtgctgccacctacggatcagctgtattattagcaatagctgacactgtgaccagcctttattcacctgagctctgtctttatgtcatggttctcatcagcatccagggctcctttccttgctccagtaaggaaagtatatttggcttagggactgcacatacagcttaaaagaaaggaaatggtgcatggtcatgctaggggattcccagattcaaatctagtccattggcatcaaagaagggagacactgacaggaagtgacagagaaagatgtgacagtcta

SEQ ID NO: 282975 - DNA, 1001 bp, Homo sapiens
agcgggtgtggcagtgcgtcccctctccgcgggatcgtcgccatggtcctgcgatcctaggagtcgggcaaggccgaacctgcctgaagaaacctcaagcggagattcaaggaagcaccacgtgatccctaaggatcccaaagatgcgtcgggcatgcatgggcggtgtgagggtgcgtctccctgacaggtgtccccgctgggatttcgagcaatgctgagaagccgaaggccctggtcttggagaccaggacagggccctgggaggcccaggtcgaaagggggccagtcagctcatggggcgagggaatgtcctgctcacaccctccactggggtctcaggaattatccgatgaaaagtagaagaggttgaatgactttcagtggccttttcttcacagattttccatatgctgttccatctgccaagaatgctctcaaagtggccacctcctttgcgtgtgaaatgtcctagcttaaatgtcagctgctcagaaagactatcctggatcactttaattaggtccatgccagggctcacctgaaacttcatgtaccattgcacttcctgagaagctgtccccaatcccaggctcctagcaatgctgttccagtaatctctcttctgtaagacagccactccacccactgcagtctacaaggaaagcctccatagctgtgcgccaacaggatttctttagtactaagcttcaagaaaccagcaacttgcttgagatgtgtcccacttctcgttctgggcccatgaaacttggatgaaactatgcctgccatctggttcttacttcagggtcacggacttaagattgcccattcattcctctttaataagacatcttggtggactaatggctaaccagtccatgatcacacatcactgtgatggtgtcacacacttggtattttttaatttagggaatgttgtgatccaacatggctgtcacggacttgatgcaataaagcaaactgtagctgagctgaaa

SEQ ID NO: 282976 - DNA, 464 bp, Homo sapiens
agcgggtgtggcagtgcgtcccctctccgcgggatcgtcgccatggtcctgcgatcctaggagtcgggcaaggccgaacctgcctgaagaaacctcaagcggagattcaaggaagcaccacgtgatccctaaggatcccaaagatgcgtcgggcatgcatgggcggtgtgagggtgcgtctccctgacaggtgtccccgctgggatttcgaggtacggcctgcctgtgtttccccggggcgctctctttccggaggggtttcctggcagagagcagaaccgcgcagcctcaggagctgcctggctgtgtgtgtttctgtgcgactgttggatgtttccgtgtgtctttctgtgtgtgcgtgtgagtgtgtgtgtggtgtgcggtgaaagaaatgtggctcgtgcagtgaagcgcggtttctctgtagttcgcctacgctctgatgcgcccgtctctttggccgg

SEQ ID NO: 282977 - DNA, 749 bp, Homo sapiens
agatcctaggaaaggaaactgggagcccgggagaactaaaattcccaattaaaagtgaatttaaatctgagctgttcttagacccagaatttcttgcctgaaggaggaatcaggtccccacaaggaaagaccctgcaactgtataaaaaaagaatctaaaaagatcatgactccttcagtcctttcccaaagagacctatggaaatttcctcaggaagagggaccaagcaaaaccccagaagagttgatctcaaagcttattttatgaagaaaattgacctgagtgacacaaagggttggactgtagtagatgtcacgttttgctgcctagatctccatccagggatgaactcttatttcctcagcttctttgtctcctcagcttctgggagggttggcagctgatattctcacctgagtccctttctaggacttgcccttgcctgaagagagctgtgctgcccaacatgatgcctcctccaaggtacaatccacacccagtgactaataaacaggggttacaaaggcatgcctgcttgccccagtttgggacaactttaccaggccaacccagcctcaaggctctccacaggaacagggaccctgaaagctgtgtctatgaagttattacaagatattggctactgtggtgcatggagcttctaggccagggtgattctcacacctgcctgatgtggatcttgttgcttcacacctgaaacatcatttgagaagcccgggaagtggtg

SEQ ID NO: 282978 - DNA, 1004 bp, Homo sapiens
caggtgtgagccactgcgtctggcccagtttgacttttggatactgtgttttagtttttttttcttgatacagggtctcactttgtcacccaggttggagtgcagtggcacaaacacagcttgctactgcctccacctcttgggctcaattgatcctcctgcctcagtcccataaatagctggccctacaggtgtacgctgcattctccggctgaatttttaaattttgtagagatggggtttcacaatgttgtctaggctggtctcaaactcctgagctcaagggatctacccaccttggcctcccaaagtactgggattacatgcctgagccactgctcctggtctatatacagtgtttccactttagaacattttgtaacaaagcagcaatacattgttttaagcctgagcaattactttataataaaaccagttattttaaagaaagttacaaagtaaaagcagctttagtagcctgcaaataaagccaaggcaggaaatgggtcctctctacagtggggctagtcctgggcaggaccttgagctccggtttggccagccttcaggacgcccagcccgttctagcagggaaggagtgataaggaattaagaggccagaccctgggttggccccttggccccagagccaaggtctgctgaaaaagccagggaccctgaagaaaggcagaattaggagccagaccctgcctctccccaccgctactttgactccaaccttcatcaaaaaatgatccccaaggccactgtgcttgggtctctggttttttggaccccgagtctgggtagaagttctccaacccacttatggctgaggaagggagacttacgtttcccttgcagggcacttgcctcctgcccatcccaccctctcaccttgattgaatttggaaggatgcccagctccccactccacccccaaaaccagcagaaccctcaaacagagtcacaggaccgctcccctgaggtttagcatcagtctt

SEQ ID NO: 282979 - DNA, 3474 bp, Homo sapiens
agcggagtgctcttacaacattggctgccggcgtgactttgaccgcttcccggtgcgttaccggcagctgaacccacccggcgccacgggactttgacgcgtgctctgcgcttgccatgagactcctgggagccgcagccgtcgcggctctggggcgcggaagggcccccgcctccctaggctggcagaggaagcaggttaattggaaggcctgccgatggtcttcatcaggggtgattcctaatgaaaaaatacgaaatattggaatctcagctcacattgattctgggaaaactacattaacagaacgagtcctttactacactggcagaattgcaaagatgcatgaggtgaaaggtaaagatggagttggtgctgtcatggattccatggaactagagagacaaagaggaatcactattcagtcagcagccacttacaccatgtggaaagatgtcaatattaacattatagatactcctgggcatgtggacttcacaatagaagtggaaagggccctgagagtgttggatggtgcagtccttgttctctgtgctgttggaggggtacagtgccagaccatgactgtcaatcgtcagatgaagcgctacaacgttccgtttctaacttttattaacaaattggaccgaatgggctccaacccagccagggccctgcagcaaatgaggtctaaactaaatcataatgcagcgtttatgcagatacccatgggtttggagggtaattttaaaggtattatagatcttattgaggaacgagccatctattttgatggagactttggtcagattgttcgatatggtgagattccagctgaattaagggcggcggccactgaccaccggcaggagctaattgaatgtgttgccaattcagatgaacagcttggtgagatgtttctggaagaaaaaatcccctcgatttctgatttaaagctagcaattcgaagagctactctgaaaagatcatttactcctgtatttttgggaagcgccttgaagaacaaaggagttcagcctcttttagatgctgttttagaatacctcccaaatccatctgaagtccagaactatgctattctcaataaagaggatgactcaaaagagaaaaccaaaatcctaatgaactccagtagagacaattcccacccatttgtaggcctggcttttaaactggaggtaggtcgatttggacaattaacttatgttcgcagttatcagggagagctaaagaagggtgacaccatctataacacaaggacaagaaagaaagtacggttgcaacggctggctcgcatgcatgccgacatgatggaggatgttgaggaagtatatgccggagacatctgtgcattgtttggcattgactgtgctagtggagacacattcacagacaaagccaacagcggcctttctatggagtcaattcatgttcctgatcctgtcatttcaatagcaatgaagccttctaacaagaacgatctggaaaaattttcaaaaggtattggcaggtttacaagagaagatcccacatttaaagtatactttgacactgagaacaaagagacagttatatctggaatgggagaattacacctggaaatctatgctcagaggctggaaagagagtatggctgtccttgtatcacaggaaagccaaaagttgcctttcgagagaccattactgcccctgtcccgtttgactttacacataaaaaacaatcaggtggtgcaggccagtatggaaaagtaataggtgtcctggagcctctggacccagaggactacactaaattggaattttcagatgaaacattcggatcaaatattccaaagcagtttgtgcctgctgtagaaaaggggtttttagatgcctgcgagaagggccctctttctggtcacaagctctctgggctccggtttgtcctgcaagatggagcacaccacatggttgattctaatgaaatctctttcatccgagcaggagaaggtgctcttaaacaagccttggcaaatgcaacattatgtattcttgaacctattatggctgtggaagttgtagctccaaatgaatttcagggacaagtaattgcaggaattaaccgacgccatggggtaatcactgggcaagatggagttgaggactattttacactgtatgcagatgtccctctaaatgatatgtttggttattccactgaacttaggtcatgcacagagggaaagggagaatacacaatggagtatagcaggtatcagccatgtttaccatccacacaagaagacgtcattaataagtatttggaagctacaggtcaacttcctgttaaaaaaggaaaagccaagaactaactttgcttactgtgagttgactgactctaattgaatctgcgtggttttgatactttgatggattccagtggaataaattcaggctgctgaaacaagaaattctgagcccaggaagcgggctcttctttcttcaaaagaagcccttcttgttcatattcaggagcttctgttatattcaaaggtaattctatgtctatctcaactctattgattggttttatagttcattgaaaatcctcaaataaaatataattattactgaaatatgtttaatatttaaggggaaaagagactaatttcagttatacttttaagcttagaatgtatgttcatttccaaattttgtatcataagagttttcaacatagagaaaagctgaaaaaatgcaaagaataaccacatactttccatctaccttcctttgttaacgggttgtttatcatataataatttgttttgtcatatttgctttcactgtctattatctgtttaagtctcataactctatttttagtttgctgaagacttgaaagtgaatcgcatatatcatgacacttcttggagtgtcattaatgggcaggcttttctgttgaagagtggattccgtatgttcttcatagagagtgtttttcagattcttcattgggatattaaaatattagccaaatttctctctgttttatatatgtctgtttatttcagtttgtggtttctgcaaatttgtaactgcctctgttttaggagtataagtattacttccttgtggtctattgtgaagtaaaaagtagacccttgcatatactattcttgtttgtgttcatcttaatgtttttgtacagctaaatcaaatgtaatttatagagttagtttcatcaacctaatgaatgctagttaaatttgaattccttggaatttatcgtatattgtattcactgagattatgaagggacaaatgttaatcttttgtttccagaaaaagttgggctttcccaagcagttctattacccggttcagaattgcttcatccaaaaatcatctgatggtatagatggatcctagtccttttcattacctgatggtagaaataaaataattgatttt

SEQ ID NO: 282980 - DNA, 277 bp, Homo sapiens
ggctgaaattgaagctttttattttggatatacataccactattactgttttaaagacatttttatgtagtgatactttgtattatggactctataaagttctatactgtaatcaagacatttatataaagtgacactttgggattatttggcctcataagctagatgccagtgaaattggcatacacatcaatagacatgtttacacttccagtgttagggtttttgtttattccagttgtacttcctttggcagacggctattatgttttacttt

SEQ ID NO: 282981 - DNA, 3413 bp, Homo sapiens
agcggagtgctcttacaacattggctgccggcgtgactttgaccgcttcccggtgcgttaccggcagctgaacccacccggcgccacgggactttgacgcgtgctctgcgcttgccatgagactcctgggagccgcagccgtcgcggctctggggcgcggaagggcccccgcctccctaggctggcagaggaagcaggttaattggaaggcctgccgatggtcttcatcaggggtgattcctaatgaaaaaatacgaaatattggaatctcagctcacattgattctgggaaaactacattaacagaacgagtcctttactacactggcagaattgcaaagatgcatgaggtgaaaggtaaagatggagttggtgctgtcatggattccatggaactagagagacaaagaggaatcactattcagtcagcagccacttacaccatgtggaaagatgtcaatattaacattatagatactcctgggcatgtggacttcacaatagaagtggaaagggccctgagagtgttggatggtgcagtccttgttctctgtgctgttggaggggtacagtgccagaccatgactgtcaatcgtcagatgaagcgctacaacgttccgtttctaacttttattaacaaattggaccgaatgggctccaacccagccagggccctgcagcaaatgaggtctaaactaaatcataatgcagcgtttatgcagatacccatgggtttggagggtaattttaaaggtattatagatcttattgaggaacgagccatctattttgatggagactttggtcagattgttcgatatggtgagattccagctgaattaagggcggcggccactgaccaccggcaggagctaattgaatgtgttgccaattcagatgaacagcttggtgagatgtttctggaagaaaaaatcccctcgatttctgatttaaagctagcaattcgaagagctactctgaaaagatcatttactcctgtatttttgggaagcgccttgaagaacaaaggagttcagcctcttttagatgctgttttagaatacctcccaaatccatctgaagtccagaactatgctattctcaataaagaggagtaagtcttgaaaattgaatcttagtaggtcgatttggacaattaacttatgttcgcagttatcagggagagctaaagaagggtgacaccatctataacacaaggacaagaaagaaagtacggttgcaacggctggctcgcatgcatgccgacatgatggaggatgttgaggaagtatatgccggagacatctgtgcattgtttggcattgactgtgctagtggagacacattcacagacaaagccaacagcggcctttctatggagtcaattcatgttcctgatcctgtcatttcaatagcaatgaagccttctaacaagaacgatctggaaaaattttcaaaaggtattggcaggtttacaagagaagatcccacatttaaagtatactttgacactgagaacaaagagacagttatatctggaatgggagaattacacctggaaatctatgctcagaggctggaaagagagtatggctgtccttgtatcacaggaaagccaaaagttgcctttcgagagaccattactgcccctgtcccgtttgactttacacataaaaaacaatcaggtggtgcaggccagtatggaaaagtaataggtgtcctggagcctctggacccagaggactacactaaattggaattttcagatgaaacattcggatcaaatattccaaagcagtttgtgcctgctgtagaaaaggggtttttagatgcctgcgagaagggccctctttctggtcacaagctctctgggctccggtttgtcctgcaagatggagcacaccacatggttgattctaatgaaatctctttcatccgagcaggagaaggtgctcttaaacaagccttggcaaatgcaacattatgtattcttgaacctattatggctgtggaagttgtagctccaaatgaatttcagggacaagtaattgcaggaattaaccgacgccatggggtaatcactgggcaagatggagttgaggactattttacactgtatgcagatgtccctctaaatgatatgtttggttattccactgaacttaggtcatgcacagagggaaagggagaatacacaatggagtatagcaggtatcagccatgtttaccatccacacaagaagacgtcattaataagtatttggaagctacaggtcaacttcctgttaaaaaaggaaaagccaagaactaactttgcttactgtgagttgactgactctaattgaatctgcgtggttttgatactttgatggattccagtggaataaattcaggctgctgaaacaagaaattctgagcccaggaagcgggctcttctttcttcaaaagaagcccttcttgttcatattcaggagcttctgttatattcaaaggtaattctatgtctatctcaactctattgattggttttatagttcattgaaaatcctcaaataaaatataattattactgaaatatgtttaatatttaaggggaaaagagactaatttcagttatacttttaagcttagaatgtatgttcatttccaaattttgtatcataagagttttcaacatagagaaaagctgaaaaaatgcaaagaataaccacatactttccatctaccttcctttgttaacgggttgtttatcatataataatttgttttgtcatatttgctttcactgtctattatctgtttaagtctcataactctatttttagtttgctgaagacttgaaagtgaatcgcatatatcatgacacttcttggagtgtcattaatgggcaggcttttctgttgaagagtggattccgtatgttcttcatagagagtgtttttcagattcttcattgggatattaaaatattagccaaatttctctctgttttatatatgtctgtttatttcagtttgtggtttctgcaaatttgtaactgcctctgttttaggagtataagtattacttccttgtggtctattgtgaagtaaaaagtagacccttgcatatactattcttgtttgtgttcatcttaatgtttttgtacagctaaatcaaatgtaatttatagagttagtttcatcaacctaatgaatgctagttaaatttgaattccttggaatttatcgtatattgtattcactgagattatgaagggacaaatgttaatcttttgtttccagaaaaagttgggctttcccaagcagttctattacccggttcagaattgcttcatccaaaaatcatctgatggtatagatggatcctagtccttttcattacctgatggtagaaataaaataattgatttt

SEQ ID NO: 282982 - DNA, 3420 bp, Homo sapiens
agcggagtgctcttacaacattggctgccggcgtgactttgaccgcttcccggtgcgttaccggcagctgaacccacccggcgccacgggactttgacgcgtgctctgcgcttgccatgagactcctgggagccgcagccgtcgcggctctggggcgcggaagggcccccgcctccctaggctggcagaggaagcaggttaattggaaggcctgccgatggtcttcatcaggggtgattcctaatgaaaaaatacgaaatattggaatctcagctcacattgattctgggaaaactacattaacagaacgagtcctttactacactggcagaattgcaaagatgcatgaggtgaaaggtaaagatggagttggtgctgtcatggattccatggaactagagagacaaagaggaatcactattcagtcagcagccacttacaccatgtggaaagatgtcaatattaacattatagatactcctgggcatgtggacttcacaatagaagtggaaagggccctgagagtgttggatggtgcagtccttgttctctgtgctgttggaggggtacagtgccagaccatgactgtcaatcgtcagatgaagcgctacaacgttccgtttctaacttttattaacaaattggaccgaatgggctccaacccagccagggccctgcagcaaatgaggtctaaactaaatcataatgcagcgtttatgcagatacccatgggtttggagggtaattttaaaggtattatagatcttattgaggaacgagccatctattttgatggagactttggtcagattgttcgatatggtgagattccagctgaattaagggcggcggccactgaccaccggcaggagctaattgaatgtgttgccaattcagatgaacagcttggtgagatgtttctggaagaaaaaatcccctcgatttctgatttaaagctagcaattcgaagagctactctgaaaagatcatttactcctgtatttttgggaagcgccttgaagaacaaaggagttcagcctcttttagatgctgttttagaatacctcccaaatccatctgaagtccagaactatgctattctcaataaagaggatgactcaaaagagaaaaccaaaatcctaatgaactccagtagagacaattcccacccatttgtaggcctggcttttaaactggaggtaggtcgatttggacaattaacttatgttcgcagttatcagggagagctaaagaagggtgacaccatctataacacaaggacaagaaagaaagtacggttgcaacggctggctcgcatgcatgccgacatgatggaggatgttgaggaagtatatgccggagacatctgtgcattgtttggcattgactgtgctagtggagacacattcacagacaaagccaacagcggcctttctatggagtcaattcatgttcctgatcctgtcatttcaatagcaatgaagccttctaacaagaacgatctggaaaaattttcaaaaggtattggcaggtttacaagagaagatcccacatttaaagtatactttgacactgagaacaaagagacagttatatctggaatgggagaattacacctggaaatctatgctcagaggctggaaagagagtatggctgtccttgtatcacaggaaagccaaaagttgcctttcgagagaccattactgcccctgtcccgtttgactttacacataaaaaacaatcaggtggtgcaggccagtatggaaaagtaataggtgtcctggagcctctggacccagaggactacactaaattggaattttcagatgaaacattcggatcaaatattccaaagcagtttgtgcctgctgtagaaaaggggtttttagatgcctgcgagaagggccctctttctggtcacaagctctctgggctccggtttgtcctgcaagatggagcacaccacatggttgattctaatgaaatctctttcatccgagcaggagaaggtgctcttaaacaagccttggcaaatgcaacattatgtattcttgaacctattatggctgtggaagttgtagctccaaatgaatttcagggacaagtaattgcaggaattaaccgacgccatggggtaatcactgggcaagatggagttgaggactattttacactgtatgcagatgtccctctaaatgatatgtttggttattccactgaacttaggtcatgcacagagggaaagggagaatacacaatggagtatagcaggtatcagccatgtttaccatccacacaagaagacgtcattaataagtatttggaagctacaggtcaacttcctgttaaaaaaggaaaagccaagaactaactttgcttactgtgagttgactgactctaattgaatctgcgtggttttgatactttgatggattccagtggaataaattcaggctgctgaaacaagaaattctgagcccaggaagcgggctcttctttcttcaaaagaagcccttcttgttcatattcaggagcttctgttatattcaaaggtaattctatgtctatctcaactctattgattggttttatagttcattgaaaatcctcaaataaaatataattattactgaaatatgtttaatatttaaggggaaaagagactaatttcagttatacttttaagcttagaatgtatgttcatttccaaattttgtatcataagagttttcaacatagagaaaagctgaagtttatcatataataatttgttttgtcatatttgctttcactgtctattatctgtttaagtctcataactctatttttagtttgctgaagacttgaaagtgaatcgcatatatcatgacacttcttggagtgtcattaatgggcaggcttttctgttgaagagtggattccgtatgttcttcatagagagtgtttttcagattcttcattgggatattaaaatattagccaaatttctctctgttttatatatgtctgtttatttcagtttgtggtttctgcaaatttgtaactgcctctgttttaggagtataagtattacttccttgtggtctattgtgaagtaaaaagtagacccttgcatatactattcttgtttgtgttcatcttaatgtttttgtacagctaaatcaaatgtaatttatagagttagtttcatcaacctaatgaatgctagttaaatttgaattccttggaatttatcgtatattgtattcactgagattatgaagggacaaatgttaatcttttgtttccagaaaaagttgggctttcccaagcagttctattacccggttcagaattgcttcatccaaaaatcatctgatggtatagatggatcctagtccttttcattacctgatggtagaaataaaataattgatttt

SEQ ID NO: 282983 - DNA, 2912 bp, Homo sapiens
  misc_feature (1609)..(1609): n is a, c, g, or t
  misc_feature (1622)..(1622): n is a, c, g, or t
  misc_feature (1736)..(1736): n is a, c, g, or t
  misc_feature (1827)..(1827): n is a, c, g, or t
  misc_feature (1908)..(1908): n is a, c, g, or t
  misc_feature (1957)..(1958): n is a, c, g, or t
  misc_feature (1966)..(1966): n is a, c, g, or t
  misc_feature (1968)..(1968): n is a, c, g, or t
  misc_feature (1970)..(1970): n is a, c, g, or t
  misc_feature (1972)..(1974): n is a, c, g, or t
  misc_feature (1976)..(1986): n is a, c, g, or t
  misc_feature (1988)..(1989): n is a, c, g, or t
  misc_feature (1992)..(1994): n is a, c, g, or t
  misc_feature (1998)..(1998): n is a, c, g, or t
  misc_feature (2002)..(2004): n is a, c, g, or t
  misc_feature (2009)..(2009): n is a, c, g, or t
  misc_feature (2314)..(2314): n is a, c, g, or t
  misc_feature (2722)..(2722): n is a, c, g, or t
agcggagtgctcttacaacattggctgccggcgtgactttgaccgcttcccggtgcgttaccggcagctgaacccacccggcgccacgggactttgacgcgtgctctgcgcttgccatgagactcctgggagccgcagccgtcgcggctctggggcgcggaagggcccccgcctccctaggctggcagaggaagcaggttaattggaaggcctgccgatggtcttcatcaggggtgattcctaatgaaaaaatacgaaatattggaatctcagctcacattgattctgggaaaactacattaacagaacgagtcctttactacactggcagaattgcaaagatgcatgaggtgaaaggtaaagatggagttggtgctgtcatggattccatggaactagagagacaaagaggaatcactattcagtcagcagccacttacaccatgtggaaagatgtcaatattaacattatagatactcctgggcatgtggacttcacaatagaagtggaaagggccctgagagtgttggatggtgcagtccttgttctctgtgctgttggaggggtacagtgccagaccatgactgtcaatcgtcagatgaagcgctacaacgttccgtttctaacttttattaacaaattggaccgaatgggctccaacccagccagggccctgcagcaaatgaggtctaaactaaatcataatgcagcgtttatgcagatacccatgggtttggagggtaattttaaaggtattatagatcttattgaggaacgagccatctattttgatggagactttggtcagattgttcgatatggtgagattccagctgaattaagggcggcggccactgaccaccggcaggagctaattgaatgtgttgccaattcagatgaacagcttggtgagatgtttctggaagaaaaaatcccctcgatttctgatttaaagctagcaattcgaagagctactctgaaaagatcatttactcctgtatttttgggaagcgccttgaagaacaaaggagttcagcctcttttagatgctgttttagaatacctcccaaatccatctgaagtccagaactatgctattctcaataaagaggatgactcaaaagagaaaaccaaaatcctaatgaactccagtagagacaattcccacccatttgtaggcctggcttttaaactggagtttttgtctaggtcctttttccgtctcactagacagaaggaccacagaaggcccatccagaggaccacgttatatttgattgtcatgtctccttatgatctcctaggctgtaatagtttcttagactttccttgtttctcacgagattgatatttttgagaagtattggtcagctcttttgtagagtgtccctcaatttgggtttattatttgatgcttttcacatgattagattggagtcatgtgtttttaggaggactgccatcgaggtgaagtgttattcttgtcacatcatatccaaggtacagacttgcagcatgatttatcattgtttttgttttttttgtttttatttttatttttttgagatgagatttcgctcttgttgcccaggctggagtgcaatggcncaatctcggctcnctgcagcctccacctcccaggttcaagcgagtctcctgcctcagcctcccaagtagctgggattacaggcatgcgccaccacgcccagctaattttgtatttttagtagagacntagtttctccctgttggtcaggccggtctcgaactcctgacctcaggtgatccgagtgtcttggcctcccaaagtgctgggattacaggcntgagccaccgcacccggctgatttatcattgttaatgctaacctcaatcaccacacctggctgagatagtgtttgacaggnttctctgctgtaaagttactgtactctttttattccccttttatagtgnnctttttanangnannncnnnnnnnnnnncnnacnnnaggngggnnnaattntgttccacccccttgaagggggcactatctacataagttatttggaattcttctgaaagggagatttgtctttcttccctgcttatttatctatttggacaatcacttatttaatatcagcgtggactcacgtatatgtattttgaactttgagttataactatgactttgagtatgtcatttgttgttcagattggctgggtttggcgattgggaactctcagttggctcctgtgttcctttaacatcttccaatgttttgcctttttgaatacttccttacttgctggcactacaagacgccncaggcttatcttgtatattccatgccctaaccctagaatcagccgttctccaaggagcactggttcctttttaagtaaaatggtattagaaaccaagatttggggactggatgggctttttgttgaaatgctgttgcttctgtacataatattttaagtggggaaaaatggtagataagttggaagtgttaagagtggttatttctgggatgggattatattttgggggctttttcttactttaaaaatattttacagtatatttattacctccaaaatgaggggaaaatttttttaattaaaaagtggaaataacattacagtaaaagtttttacacataaagcttttaaaaatacatatataagaatattttcttaggattcccagaatagtgattattgagttanaggcatagaatgttttcatagttaatggtttatattgccagattgcgttcatactctccaaattaatgtattggattatttcaatgaatatcatcattgagtattgtttaaaaatcattactgatttaacaaatgaagaattctattgtaatcttttatcttgatgaaataaattttgatttttaaaagc

SEQ ID NO: 282984 - DNA, 3141 bp, Homo sapiens
agcggagtgctcttacaacattggctgccggcgtgactttgaccgcttcccggtgcgttaccggcagctgaacccacccggcgccacgggactttgacgcgtgctctgcgcttgccatgagactcctgggagccgcagccgtcgcggctctggggcgcggaagggcccccgcctccctaggctggcagaggaagcaggttaattggaaggcctgccgatggtcttcatcaggggtgattcctaatgaaaaaatacgaaatattggaatctcagctcacattgattctgggaaaactacattaacagaacgagtcctttactacactggcagaattgcaaagatgcatgaggtgaaaggtaaagatggagttggtgctgtcatggattccatggaactagagagacaaagaggaatcactattcagtcagcagccacttacaccatgtggaaagatgtcaatattaacattatagatactcctgggcatgtggacttcacaatagaagtggaaagggccctgagagtgttggatggtgcagtccttgttctctgtgctgttggaggggtacagtgccagaccatgactgtcaatcgtcagatgaagcgctacaacgttccgtttctaacttttattaacaaattggaccgaatgggctccaacccagccagggccctgcagcaaatgaggtctaaactaaatcataatgcagcgtttatgcagatacccatgggtttggagggtaattttaaaggtattatagatcttattgaggaacgagccatctattttgatggagactttggtcagattgttcgatatggtgagattccagctgaattaagggcggcggccactgaccaccggcaggagctaattgaatgtgttgccaattcagatgaacagcttggtgagatgtttctggaagaaaaaatcccctcgatttctgatttaaagctagcaattcgaagagctactctgaaaagatcatttactcctgtatttttgggaagcgccttgaagaacaaaggagttcagcctcttttagatgctgttttagaatacctcccaaatccatctgaagtccagaactatgctattctcaataaagaggatgactcaaaagagaaaaccaaaatcctaatgaactccagtagagacaattcccacccatttgtaggcctggcttttaaactggaggtaggtcgatttggacaattaacttatgttcgcagttatcagggagagctaaagaagggtgacaccatctataacacaaggacaagaaagaaagtacggttgcaacggctggctcgcatgcatgccgacatgatggaggatgttgaggaagtatatgccggagacatctgtgcattgtttggcattgactgtgctagtggagacacattcacagacaaagccaacagcggcctttctatggagtcaattcatgttcctgatcctgtcatttcaatagcaatgaagccttctaacaagaacgatctggaaaaattttcaaaaggtattggcaggtttacaagagaagatcccacatttaaagtatactttgacactgagaacaaagagacagttatatctggaatgggagaattacacctggaaatctatgctcagaggctggaaagagagtatggctgtccttgtatcacaggaaagccaaaagttgcctttcgagagaccattactgcccctgtcccgtttgactttacacataaaaaacaatcaggtggtgcaggccagtatggaaaagtaataggtgtcctggagcctctggacccagaggactacactaaattggaattttcagatgaaacattcggatcaaatattccaaagcagtttgtgcctgctgtagaaaaggggtttttagatgcctgcgagaagggccctctttctggtcacaagctctctgggctccggtttgtcctgcaagatggagcacaccacatggttgattctaatgaaatctctttcatccgagcaggagaaggtgctcttaaacaagccttggcaaatgcaacattatgtattcttgaacctattatggctgtggaagttgtagctccaaatgaatttcagggacaagtaattgcaggaattaaccgacgccatggggtaatcactgggcaagatggagttgaggactattttacactgtatgcagatgtccctctaaatgatatgtttggttattccactgaacttaggtcatgcacagagggaaagggagaatacacaatggagtatagcaggtatcagccatgtttaccatccacacaagaagacgtcattaataagtatttggaagctacaggtcaacttcctgttaaaaaaggaaaagccaagaactaactttgcttactgtgagttgactgactctaattgaatctgcgtggttttgatactttgatggattccagtggaataaattcaggctgctgaaacaagaaattctgagcccaggaagcgggctcttctttcttcaaaagaagcccttcttgttcatattcaggagcttctgttatattcaaagtttgctgaagacttgaaagtgaatcgcatatatcatgacacttcttggagtgtcattaatgggcaggcttttctgttgaagagtggattccgtatgttcttcatagagagtgtttttcagattcttcattgggatattaaaatattagccaaatttctctctgttttatatatgtctgtttatttcagtttgtggtttctgcaaatttgtaactgcctctgttttaggagtataagtattacttccttgtggtctattgtgaagtaaaaagtagacccttgcatatactattcttgtttgtgttcatcttaatgtttttgtacagctaaatcaaatgtaatttatagagttagtttcatcaacctaatgaatgctagttaaatttgaattccttggaatttatcgtatattgtattcactgagattatgaagggacaaatgttaatcttttgtttccagaaaaagttgggctttcccaagcagttctattacccggttcagaattgcttcatccaaaaatcatctgatggtatagatggatcctagtccttttcattacctgatggtagaaataaaataattgatttt

SEQ ID NO: 282985 - DNA, 2449 bp, Homo sapiens
agcggagtgctcttacaacattggctgccggcgtgactttgaccgcttcccggtgcgttaccggcagctgaacccacccggcgccacgggactttgacgcgtgctctgcgcttgccatgagactcctgggagccgcagccgtcgcggctctggggcgcggaagggcccccgcctccctaggctggcagaggaagcaggttaattggaaggcctgccgatggtcttcatcaggggtgattcctaatgaaaaaatacgaaatattggaatctcagctcacattgattctgggaaaactacattaacagaacgagtcctttactacactggcagaattgcaaagatgcatgaggtgaaaggtaaagatggagttggtgctgtcatggattccatggaactagagagacaaagaggaatcactattcagtcagcagccacttacaccatgtggaaagatgtcaatattaacattatagatactcctgggcatgtggacttcacaatagaagtggaaagggccctgagagtgttggatggtgcagtccttgttctctgtgctgttggaggggtacagtgccagaccatgactgtcaatcgtcagatgaagcgctacaacgttccgtttctaacttttattaacaaattggaccgaatgggctccaacccagccagggccctgcagcaaatgaggtctaaactaaatcataatgcagcgtttatgcagatacccatgggtttggagggtaattttaaaggtattatagatcttattgaggaacgagccatctattttgatggagactttggtcagattgttcgatatggtgagattccagctgaattaagggcggcggccactgaccaccggcaggagctaattgaatgtgttgccaattcagatgaacagcttggtgagatgtttctggaagaaaaaatcccctcgatttctgatttaaagctagcaattcgaagagctactctgaaaagatcatttactcctgtatttttgggaagcgccttgaagaacaaaggagttcagcctcttttagatgctgttttagaatacctcccaaatccatctgaagtccagaactatgctattctcaataaagaggatgactcaaaagagaaaaccaaaatcctaatgaactccagtagagacaattcccacccatttgtaggcctggcttttaaactggaggtaggtcgatttggacaattaacttatgttcgcagttatcagggagagctaaagaagggtgacaccatctataacacaaggacaagaaagaaagtacggttgcaacggctggctcgcatgcatgccgacatgatggaggatgttgaggaagtatatgccggagacatctgtgcattgtttggcattgactgtgctagtggagacacattcacagacaaagccaacagcggcctttctatggagtcaattcatgttcctgatcctgtcatttcaatagcaatgaagccttctaacaagaacgatctggaaaaattttcaaaaggtattggcaggtttacaagagaagatcccacatttaaagtatactttgacactgagaacaaagagacagttatatctggaatgggagaattacacctggaaatctatgctcagaggctggaaagagagtatggctgtccttgtatcacaggaaagccaaaagttgcctttcgagagaccattactgcccctgtcccgtttgactttacacataaaaaacaatcaggtggtgcaggccagtatggaaaagtaataggtgtcctggagcctctggacccagaggactacactaaattggaattttcagatgaaacattcggatcaaatattccaaagcagtttgtgcctgctgtagaaaaggggtttttagatgcctgcgagaagggccctctttctggtcacaagctctctgggctccggtttgtcctgcaagatggagcacaccacatggttgattctaatgaaatctctttcatccgagcaggagaaggtgctcttaaacaagccttggcaaatgcaacattatgtattcttgaacctattatggctgtggaagttgtagctccaaatgaatttcagggacaagtaattgcaggaattaaccgacgccatggggtaatcactgggcaagatggagttgaggactattttacactgtatgcagatgtaagtagtcttggtcattggcagtcctgcttttattaaccatagaaggaaatccaggttagcttttgtttttgcaaatggacacatttccttgctgaatttgtggctttatacatgtggcattttctgtaatttgctattaaagcaactcttaagtgcagaagttaaaaataagatttattttatcttgaccttttgtgaatgtgtcattttcttagatgtatattatctctctttcttgaataagcacagatggacaaatt

SEQ ID NO: 282986 - DNA, 679 bp, Homo sapiens
ataatattcaacaatggtgacgttttagtggttagattaattggaggtaaatataaattaatcaatgtaacttagaattcatttatataaaatctgtaaaagcagtttgtattaagtatcacatacctaatccttataagatactaaaatgatttaagatttgtttatctattatatttaagtgaatgctactaagatatataagatgcttaggaggttttctttcggtttatttttttaaatttaaataatattttccccactctttttagaggctggaaagagagtatggctgtccttgtatcacaggaaagccaaaagttgcctttcgagagaccattactgcccctgtcccgtaagtatgcaacgtaattaaacattatgaggctgaaattgaagctttttattttggatatacataccactattactgttttaaagacatttttatgtagtgatactttgtattatggactctataaagttctatactgtaatcaagacatttatataaagtgacactttgggattatttggcctcataagctagatgccagtgaaattggcatacacatcaatagacatgtttacacttccagtgttagggtttttgtttattccagttgtacttcctttggcagacggctattatgttttactttagtgccgtattgtggat

SEQ ID NO: 282987 - DNA, 2154 bp, Homo sapiens
agcggagtgctcttacaacattggctgccggcgtgactttgaccgcttcccggtgcgttaccggcagctgaacccacccggcgccacgggactttgacgcgtgctctgcgcttgccatgagactcctgggagccgcagccgtcgcggctctggggcgcggaagggcccccgcctccctaggctggcagaggaagcaggttaattggaaggcctgccgatggtcttcatcaggggtgattcctaatgaaaaaatacgaaatattggaatctcagctcacattgattctgggaaaactacattaacagaacgagtcctttactacactggcagaattgcaaagatgcatgaggtgaaaggtaaagatggagttggtgctgtcatggattccatggaactagagagacaaagaggaatcactattcagtcagcagccacttacaccatgtggaaagatgtcaatattaacattatagatactcctgggcatgtggacttcacaatagaagtggaaagggccctgagagtgttggatggtgcagtccttgttctctgtgctgttggaggggtacagtgccagaccatgactgtcaatcgtcagatgaagcgctacaacgttccgtttctaacttttattaacaaattggaccgaatgggctccaacccagccagggccctgcagcaaatgaggtctaaactaaatcataatgcagcgtttatgcagatacccatgggtttggagggtaattttaaaggtattatagatcttattgaggaacgagccatctattttgatggagactttggtcagattgttcgatatggtgagattccagctgaattaagggcggcggccactgaccaccggcaggagctaattgaatgtgttgccaattcagatgaacagcttggtgagatgtttctggaagaaaaaatcccctcgatttctgatttaaagctagcaattcgaagagctactctgaaaagatcatttactcctgtatttttgggaagcgccttgaagaacaaaggagttcagcctcttttagatgctgttttagaatacctcccaaatccatctgaagtccagaactatgctattctcaataaagaggatgactcaaaagagaaaaccaaaatcctaatgaactccagtagagacaattcccacccatttgtaggcctggcttttaaactggaggtaggtcgatttggacaattaacttatgttcgcagttatcagggagagctaaagaagggtgacaccatctataacacaaggacaagaaagaaagtacggttgcaacggctggctcgcatgcatgccgacatgatggaggatgttgaggaagtatatgccggagacatctgtgcattgtttggcattgactgtgctagtggagacacattcacagacaaagccaacagcggcctttctatggagtcaattcatgttcctgatcctgtcatttcaatagcaatgaagccttctaacaagaacgatctggaaaaattttcaaaaggtattggcaggtttacaagagaagatcccacatttaaagtatactttgacactgagaacaaagagacagttatatctggaatgggagaattacacctggaaatctatgctcagaggctggaaagagagtatggctgtccttgtatcacaggaaagccaaaagttgcctttcgagagaccattactgcccctgtcccgtttgactttacacataaaaaacaatcaggtggtgcaggccagtatggaaaagtaataggtgtcctggagcctctggacccagaggactacactaaattggaattttcagatgaaacattcggatcaaatattccaaagcagtttgtgcctgctgtagaaaaggtaaatttttaaaaaagtgtttttgcatttttacttactaaaaacagtttatcaggtattaaatcatactttgtcttccatcatgttgtctatcacagtttgttttagttacagtcctgtttctctgattgttaagctttccatctgatttagaatctctaattcattaagcagaagagctgtaaatccatgctgtgacaatgatgggaaattattatgtttctgaatcatagttatatttttcttaataaattgaaactactgtattgattgt

SEQ ID NO: 282988 - DNA, 3037 bp, Homo sapiens
agcggagtgctcttacaacattggctgccggcgtgactttgaccgcttcccggtgcgttaccggcagctgaacccacccggcgccacgggactttgacgcgtgctctgcgcttgccatgagactcctgggagccgcagccgtcgcggctctggggcgcggaagggcccccgcctccctaggctggcagaggaagcaggttaattggaaggcctgccgatggtcttcatcaggggtgattcctaatgaaaaaatacgaaatattggaatctcagctcacattgattctgggaaaactacattaacagaacgagtcctttactacactggcagaattgcaaagatgcatgaggtgaaaggtaaagatggagttggtgctgtcatggattccatggaactagagagacaaagaggaatcactattcagtcagcagccacttacaccatgtggaaagatgtcaatattaacattatagatactcctgggcatgtggacttcacaatagaagtggaaagggccctgagagtgttggatggtgcagtccttgttctctgtgctgttggaggggtacagtgccagaccatgactgtcaatcgtcagatgaagcgctacaacgttccgtttctaacttttattaacaaattggaccgaatgggctccaacccagccagggccctgcagcaaatgaggtctaaactaaatcataatgcagcgtttatgcagatacccatgggtttggagggtaattttaaaggtattatagatcttattgaggaacgagccatctattttgatggagactttggtcagattgttcgatatggtgagattccagctgaattaagggcggcggccactgaccaccggcaggagctaattgaatgtgttgccaattcagatgaacagcttggtgagatgtttctggaagaaaaaatcccctcgatttctgatttaaagctagcaattcgaagagctactctgaaaagatcatttactcctgtatttttgggaagcgccttgaagaacaaaggagttcagcctcttttagatgctgttttagaatacctcccaaatccatctgaagtccagaactatgctattctcaataaagaggatgactcaaaagagaaaaccaaaatcctaatgaactccagtagagacaattcccacccatttgtaggcctggcttttaaactggaggtaggtcgatttggacaattaacttatgttcgcagttatcagggagagctaaagaagggtgacaccatctataacacaaggacaagaaagaaagtacggttgcaacggctggctcgcatgcatgccgacatgatggaggatgttgaggaagtatatgccggagacatctgtgcattgtttggcattgactgtgctagtggagacacattcacagacaaagccaacagcggcctttctatggagtcaattcatgttcctgatcctgtcatttcaatagcaatgaagccttctaacaagaacgatctggaaaaattttcaaaaggtattggcaggtttacaagagaagatcccacatttaaagtatactttgacactgagaacaaagagacagttatatctggaatgggagaattacacctggaaatctatgctcagaggctggaaagagagtatggctgtccttgtatcacaggaaagccaaaagttgcctttcgagagaccattactgcccctgtcccgtttgactttacacataaaaaacaatcaggtggtgcaggccagtatggaaaagtaataggtgtcctggagcctctggacccagaggactacactaaattggaattttcagatgaaacattcggatcaaatattccaaagcagtttgtgcctgctgtagaaaaggggtttttagatgcctgcgagaagggccctctttctggtcacaagctctctgggctccggtttgtcctgcaagatggagcacaccacatggttgattctaatgaaatctctttcatccgagcaggagaaggtgctcttaaacaagccttggcaaatgcaacattatgtattcttgaacctattatggctgtggaagttgtagctccaaatgaatttcagggacaagtaattgcaggaattaaccgacgccatggggtaatcactgggcaagatggagttgaggactattttacactgtatgcagatgtccctctaaatgatatgtttggttattccactgaacttaggtcatgcacagagggaaagggagaatacacaatggagtatagcaggtatcagccatgtttaccatccacacaagaagacgtcattaataagtatttggaagctacaggtcaacttcctgttaaaaaaggaaaagccaagaactaactttgcttactgtgagttgactgactctaattgaatctgcgtggttttgatactttgatggattccagtggaataaattcaggctgctgaaacaagaaattctgagcccaggaagcgggctcttctttcttcaaaagaagcccttcttgttcatattcaggagcttctgttatattcaaaggtaattctatgtctatctcaactctattgattggttttatagttcattgaaaatcctcaaataaaatataattattactgaaatatgtttaatatttaaggggaaaagagactaatttcagttatacttttaagcttagaatgtatgttcatttccaaattttgtatcataagagttttcaacatagagaaaagctgaaaaaatgcaaagaataaccacatactttccatctaccttcctttgttaacgggttgtttatcatataataatttgttttgtcatatttgctttcactgtctattatctgtttaagtctcataactctatttttagtttgctgaagacttgaaagtgaatcgcatatatcatgacacttcttggagtgtcattaatgggcaggcttttctgttgaagagtggattccgtatgttcttcatagagagtgtttttcagattcttcattgggatattaaaatattagcca

SEQ ID NO: 282989 - DNA, 2634 bp, Homo sapiens
agcggagtgctcttacaacattggctgccggcgtgactttgaccgcttcccggtgcgttaccggcagctgaacccacccggcgccacgggactttgacgcgtgctctgcgcttgccatgagactcctgggagccgcagccgtcgcggctctggggcgcggaagggcccccgcctccctaggctggcagaggaagcaggttaattggaaggcctgccgatggtcttcatcaggggtgattcctaatgaaaaaatacgaaatattggaatctcagctcacattgattctgggaaaactacattaacagaacgagtcctttactacactggcagaattgcaaagatgcatgaggtgaaaggtaaagatggagttggtgctgtcatggattccatggaactagagagacaaagaggaatcactattcagtcagcagccacttacaccatgtggaaagatgtcaatattaacattatagatactcctgggcatgtggacttcacaatagaagtggaaagggccctgagagtgttggatggtgcagtccttgttctctgtgctgttggaggggtacagtgccagaccatgactgtcaatcgtcagatgaagcgctacaacgttccgtttctaacttttattaacaaattggaccgaatgggctccaacccagccagggccctgcagcaaatgaggtctaaactaaatcataatgcagcgtttatgcagatacccatgggtttggagggtaattttaaaggtattatagatcttattgaggaacgagccatctattttgatggagactttggtcagattgttcgatatggtgagattccagctgaattaagggcggcggccactgaccaccggcaggagctaattgaatgtgttgccaattcagatgaacagcttggtgagatgtttctggaagaaaaaatcccctcgatttctgatttaaagctagcaattcgaagagctactctgaaaagatcatttactcctgtatttttgggaagcgccttgaagaacaaaggagttcagcctcttttagatgctgttttagaatacctcccaaatccatctgaagtccagaactatgctattctcaataaagaggatgactcaaaagagaaaaccaaaatcctaatgaactccagtagagacaattcccacccatttgtaggcctggcttttaaactggaggtaggtcgatttggacaattaacttatgttcgcagttatcagggagagctaaagaagggtgacaccatctataacacaaggacaagaaagaaagtacggttgcaacggctggctcgcatgcatgccgacatgatggaggatgttgaggaagtatatgccggagacatctgtgcattgtttggcattgactgtgctagtggagacacattcacagacaaagccaacagcggcctttctatggagtcaattcatgttcctgatcctgtcatttcaatagcaatgaagccttctaacaagaacgatctggaaaaattttcaaaaggtattggcaggtttacaagagaagatcccacatttaaagtatactttgacactgagaacaaagagacagttatatctggaatgggagaattacacctggaaatctatgctcagaggctggaaagagagtatggctgtccttgtatcacaggaaagccaaaagttgcctttcgagagaccattactgcccctgtcccgtttgactttacacataaaaaacaatcaggtggtgcaggccagtatggaaaagtaataggtgtcctggagcctctggacccagaggactacactaaattggaattttcagatgaaacattcggatcaaatattccaaagcagtttgtgcctgctgtagaaaaggggtttttagatgcctgcgagaagggccctctttctggtcacaagctctctgggctccggtttgtcctgcaagatggagcacaccacatggttgattctaatgaaatctctttcatccgagcaggagaaggtgctcttaaacaagccttggcaaatgcaacattatgtattcttgaacctattatggctgtggaagttgtagctccaaatgaatttcagggacaagtaattgcaggaattaaccgacgccatggggtaatcactgggcaagatggagttgaggactattttacactgtatgcagatgtccctctaaatgatatgtttggttattccactgaacttaggtcatgcacagagggaaagggagaatacacaatggagtatagcaggtatcagccatgtttaccatccacacaagaagacgtcattaataagtatttggaagctacaggtcaacttcctgttaaaaaaggaaaagccaagaactaactttgcttactgtgagttgactgactctaattgaatctgcgtggttttgatactttgatggattccagtggaataaattcaggctgctgaaacaagaaattctgagcccaggaagcgggctcttctttcttcaaaagaagcccttcttgttcatattcaggagcttctgttatattcaaaggtaattctatgtctatctcaactctattgattggttttatagttcattgaaaatcctcaaataaaatataattattactga

SEQ ID NO: 282990 - DNA, 2668 bp, Homo sapiens
  misc_feature (959)..(959): n is a, c, g, or t
  misc_feature (2076)..(2076): n is a, c, g, or t
agcggagtgctcttacaacattggctgccggcgtgactttgaccgcttcccggtgcgttaccggcagctgaacccacccggcgccacgggactttgacgcgtgctctgcgcttgccatgagactcctgggagccgcagccgtcgcggctctggggcgcggaagggcccccgcctccctaggctggcagaggaagcaggttaattggaaggcctgccgatggtcttcatcaggggtgattcctaatgaaaaaatacgaaatattggaatctcagctcacattgattctgggaaaactacattaacagaacgagtcctttactacactggcagaattgcaaagatgcatgaggtgaaaggtaaagatggagttggtgctgtcatggattccatggaactagagagacaaagaggaatcactattcagtcagcagccacttacaccatgtggaaagatgtcaatattaacattatagatactcctgggcatgtggacttcacaatagaagtggaaagggccctgagagtgttggatggtgcagtccttgttctctgtgctgttggaggggtacagtgccagaccatgactgtcaatcgtcagatgaagcgctacaacgttccgtttctaacttttattaacaaattggaccgaatgggctccaacccagccagggccctgcagcaaatgaggtctaaactaaatcataatgcagcgtttatgcagatacccatgggtttggagggtaattttaaaggtattatagatcttattgaggaacgagccatctattttgatggagactttgggtaagtgctaaaaatacattattaaaattttaaattttaaaaagcattaaaaagaaggaaaggataagttcatcaaacgcagagtaactatctttttgaaatgcgactgcaagaatactctgagatggttttgttttaatacctttaatcctantcgctccccattttatttagtatttattctgtgagagactatgttactttttgggtaatatacccatatcacattatggcatgcatggtgtggtagaaggaggccttcagtttgggttagtaaatttgggttagtgaatgtattgtatctttttgcacttgttcatttattcattcattctgtggacttttatagagcagctgccaggtctggggtattgtgataaaaattaggaagaaaatagagatcataaatatttgctcttcctgctttataattacatggacagaaaagattaataaattaaaacagttaaaattgtacaaatgtggtttgggaaatgcaagaaataagttggtaactttttgatgtggtatttggtccatcagctcttgagtgacctttacctacaaagtactgtaattgcctggtagttatcaaaccttagcgttgttcataacaatcccctggagactttgttaaaagacatagtcctggctctacctccagagattctgatcagtagattggggtggggcccgtagtttgcatttctggaaggtttccagttgatgctgctcttacaggtctgcagaccacactttgagtgacactgatctagacaatgtgaggagtcataaatgatcctttgttctgaggagtgacctctgtagcctggtcgtttctccacaggcacttcctgagggatttccttcctctgctatggaattgggatcgcaggtctggcaggtgggcgaatggcattgtgatcagtgaactatagaatttatcttcatcagccatcttgtaagcaggaaaaggatggagtctgtccagtggataaggtgtttctctcactttttatgtaacaactgagtaatgacaacaaagtttacctaccactccttaggatataaggcccagtaaggcagagtttttgtttttcttttttcctactttattcactgctatgtcccagcccctagaacaactagttacaactaggcagttgtaactgcctagtacataatagggactcaaaaatatttgtaaatgaatgaataaatccactttcccagaattaccaaggcacatatttctgttgtcagaagtaganactcttaaactttgttgtacatcagaaccacagatgcagcatcttaatgtacatgtccccttccccagccctagtttactgtatgtgtatttggaaaggaatccacagatgattctgacatgtgaaaggctaagaagcagggagcttgccaggaaggttgaaattaaaatctgaaagttgtggggagtcttagaatattaagtgttactttttgttggaaatggcttcttttgtctttattaaagttaggaatgtgttttctgaaaagcttactttttgatattaatttccatttttaaagaaataccttgaggccaggcgcagtggctcacgcctgtaatcccagcactttggaaggccgaggtgggcagatcacgaggtcaggagatagagaccatcctggctaacacggtgaaacccgtctccattaaaaatacaaaaaattagccgggcgtggtggcgggtgcctgtagttccagctactcgggaggctgaggcaggagaatctcttgaacctgggaggcagagcttgcagtgagccgagatggcaccactgcactccagcctgggtgacagagcgagagtccgtctc

SEQ ID NO: 282991 - DNA, 559 bp, Homo sapiens
gcggccgcccaagcccggctcccacgtcccgctctcggctccccggaggtcggagactttgaggtatctccacgtcaaaccttcatgaggcgacaccgcaagtagctgctgaggacgtagcggatcctctccatctccatttggtggatgctgaccttcaggtcctcccttttggctctcctgagattttcttcctattaaatgagaaattaaggtttataaaaaacatgatgttcaaccatcatcaccggcaacgttgaggacccagactatgtttcagtccaaggaaaacaaaaatatcatgttttatgcttgaaatggctacatctggtttctggtcacacagtggcatgataatggctcactgcattcttgacctccaaggcttaagtgatcctcctgcctcagcctccagagtagctgggactaaaggtacataccacaaagcctggctaatttttaaattttttttaataaagatggggttttaccatgttgcctacagtggtcttcgaaatcctggcctcatgacatccccctgcattagcctccagaagtg

SEQ ID NO: 282992 - DNA, 250 bp, Homo sapiens
ttaaagacaggtagggcagatcaacttcttaaagacctgtccgctagctttctgttccctcaggcaacatgtagtctggggtagcagatgcagaatatcagcaaagaagattcactggcccagcttcaaaagctaaacagaagatgacttcatactttgttctgctaccttcttggattacttctgtggaagcctcgaaaaattataaaaaatgccactccatgatcttgttgaagacatttctgagttt

SEQ ID NO: 282993 - DNA, 344 bp, Homo sapiens
ggtaagaggactttttgtgtccagacagatggcaatactcatccgtatgttgtctgccccagggcaagtgtcacagtgagtacgaataaagcgatcaataatttgtctatctgaaaagtatgaagaaaaacaggatgaaaattttcactttgatgaagtgacacatgcattactgtaacccacgaccacaggatgatatagatcattccttccatcccagaagacccttcatgcaccttcccagtcaacactccctacttcaagacagccactgttctggtttctttcatcaaagataagttttcccagttgtagaccttcaaataaatgaaatcatacagaag

SEQ ID NO: 282994 - DNA, 2199 bp, Homo sapiens
agcagctgcgaggacgcgggccgagccggaagtggagtgtgctgcggcgcgagctgggccggcgggcgtggttcgagagcgcgcagagtccagactggcggcagggcccgaggggccgacccgcagcgtccctggtctctccagccctcactcggaaccgcacagtgacaataccctcccctcccttgggctggacccctctctacagctaggagccaatggcagaagacaaaaccaaaccgagtgagttggaccaagggaagtatgatgctgatgacaacgtgaagatcatctgcctgggagacagcgcagtgggcaaatccaaactcatggagagatttctcatggatggctttcagccacagcagctgtccacgtacgccctgaccctgtacaagcacacagccacggtagatggaaggaccatccttgtggacttttgggacacggcaggccaggagcggttccagagcatgcatgcctcctactaccacaaggcccacgcctgcatcatggtgtttgatgtacagaggaaagtcacctataggaacctgagcacctggtatacagagcttcgggagttcaggccagagatcccatgcatcgtggtggccaataaaattgatgcagacataaacgtgacccaaaaaagcttcaattttgccaagaagttctccctgcccctgtatttcgtctcggctgctgatggtaccaatgttgtgaagctcttcaatgatgcaattcgattagctgtgtcttacaaacagaactcccaggacttcatggatgagatttttcaggagctcgagaacttcagcttggagcaggaagaggaggacgtgccagaccaggaacagagcagcagcatcgagaccccatcagaggaggcggcctctccccacagctgaggggctggggctaggggtgggtggagcccttttaaaatacccttcccttcaacaactctccagctctgaatggagaaactctctaggccatcccctcttctacctcctgcaacccacccatcctattagcctcccacattctaggcccgtgatacagggatgaggtcagcaccagcaaactctggactggtggaagaattccccaccagatctccttgaagcagaagtagggatcagcatcattaacaccttccccaccccctccccgcaggcagacagtgaagagaatcagaaaacatgattatgtgtcactttaatacaggaaatttaggtgttttttggtgtttttgtttttgtttttgttttctttccaaagctcacctcggggacaattccttgggcttctcctgaggtaatgatttacccccccacccacagctgagtctgtgaggccccatcctttccctacgttttctcccatcttttttcctcttcagtctcccagtcatctggtttgtttgtttctttgttcgttctgagacggagtctcgctctgtcgccaggctggagtgcagtggcgcagtctcggctcgctgcaacctctgactccctggttcaaacgattctcctgcctcagcctcccgagtggctggcatcaccacgcccagctaatttttgtatttttagtagagacggggtttcaccatgttgcccaggatggtctcgatctcctcacctcgtgatccgcccgcctcggcctcccaaagtgctgggattacaggcatgagccaccgcgcccggccccaatcatctgtttttaaacaatcgtttttgagcagatagctattcattccagattttcgtgtacccattctgtttcaggagctcttctaggtaaagctgagatcacaggaacagcaggtgacaggcctagctatagttaggaatacacaagccgtaaaatcgagtccttacagccataccacaaggtacgtccatttggactacaagaagagcttcctttaaagttcctatttcagcataaagaggctgtccttttttttgaggaatagtttggaccttgtgcctcctgtgggaggctgaggactgcaagaggagagctagcagatatgcctgttcacccctctctggtacttgtggcttgctagtatgtttttatgataatctcgggcattgtttgcattgtgtttattaatagggttttgtttttgttgtttccttttttacagtaaaggctgaattacataaacattgaaaaaatgtatgtgct

SEQ ID NO: 282995 - DNA, 2551 bp, Homo sapiens
agcagctgcgaggacgcgggccgagccggaagtggagtgtgctgcggcgcgagctgggccggcgggcgtggttcgagagcgcgcagagtccagactggcggcagggcccgaggggccgacccgcagcgtccctggtctctccagccctcactcggaaccgcacagtgacaataccctcccctcccttgggctggacccctctctacagctaggagccaatggcagaagacaaaaccaaaccgagtgagttggaccaagggaagtatgatgctgatgacaacgtgaagatcatctgcctgggagacagcgcagtgggcaaatccaaactcatggagagatttctcatggatggctttcagccacagcagctgtccacgtacgccctgaccctgtacaagcacacagccacggtagatggaaggaccatccttgtggacttttgggacacggcaggccaggagcggttccagagcatgcatgcctcctactaccacaaggcccacgcctgcatcatggtgtttgatgtacagaggaaagtcacctataggaacctgagcacctggtatacagagcttcgggagttcaggccagagatcccatgcatcgtggtggccaataaaattgatggtggggccatccctgcacctgggtgttagcaattcactggggacctgccctcatacatttcctcctccattccccgggcaggcaaccttcagtgattggtcctccctcccacgataagatacaacccttggttggttgcttgcattcttcccaccttataaagaagccagctaagccgacctgccctctttccaagacacagatccctattaactgagctctttctaggacctgtttcccaatcatccctgcctatcccactttctggaatgaaggcctccagtggcccccccctccaaaccttcttcccttcccttgacagacagaccaatgtcctaccttctctctacagcagacataaacgtgacccaaaaaagcttcaattttgccaagaagttctccctgcccctgtatttcgtctcggctgctgatggtaccaatgttgtgaagctcttcaatgatgcaattcgattagctgtgtcttacaaacagaactcccaggacttcatggatgagatttttcaggagctcgagaacttcagcttggagcaggaagaggaggacgtgccagaccaggaacagagcagcagcatcgagaccccatcagaggaggcggcctctccccacagctgaggggctggggctaggggtgggtggagcccttttaaaatacccttcccttcaacaactctccagctctgaatggagaaactctctaggccatcccctcttctacctcctgcaacccacccatcctattagcctcccacattctaggcccgtgatacagggatgaggtcagcaccagcaaactctggactggtggaagaattccccaccagatctccttgaagcagaagtagggatcagcatcattaacaccttccccaccccctccccgcaggcagacagtgaagagaatcagaaaacatgattatgtgtcactttaatacaggaaatttaggtgttttttggtgtttttgtttttgtttttgttttctttccaaagctcacctcggggacaattccttgggcttctcctgaggtaatgatttacccccccacccacagctgagtctgtgaggccccatcctttccctacgttttctcccatcttttttcctcttcagtctcccagtcatctggtttgtttgtttctttgttcgttctgagacggagtctcgctctgtcgccaggctggagtgcagtggcgcagtctcggctcgctgcaacctctgactccctggttcaaacgattctcctgcctcagcctcccgagtggctggcatcaccacgcccagctaatttttgtatttttagtagagacggggtttcaccatgttgcccaggatggtctcgatctcctcacctcgtgatccgcccgcctcggcctcccaaagtgctgggattacaggcatgagccaccgcgcccggccccaatcatctgtttttaaacaatcgtttttgagcagatagctattcattccagattttcgtgtacccattctgtttcaggagctcttctaggtaaagctgagatcacaggaacagcaggtgacaggcctagctatagttaggaatacacaagccgtaaaatcgagtccttacagccataccacaaggtacgtccatttggactacaagaagagcttcctttaaagttcctatttcagcataaagaggctgtccttttttttgaggaatagtttggaccttgtgcctcctgtgggaggctgaggactgcaagaggagagctagcagatatgcctgttcacccctctctggtacttgtggcttgctagtatgtttttatgataatctcgggcattgtttgcattgtgtttattaatagggttttgtttttgttgtttccttttttacagtaaaggctgaattacataaacattgaaaaaatgtatgtgct

SEQ ID NO: 282996 - DNA, 3010 bp, Homo sapiens
agcagctgcgaggacgcgggccgagccggaagtggagtgtgctgcggcgcgagctgggccggcgggcgtggttcgagagcgcgcagagtccagactggcggcagggcccgaggggccgacccgcagcgtccctggtctctccagccctcactcggaaccgcacgtgagggcaaatccgccccggtggctggcttagcacgcggggacagcccctccgaggcctccctagcggtgtgggcgagagggcgtccgggtcgggggaagcacggaaaggtggcttcgcgaggctgttgtggggggcgggacgggcagcctggcgatgcctggacatggttggtggccaaaaacatttatcgaaagatagcttacccacttagatggcaaggacacggacaagcaagtcttcgcccgtaagcggtggctcacgcctatagtccagggatgccgaggagggaggatcgcttgagtccaggagttggaggctgcagtgagccgtgatcgcgccaccgcactccagcctgggcgacagagtgagaccctatctctaaacaaaagaaagaacgtcttcaagcatggagccatgaagctggatttggctttctgtcgctctctctacagggtgagtgacaataccctcccctcccttgggctggacccctctctacagctaggagccaatggcagaagacaaaaccaaaccgagtgagttggaccaagggaagtatgatgctgatgacaacgtgaagatcatctgcctgggagacagcgcagtgggcaaatccaaactcatggagagatttctcatggatggctttcagccacagcagctgtccacgtacgccctgaccctgtacaagcacacagccacggtagatggaaggaccatccttgtggacttttgggacacggcaggccaggagcggttccagagcatgcatgcctcctactaccacaaggcccacgcctgcatcatggtgtttgatgtacagaggaaagtcacctataggaacctgagcacctggtatacagagcttcgggagttcaggccagagatcccatgcatcgtggtggccaataaaattgatggtggggccatccctgcacctgggtgttagcaattcactggggacctgccctcatacatttcctcctccattccccgggcaggcaaccttcagtgattggtcctccctcccacgataagatacaacccttggttggttgcttgcattcttcccaccttataaagaagccagctaagccgacctgccctctttccaagacacagatccctattaactgagctctttctaggacctgtttcccaatcatccctgcctatcccactttctggaatgaaggcctccagtggcccccccctccaaaccttcttcccttcccttgacagacagaccaatgtcctaccttctctctacagcagacataaacgtgacccaaaaaagcttcaattttgccaagaagttctccctgcccctgtatttcgtctcggctgctgatggtaccaatgttgtgaagctcttcaatgatgcaattcgattagctgtgtcttacaaacagaactcccaggacttcatggatgagatttttcaggagctcgagaacttcagcttggagcaggaagaggaggacgtgccagaccaggaacagagcagcagcatcgagaccccatcagaggaggcggcctctccccacagctgaggggctggggctaggggtgggtggagcccttttaaaatacccttcccttcaacaactctccagctctgaatggagaaactctctaggccatcccctcttctacctcctgcaacccacccatcctattagcctcccacattctaggcccgtgatacagggatgaggtcagcaccagcaaactctggactggtggaagaattccccaccagatctccttgaagcagaagtagggatcagcatcattaacaccttccccaccccctccccgcaggcagacagtgaagagaatcagaaaacatgattatgtgtcactttaatacaggaaatttaggtgttttttggtgtttttgtttttgtttttgttttctttccaaagctcacctcggggacaattccttgggcttctcctgaggtaatgatttacccccccacccacagctgagtctgtgaggccccatcctttccctacgttttctcccatcttttttcctcttcagtctcccagtcatctggtttgtttgtttctttgttcgttctgagacggagtctcgctctgtcgccaggctggagtgcagtggcgcagtctcggctcgctgcaacctctgactccctggttcaaacgattctcctgcctcagcctcccgagtggctggcatcaccacgcccagctaatttttgtatttttagtagagacggggtttcaccatgttgcccaggatggtctcgatctcctcacctcgtgatccgcccgcctcggcctcccaaagtgctgggattacaggcatgagccaccgcgcccggccccaatcatctgtttttaaacaatcgtttttgagcagatagctattcattccagattttcgtgtacccattctgtttcaggagctcttctaggtaaagctgagatcacaggaacagcaggtgacaggcctagctatagttaggaatacacaagccgtaaaatcgagtccttacagccataccacaaggtacgtccatttggactacaagaagagcttcctttaaagttcctatttcagcataaagaggctgtccttttttttgaggaatagtttggaccttgtgcctcctgtgggaggctgaggactgcaagaggagagctagcagatatgcctgttcacccctctctggtacttgtggcttgctagtatgtttttatgataatctcgggcattgtttgcattgtgtttattaatagggttttgtttttgttgtttccttttttacagtaaaggctgaattacataaacattgaaaaaatgtatgtgct

SEQ ID NO: 282997 - DNA, 2379 bp, Homo sapiens
  misc_feature (20)..(20): n is a, c, g, or t
gaccatagaggatcccgccntgtaccctctctacagctaggagccaatggcagaagacaaaaccaaaccgagtgagttggaccaagggaagtatgatgctgatgacaacgtgaagatcatctgcctgggagacagcgcagtgggcaaatccaaactcatggagagatttctcatggatggctttcagccacagcagctgtccacgtacgccctgaccctgtacaagcacacagccacggtagatggaaggaccatccttgtggacttttgggacacggcaggccaggagcggttccagagcatgcatgcctcctactaccacaaggcccacgcctgcatcatggtgtttgatgtacagaggaaagtcacctataggaacctgagcacctggtatacagagcttcgggagttcaggccagagatcccatgcatcgtggtggccaataaaattgatggtggggccatccctgcacctgggtgttagcaattcactggggacctgccctcatacatttcctcctccattccccgggcaggcaaccttcagtgattggtcctccctcccacgataagatacaacccttggttggttgcttgcattcttcccaccttataaagaagccagctaagccgacctgccctctttccaagacacagatccctattaactgagctctttctaggacctgtttcccaatcatccctgcctatcccactttctggaatgaaggcctccagtggcccccccctccaaaccttcttcccttcccttgacagacagaccaatgtcctaccttctctctacagcagacataaacgtgacccaaaaaagcttcaattttgccaagaagttctccctgcccctgtatttcgtctcggctgctgatggtaccaatgttgtgaagctcttcaatgatgcaattcgattagctgtgtcttacaaacagaactcccaggacttcatggatgagatttttcaggagctcgagaacttcagcttggagcaggaagaggaggacgtgccagaccaggaacagagcagcagcatcgagaccccatcagaggaggcggcctctccccacagctgaggggctggggctaggggtgggtggagcccttttaaaatacccttcccttcaacaactctccagctctgaatggagaaactctctaggccatcccctcttctacctcctgcaacccacccatcctattagcctcccacattctaggcccgtgatacagggatgaggtcagcaccagcaaactctggactggtggaagaattccccaccagatctccttgaagcagaagtagggatcagcatcattaacaccttccccaccccctccccgcaggcagacagtgaagagaatcagaaaacatgattatgtgtcactttaatacaggaaatttaggtgttttttggtgtttttgtttttgtttttgttttctttccaaagctcacctcggggacaattccttgggcttctcctgaggtaatgatttacccccccacccacagctgagtctgtgaggccccatcctttccctacgttttctcccatcttttttcctcttcagtctcccagtcatctggtttgtttgtttctttgttcgttctgagacggagtctcgctctgtcgccaggctggagtgcagtggcgcagtctcggctcgctgcaacctctgactccctggttcaaacgattctcctgcctcagcctcccgagtggctggcatcaccacgcccagctaatttttgtatttttagtagagacggggtttcaccatgttgcccaggatggtctcgatctcctcacctcgtgatccgcccgcctcggcctcccaaagtgctgggattacaggcatgagccaccgcgcccggccccaatcatctgtttttaaacaatcgtttttgagcagatagctattcattccagattttcgtgtacccattctgtttcaggagctcttctaggtaaagctgagatcacaggaacagcaggtgacaggcctagctatagttaggaatacacaagccgtaaaatcgagtccttacagccataccacaaggtacgtccatttggactacaagaagagcttcctttaaagttcctatttcagcataaagaggctgtccttttttttgaggaatagtttggaccttgtgcctcctgtgggaggctgaggactgcaagaggagagctagcagatatgcctgttcacccctctctggtacttgtggcttgctagtatgtttttatgataatctcgggcattgtttgcattgtgtttattaatagggttttgtttttgttgtttccttttttacagtaaaggctgaattacataaacattgaaaaaatgtatgtgct

SEQ ID NO: 282998 - DNA, 3162 bp, Homo sapiens
agcagctgcgaggacgcgggccgagccggaagtggagtgtgctgcggcgcgagctgggccggcgggcgtggttcgagagcgcgcagagtccagactggcggcagggcccgaggggccgacccgcagcgtccctggtctctccagccctcactcggaaccgcacgtgagggcaaatccgccccggtggctggcttagcacgcggggacagcccctccgaggcctccctagcggtgtgggcgagagggcgtccgggtcgggggaagcacggaaaggtggcttcgcgaggctgttgtggggggcgggacgggcagcctggcgatgcctggacatggttggtggccaaaaacatttatcgaaagatagcttacccacttagatggcaaggacacggacaagcaagtcttcgcccgtaagcggtggctcacgcctatagtccagggatgccgaggagggaggatcgcttgagtccaggagttggaggctgcagtgagccgtgatcgcgccaccgcactccagcctgggcgacagagtgagaccctatctctaaacaaaagaaagaacgtcttcaagcatggagccatgaagctggatttggctttctgtcgctctctctacagggtgacaggtgaaagggggcagacccctcatcatgctttccaggcatctgccacttcccaggaattgtctccctggataaacaaggcgaagtccctggctgtgcagaagcagtagctgtgtggtggcacagtcaggaaaactcgggggccctgttgagtgacaataccctcccctcccttgggctggacccctctctacagctaggagccaatggcagaagacaaaaccaaaccgagtgagttggaccaagggaagtatgatgctgatgacaacgtgaagatcatctgcctgggagacagcgcagtgggcaaatccaaactcatggagagatttctcatggatggctttcagccacagcagctgtccacgtacgccctgaccctgtacaagcacacagccacggtagatggaaggaccatccttgtggacttttgggacacggcaggccaggagcggttccagagcatgcatgcctcctactaccacaaggcccacgcctgcatcatggtgtttgatgtacagaggaaagtcacctataggaacctgagcacctggtatacagagcttcgggagttcaggccagagatcccatgcatcgtggtggccaataaaattgatggtggggccatccctgcacctgggtgttagcaattcactggggacctgccctcatacatttcctcctccattccccgggcaggcaaccttcagtgattggtcctccctcccacgataagatacaacccttggttggttgcttgcattcttcccaccttataaagaagccagctaagccgacctgccctctttccaagacacagatccctattaactgagctctttctaggacctgtttcccaatcatccctgcctatcccactttctggaatgaaggcctccagtggcccccccctccaaaccttcttcccttcccttgacagacagaccaatgtcctaccttctctctacagcagacataaacgtgacccaaaaaagcttcaattttgccaagaagttctccctgcccctgtatttcgtctcggctgctgatggtaccaatgttgtgaagctcttcaatgatgcaattcgattagctgtgtcttacaaacagaactcccaggacttcatggatgagatttttcaggagctcgagaacttcagcttggagcaggaagaggaggacgtgccagaccaggaacagagcagcagcatcgagaccccatcagaggaggcggcctctccccacagctgaggggctggggctaggggtgggtggagcccttttaaaatacccttcccttcaacaactctccagctctgaatggagaaactctctaggccatcccctcttctacctcctgcaacccacccatcctattagcctcccacattctaggcccgtgatacagggatgaggtcagcaccagcaaactctggactggtggaagaattccccaccagatctccttgaagcagaagtagggatcagcatcattaacaccttccccaccccctccccgcaggcagacagtgaagagaatcagaaaacatgattatgtgtcactttaatacaggaaatttaggtgttttttggtgtttttgtttttgtttttgttttctttccaaagctcacctcggggacaattccttgggcttctcctgaggtaatgatttacccccccacccacagctgagtctgtgaggccccatcctttccctacgttttctcccatcttttttcctcttcagtctcccagtcatctggtttgtttgtttctttgttcgttctgagacggagtctcgctctgtcgccaggctggagtgcagtggcgcagtctcggctcgctgcaacctctgactccctggttcaaacgattctcctgcctcagcctcccgagtggctggcatcaccacgcccagctaatttttgtatttttagtagagacggggtttcaccatgttgcccaggatggtctcgatctcctcacctcgtgatccgcccgcctcggcctcccaaagtgctgggattacaggcatgagccaccgcgcccggccccaatcatctgtttttaaacaatcgtttttgagcagatagctattcattccagattttcgtgtacccattctgtttcaggagctcttctaggtaaagctgagatcacaggaacagcaggtgacaggcctagctatagttaggaatacacaagccgtaaaatcgagtccttacagccataccacaaggtacgtccatttggactacaagaagagcttcctttaaagttcctatttcagcataaagaggctgtccttttttttgaggaatagtttggaccttgtgcctcctgtgggaggctgaggactgcaagaggagagctagcagatatgcctgttcacccctctctggtacttgtggcttgctagtatgtttttatgataatctcgggcattgtttgcattgtgtttattaatagggttttgtttttgttgtttccttttttacagtaaaggctgaattacataaacattgaaaaaatgtatgtgct

SEQ ID NO: 282999 - DNA, 2951 bp, Homo sapiens
agcagctgcgaggacgcgggccgagccggaagtggagtgtgctgcggcgcgagctgggccggcgggcgtggttcgagagcgcgcagagtccagactggcggcagggcccgaggggccgacccgcagcgtccctggtctctccagccctcactcggaaccgcacagtgacaataccctcccctcccttgggctggacccctctctacagctaggagccaatggcagaagacaaaaccaaaccgagtgagttggaccaagggaagtatgatgctgatgacaacgtgaagatcatctgcctgggagacagcgcagtgggcaaatccaaactcatggagagatttctcatggatggctttcagccacagcagctgtccacgtacgccctgaccctgtacaagcacacagccacggtagatggaaggaccatccttgtggacttttgggacacggcaggccaggagcggttccagagcatgcatgcctcctactaccacaaggcccacgcctgcatcatgtgactgcttcctgcatctgctgcatctccgtgggctcccctcagaccctcttctgaaggcctggggtgtctctcctgccaccatgcctgtgtctgcaggtgcctgccaccagccccagtctgctgcacgggccctggcgagtagaaagcacttgccttctgaccacacggggagctgagggtcagagacggaaccagggctcgaccctccaccttgaaaccttgagatggggatgctcctcattctagccagctcctcctcagctctcaaaacaaggaacagatgctcaggaaaccagacctggacaaaaggcatctgagcctggtgtgaggcagattccagaagtttagttacagacatcctttataaggagtcttcatcgggaattcaagacaacctggtgtttgatgtacagaggaaagtcacctataggaacctgagcacctggtatacagagcttcgggagttcaggccagagatcccatgcatcgtggtggccaataaaattgatggtggggccatccctgcacctgggtgttagcaattcactggggacctgccctcatacatttcctcctccattccccgggcaggcaaccttcagtgattggtcctccctcccacgataagatacaacccttggttggttgcttgcattcttcccaccttataaagaagccagctaagccgacctgccctctttccaagacacagatccctattaactgagctctttctaggacctgtttcccaatcatccctgcctatcccactttctggaatgaaggcctccagtggcccccccctccaaaccttcttcccttcccttgacagacagaccaatgtcctaccttctctctacagcagacataaacgtgacccaaaaaagcttcaattttgccaagaagttctccctgcccctgtatttcgtctcggctgctgatggtaccaatgttgtgaagctcttcaatgatgcaattcgattagctgtgtcttacaaacagaactcccaggacttcatggatgagatttttcaggagctcgagaacttcagcttggagcaggaagaggaggacgtgccagaccaggaacagagcagcagcatcgagaccccatcagaggaggcggcctctccccacagctgaggggctggggctaggggtgggtggagcccttttaaaatacccttcccttcaacaactctccagctctgaatggagaaactctctaggccatcccctcttctacctcctgcaacccacccatcctattagcctcccacattctaggcccgtgatacagggatgaggtcagcaccagcaaactctggactggtggaagaattccccaccagatctccttgaagcagaagtagggatcagcatcattaacaccttccccaccccctccccgcaggcagacagtgaagagaatcagaaaacatgattatgtgtcactttaatacaggaaatttaggtgttttttggtgtttttgtttttgtttttgttttctttccaaagctcacctcggggacaattccttgggcttctcctgaggtaatgatttacccccccacccacagctgagtctgtgaggccccatcctttccctacgttttctcccatcttttttcctcttcagtctcccagtcatctggtttgtttgtttctttgttcgttctgagacggagtctcgctctgtcgccaggctggagtgcagtggcgcagtctcggctcgctgcaacctctgactccctggttcaaacgattctcctgcctcagcctcccgagtggctggcatcaccacgcccagctaatttttgtatttttagtagagacggggtttcaccatgttgcccaggatggtctcgatctcctcacctcgtgatccgcccgcctcggcctcccaaagtgctgggattacaggcatgagccaccgcgcccggccccaatcatctgtttttaaacaatcgtttttgagcagatagctattcattccagattttcgtgtacccattctgtttcaggagctcttctaggtaaagctgagatcacaggaacagcaggtgacaggcctagctatagttaggaatacacaagccgtaaaatcgagtccttacagccataccacaaggtacgtccatttggactacaagaagagcttcctttaaagttcctatttcagcataaagaggctgtccttttttttgaggaatagtttggaccttgtgcctcctgtgggaggctgaggactgcaagaggagagctagcagatatgcctgttcacccctctctggtacttgtggcttgctagtatgtttttatgataatctcgggcattgtttgcattgtgtttattaatagggttttgtttttgttgtttccttttttacagtaaaggctgaattacataaacattgaaaaaatgtatgtgct

SEQ ID NO: 283000 - DNA, 2369 bp, Homo sapiens
agcagctgcgaggacgcgggccgagccggaagtggagtgtgctgcggcgcgagctgggccggcgggcgtggttcgagagcgcgcagagtccagactggcggcagggcccgaggggccgacccgcagcgtccctggtctctccagccctcactcggaaccgcacacaggtgaaagggggcagacccctcatcatgctttccaggcatctgccacttcccaggaattgtctccctggataaacaaggcgaagtccctggctgtgcagaagcagtagctgtgtggtggcacagtcaggaaaactcgggggccctgttgagtgacaataccctcccctcccttgggctggacccctctctacagctaggagccaatggcagaagacaaaaccaaaccgagtgagttggaccaagggaagtatgatgctgatgacaacgtgaagatcatctgcctgggagacagcgcagtgggcaaatccaaactcatggagagatttctcatggatggctttcagccacagcagctgtccacgtacgccctgaccctgtacaagcacacagccacggtagatggaaggaccatccttgtggacttttgggacacggcaggccaggagcggttccagagcatgcatgcctcctactaccacaaggcccacgcctgcatcatggtgtttgatgtacagaggaaagtcacctataggaacctgagcacctggtatacagagcttcgggagttcaggccagagatcccatgcatcgtggtggccaataaaattgatgcagacataaacgtgacccaaaaaagcttcaattttgccaagaagttctccctgcccctgtatttcgtctcggctgctgatggtaccaatgttgtgaaggtgtggttgactgcagagctcttcaatgatgcaattcgattagctgtgtcttacaaacagaactcccaggacttcatggatgagatttttcaggagctcgagaacttcagcttggagcaggaagaggaggacgtgccagaccaggaacagagcagcagcatcgagaccccatcagaggaggcggcctctccccacagctgaggggctggggctaggggtgggtggagcccttttaaaatacccttcccttcaacaactctccagctctgaatggagaaactctctaggccatcccctcttctacctcctgcaacccacccatcctattagcctcccacattctaggcccgtgatacagggatgaggtcagcaccagcaaactctggactggtggaagaattccccaccagatctccttgaagcagaagtagggatcagcatcattaacaccttccccaccccctccccgcaggcagacagtgaagagaatcagaaaacatgattatgtgtcactttaatacaggaaatttaggtgttttttggtgtttttgtttttgtttttgttttctttccaaagctcacctcggggacaattccttgggcttctcctgaggtaatgatttacccccccacccacagctgagtctgtgaggccccatcctttccctacgttttctcccatcttttttcctcttcagtctcccagtcatctggtttgtttgtttctttgttcgttctgagacggagtctcgctctgtcgccaggctggagtgcagtggcgcagtctcggctcgctgcaacctctgactccctggttcaaacgattctcctgcctcagcctcccgagtggctggcatcaccacgcccagctaatttttgtatttttagtagagacggggtttcaccatgttgcccaggatggtctcgatctcctcacctcgtgatccgcccgcctcggcctcccaaagtgctgggattacaggcatgagccaccgcgcccggccccaatcatctgtttttaaacaatcgtttttgagcagatagctattcattccagattttcgtgtacccattctgtttcaggagctcttctaggtaaagctgagatcacaggaacagcaggtgacaggcctagctatagttaggaatacacaagccgtaaaatcgagtccttacagccataccacaaggtacgtccatttggactacaagaagagcttcctttaaagttcctatttcagcataaagaggctgtccttttttttgaggaatagtttggaccttgtgcctcctgtgggaggctgaggactgcaagaggagagctagcagatatgcctgttcacccctctctggtacttgtggcttgctagtatgtttttatgataatctcgggcattgtttgcattgtgtttattaatagggttttgtttttgttgtttccttttttacagtaaaggctgaattacataaacattgaaaaaatgtatgtgct

SEQ ID NO: 283001 - DNA, 2149 bp, Homo sapiens
agcagctgcgaggacgcgggccgagccggaagtggagtgtgctgcggcgcgagctgggccggcgggcgtggttcgagagcgcgcagagtccagactggcggcagggcccgaggggccgacccgcagcgtccctggtctctccagccctcactcggaaccgcacagtgacaataccctcccctcccttgggctggacccctctctacagctaggagccaatggcagaagacaaaaccaaaccgagtgagttggaccaagggaagtatgatgctgatgacaacgtgaagatcatctgcctgggagacagcgcagtgggcaaatccaaactcatggagagatttctcatggatggctttcagccacagcagctgtccacgtacgccctgaccctgtacaagcacacagccacggtagatggaaggaccatccttgtggacttttgggacacggcaggccaggagcggttccagagcatgcatgcctcctactaccacaaggcccacgcctgcatcatggtgtttgatgtacagaggaaagtcacctataggaacctgagcacctggtatacagagcttcgggagttcaggccagagatcccatgcatcgtggtggccaataaaattgatgcagacataaacgtgacccaaaaaagcttcaattttgccaagaagttctccctgcccctgtatttcgtctcggctgctgatggtaccaatgttgtgaagctcttcaatgatgcaattcgattagctgtgtcttacaaacagaactcccaggacttcatggatgagatttttcaggagctcgagaacttcagcttggagcaggaagaggaggacgtgccagaccaggaacagagcagcagcatcgagaccccatcagaggaggcggcctctccccacagctgaggggctggggctaggggtgggtggagcccttttaaaatacccttcccttcaacaactctccagctctgaatggagaaactctctaggccatcccctcttctacctcctgcaacccacccatcctattagcctcccacattctaggcccgtgatacagggatgaggtcagcaccagcaaactctggactggtggaagaattccccaccagatctccttgaagcagaagtagggatcagcatcattaacaccttccccaccccctccccgcaggcagacagtgaagagaatcagaaaacatgattatgtgtcactttaatacaggaaatttaggtgttttttggtgtttttgtttttgtttttgttttctttccaaagctcacctcggggacaattccttgggcttctcctgaggtaatgatttacccccccacccacagctgagtctgtgaggccccatcctttccctacgttttctcccatcttttttcctcttcagtctcccagtcatctggtttgtttgtttctttgttcgttctgagacggagtctcgctctgtcgccaggctggagtgcagtggcgcagtctcggctcgctgcaacctctgactccctggttcaaacgattctcctgcctcagcctcccgagtggctggcatcaccacgcccagctaatttttgtatttttagtagagacggggtttcaccatgttgcccaggatggtctcgatctcctcacctcgtgatccgcccgcctcggcctcccaaagtgctgggattacaggcatgagccaccgcgcccggccccaatcatctgtttttaaacaatcgtttttgagcagatagctattcattccagattttcgtgtacccattctgtttcaggagctcttctaggtaaagctgagatcacaggaacagcaggtgacaggcctagctatagttaggaatacacaagccgtaaaatcgagtccttacagccataccacaaggtacgtccatttggactacaagaagagcttcctttaaagttcctatttcagcataaagaggctgaggactgcaagaggagagctagcagatatgcctgttcacccctctctggtacttgtggcttgctagtatgtttttatgataatctcgggcattgtttgcattgtgtttattaatagggttttgtttttgttgtttccttttttacagtaaaggctgaattacataaacattgaaaaaatgtatgtgct

SEQ ID NO: 283002 - DNA, 1286 bp, Homo sapiens
agcagctgcgaggacgcgggccgagccggaagtggagtgtgctgcggcgcgagctgggccggcgggcgtggttcgagagcgcgcagagtccagactggcggcagggcccgaggggccgacccgcagcgtccctggtctctccagccctcactcggaaccgcacagtgacaataccctcccctcccttgggctggacccctctctacagctaggagccaatggcagaagacaaaaccaaaccgagtgagttggaccaagggaagtatgatgctgatgacaacgtgaagatcatctgcctgggagacagcgcagtgggcaaatccaaactcatggagagatttctcatggatggctttcagccacagcagctgtccacgtacgccctgaccctgtacaagcacacagccacggtagatggaaggaccatccttgtggacttttgggacacggcaggccaggagcggttccagagcatgcatgcctcctactaccacaaggcccacgcctgcatcatggtgtttgatgtacagaggaaagtcacctataggaacctgagcacctggtatacagagcttcgggagttcaggccagagatcccatgcatcgtggtggccaataaaattgatgcagacataaacgtgacccaaaaaagcttcaattttgccaagaagttctccctgcccctgtatttcgtctcggctgctgatggtaccaatgttgtgaagctcttcaatgatgcaattcgattagctgtgtcttacaaacagaactcccaggacttcatggatgagatttttcaggagctcgagaacttcagcttggagcaggaagaggaggacgtgccagaccaggaacagagcagcagcatcgagaccccatcagaggaggcggcctctccccacagctgaggggctggggctaggggtgggtggagcccttttaaaatacccttcccttcaacaactctccagctctgaatggagaaactctctaggccatcccctcttctacctcctgcaacccacccatcctattagcctcccacattctaggcccgtgatacagggatgaggtcagcaccagcaaactctggactggtggaagaattccccaccagatctccttgaagcagaagtagggatcagcatcattaacaccttccccaccccctccccgcaggcagacagtgaagagaatcagaaaacatgattatgtgtcactttaatacaggaaatttaggtgttaaaaaaaaaaaagtcgacgcggccgcgaatttagtagtagta

SEQ ID NO: 283003 - DNA, 983 bp, Homo sapiens
agcagctgcgaggacgcgggccgagccggaagtggagtgtgctgcggcgcgagctgggccggcgggcgtggttcgagagcgcgcagagtccagactggcggcagggcccgaggggccgacccgcagcgtccctggtctctccagccctcactcggaaccgcacagtgacaataccctcccctcccttgggctggacccctctctacagctaggagccaatggcagaagacaaaaccaaaccgagtgagttggaccaagggaagtatgatgctgatgacaacgtgaagatcatctgcctgggagacagcgcagtgggcaaatccaaactcatggagagatttctcatggatggctttcagccacagcagctgtccacgtacgccctgaccctgtacaagcacacagccacggtagatggaaggaccatccttgtggacttttgggacacggcaggccaggagcggttccagagcatgcatgcctcctactaccacaaggcccacgcctgcatcatggtgtttgatgtacagaggaaagtcacctataggaacctgagcacctggtatacagagcttcgggagttcaggccagagatcccatgcatcgtggtggccaataaaattgatgcagacataaacgtgacccaaaaaagcttcaattttgccaagaagttctccctgcccctgtatttcgtctcggctgctgatggtaccaatgttgtgaaggtgtggttgactgcagagctcttcaatgatgcaattcgattagctgtgtcttacaaacagaactcccaggacttcatggatgagatttttcaggagctcgagaacttcagcttggagcaggaagaggaggacgtgccagaccaggaacagagcagcagcatcgagaccccatcagaggaggcggcctctccccacagctgaggggctggggctagggtaaaggctgaattacataaacattgaaaaaatgtatgtgct

SEQ ID NO: 283004 - DNA, 445 bp, Homo sapiens
gttggaccaagggaagtatgatgctgatgacaacgtgaagatcatctgcctgggagacagcgcagtgggcaaatccaagtatgttgggagattagggaataaataccagccccagagagggtccaggtcatttaaaaagtcctccagaggcagaggagcatggcttcttggggctggtgaaggagcagtcttggctggagcccagatgttcatgggggaacgaggggaatcacgtgagccgttgtgtgtgtcaggtggagggggcaggtcataaggactgaggaatttgaatgtttcctctgagccctgagagaacgtgtggagcaactgaggacattgtatgtggtttgtgggctgagggatggcaagggcggggagtgggaatggaaagacaaaagtgactatgccaccgtgacagattgggtaaaggtggtaaagatgcttt

SEQ ID NO: 283005 - DNA, 864 bp, Homo sapiens
agcagctgcgaggacgcgggccgagccggaagtggagtgtgctgcggcgcgagctgggccggcgggcgtggttcgagagcgcgcagagtccagactggcggcagggcccgaggggccgacccgcagcgtccctggtctctccagccctcactcggaaccgcacgtgagggcaaatccgccccggtggctggcttagcacgcggggacagcccctccgaggcctccctagcggtgtgggcgagagggcgtccgggtcgggggaagcacggaaaggtggcttcgcgaggctgttgtggggggcgggacgggcagcctggcgatgcctggacatggttggtggccaaaaacatttatcgaaagatagcttacccacttagatggcaaggacacggacaagcaagtcttcgcccgtaagcggtggctcacgcctatagtccagggatgccgaggagggaggatcgcttgagtccaggagttggaggctgcagtgagccgtgatcgcgccaccgcactccagcctgggcgacagagtgagaccctatctctaaacaaaagaaagaacgtcttcaagcatggagccatgaagctggatttggctttctgtcgctctctctacagggtgacaggtgaaagggggcagacccctcatcatgctttccaggcatctgccacttcccaggaattgtctccctggataaacaaggcgaagtccctggctgtgcagaagcagtagctgtgtggtggcacagtcaggaaaactcgggggccctgttggtattttctacccctgacccgtgtgcatacttctgtcgtagctctcaccacagtagactctgctatcattgtgtcttccatcctctgaac

SEQ ID NO: 283006 - DNA, 2796 bp, Homo sapiens
agcagctgcgaggacgcgggccgagccggaagtggagtgtgctgcggcgcgagctgggccggcgggcgtggttcgagagcgcgcagagtccagactggcggcagggcccgaggggccgacccgcagcgtccctggtctctccagccctcactcggaaccgcacatggcaaggacacggacaagcaagtcttcgcccgtaagcggtggctcacgcctatagtccagggatgccgaggagggaggatcgcttgagtccaggagttggaggctgcagtgagccgtgatcgcgccaccgcactccagcctgggcgacagagtgagaccctatctctaaacaaaagaaagaacgtcttcaagcatggagccatgaagctggatttggctttctgtcgctctctctacagggtgagtgacaataccctcccctcccttgggctggacccctctctacagctaggagccaatggcagaagacaaaaccaaaccgagtgagttggaccaagggaagtatgatgctgatgacaacgtgaagatcatctgcctgggagacagcgcagtgggcaaatccaaactcatggagagatttctcatggatggctttcagccacagcagctgtccacgtacgccctgaccctgtacaagcacacagccacggtagatggaaggaccatccttgtggacttttgggacacggcaggccaggagcggttccagagcatgcatgcctcctactaccacaaggcccacgcctgcatcatggtgtttgatgtacagaggaaagtcacctataggaacctgagcacctggtatacagagcttcgggagttcaggccagagatcccatgcatcgtggtggccaataaaattgatggtggggccatccctgcacctgggtgttagcaattcactggggacctgccctcatacatttcctcctccattccccgggcaggcaaccttcagtgattggtcctccctcccacgataagatacaacccttggttggttgcttgcattcttcccaccttataaagaagccagctaagccgacctgccctctttccaagacacagatccctattaactgagctctttctaggacctgtttcccaatcatccctgcctatcccactttctggaatgaaggcctccagtggcccccccctccaaaccttcttcccttcccttgacagacagaccaatgtcctaccttctctctacagcagacataaacgtgacccaaaaaagcttcaattttgccaagaagttctccctgcccctgtatttcgtctcggctgctgatggtaccaatgttgtgaagctcttcaatgatgcaattcgattagctgtgtcttacaaacagaactcccaggacttcatggatgagatttttcaggagctcgagaacttcagcttggagcaggaagaggaggacgtgccagaccaggaacagagcagcagcatcgagaccccatcagaggaggcggcctctccccacagctgaggggctggggctaggggtgggtggagcccttttaaaatacccttcccttcaacaactctccagctctgaatggagaaactctctaggccatcccctcttctacctcctgcaacccacccatcctattagcctcccacattctaggcccgtgatacagggatgaggtcagcaccagcaaactctggactggtggaagaattccccaccagatctccttgaagcagaagtagggatcagcatcattaacaccttccccaccccctccccgcaggcagacagtgaagagaatcagaaaacatgattatgtgtcactttaatacaggaaatttaggtgttttttggtgtttttgtttttgtttttgttttctttccaaagctcacctcggggacaattccttgggcttctcctgaggtaatgatttacccccccacccacagctgagtctgtgaggccccatcctttccctacgttttctcccatcttttttcctcttcagtctcccagtcatctggtttgtttgtttctttgttcgttctgagacggagtctcgctctgtcgccaggctggagtgcagtggcgcagtctcggctcgctgcaacctctgactccctggttcaaacgattctcctgcctcagcctcccgagtggctggcatcaccacgcccagctaatttttgtatttttagtagagacggggtttcaccatgttgcccaggatggtctcgatctcctcacctcgtgatccgcccgcctcggcctcccaaagtgctgggattacaggcatgagccaccgcgcccggccccaatcatctgtttttaaacaatcgtttttgagcagatagctattcattccagattttcgtgtacccattctgtttcaggagctcttctaggtaaagctgagatcacaggaacagcaggtgacaggcctagctatagttaggaatacacaagccgtaaaatcgagtccttacagccataccacaaggtacgtccatttggactacaagaagagcttcctttaaagttcctatttcagcataaagaggctgtccttttttttgaggaatagtttggaccttgtgcctcctgtgggaggctgaggactgcaagaggagagctagcagatatgcctgttcacccctctctggtacttgtggcttgctagtatgtttttatgataatctcgggcattgtttgcattgtgtttattaatagggttttgtttttgttgtttccttttttacagtaaaggctgaattacataaacattgaaaaaatgtatgtgct

SEQ ID NO: 283007 - DNA, 2810 bp, Homo sapiens
cccagtaaggctcacctattgctgctgtctcatcatcatatcatttctatgtgcccccctagctaagagtctggactgtggttacattctcaggaatgtttgcaaagtcatatttaggtgtgaggagagtaaaacagagctagacataatgttgcacacagcctttggcactggatgcctggtgaatgtcttgtgcaaatgggtaacgtgaggagcagcatttggggtgcgcaggacttaactatttgtgtataacatattattgatgcctgtgtgtcatactctgctactccaagtctagtagtcaattgcataccatatctcagtctggcactgagggaagcagtctggagggaggtacagctggagatttggttgaggggacttatctctgacaacagcctcttgttgatcttcccagaagtgacaataccctcccctcccttgggctggacccctctctacagctaggagccaatggcagaagacaaaaccaaaccgagtgagttggaccaagggaagtatgatgctgatgacaacgtgaagatcatctgcctgggagacagcgcagtgggcaaatccaaactcatggagagatttctcatggatggctttcagccacagcagctgtccacgtacgccctgaccctgtacaagcacacagccacggtagatggaaggaccatccttgtggacttttgggacacggcaggccaggagcggttccagagcatgcatgcctcctactaccacaaggcccacgcctgcatcatggtgtttgatgtacagaggaaagtcacctataggaacctgagcacctggtatacagagcttcgggagttcaggccagagatcccatgcatcgtggtggccaataaaattgatggtggggccatccctgcacctgggtgttagcaattcactggggacctgccctcatacatttcctcctccattccccgggcaggcaaccttcagtgattggtcctccctcccacgataagatacaacccttggttggttgcttgcattcttcccaccttataaagaagccagctaagccgacctgccctctttccaagacacagatccctattaactgagctctttctaggacctgtttcccaatcatccctgcctatcccactttctggaatgaaggcctccagtggcccccccctccaaaccttcttcccttcccttgacagacagaccaatgtcctaccttctctctacagcagacataaacgtgacccaaaaaagcttcaattttgccaagaagttctccctgcccctgtatttcgtctcggctgctgatggtaccaatgttgtgaagctcttcaatgatgcaattcgattagctgtgtcttacaaacagaactcccaggacttcatggatgagatttttcaggagctcgagaacttcagcttggagcaggaagaggaggacgtgccagaccaggaacagagcagcagcatcgagaccccatcagaggaggcggcctctccccacagctgaggggctggggctaggggtgggtggagcccttttaaaatacccttcccttcaacaactctccagctctgaatggagaaactctctaggccatcccctcttctacctcctgcaacccacccatcctattagcctcccacattctaggcccgtgatacagggatgaggtcagcaccagcaaactctggactggtggaagaattccccaccagatctccttgaagcagaagtagggatcagcatcattaacaccttccccaccccctccccgcaggcagacagtgaagagaatcagaaaacatgattatgtgtcactttaatacaggaaatttaggtgttttttggtgtttttgtttttgtttttgttttctttccaaagctcacctcggggacaattccttgggcttctcctgaggtaatgatttacccccccacccacagctgagtctgtgaggccccatcctttccctacgttttctcccatcttttttcctcttcagtctcccagtcatctggtttgtttgtttctttgttcgttctgagacggagtctcgctctgtcgccaggctggagtgcagtggcgcagtctcggctcgctgcaacctctgactccctggttcaaacgattctcctgcctcagcctcccgagtggctggcatcaccacgcccagctaatttttgtatttttagtagagacggggtttcaccatgttgcccaggatggtctcgatctcctcacctcgtgatccgcccgcctcggcctcccaaagtgctgggattacaggcatgagccaccgcgcccggccccaatcatctgtttttaaacaatcgtttttgagcagatagctattcattccagattttcgtgtacccattctgtttcaggagctcttctaggtaaagctgagatcacaggaacagcaggtgacaggcctagctatagttaggaatacacaagccgtaaaatcgagtccttacagccataccacaaggtacgtccatttggactacaagaagagcttcctttaaagttcctatttcagcataaagaggctgtccttttttttgaggaatagtttggaccttgtgcctcctgtgggaggctgaggactgcaagaggagagctagcagatatgcctgttcacccctctctggtacttgtggcttgctagtatgtttttatgataatctcgggcattgtttgcattgtgtttattaatagggttttgtttttgttgtttccttttttacagtaaaggctgaattacataaacattgaaaaaatgtatgtgct

SEQ ID NO: 283008 - DNA, 2569 bp, Homo sapiens
agcagctgcgaggacgcgggccgagccggaagtggagtgtgctgcggcgcgagctgggccggcgggcgtggttcgagagcgcgcagagtccagactggcggcagggcccgaggggccgacccgcagcgtccctggtctctccagccctcactcggaaccgcacagtgacaataccctcccctcccttgggctggacccctctctacagctaggagccaatggcagaagacaaaaccaaaccgagtgagttggaccaagggaagtatgatgctgatgacaacgtgaagatcatctgcctgggagacagcgcagtgggcaaatccaaactcatggagagatttctcatggatggctttcagccacagcagctgtccacgtacgccctgaccctgtacaagcacacagccacggtagatggaaggaccatccttgtggacttttgggacacggcaggccaggagcggttccagagcatgcatgcctcctactaccacaaggcccacgcctgcatcatggtgtttgatgtacagaggaaagtcacctataggaacctgagcacctggtatacagagcttcgggagttcaggccagagatcccatgcatcgtggtggccaataaaattgatggtggggccatccctgcacctgggtgttagcaattcactggggacctgccctcatacatttcctcctccattccccgggcaggcaaccttcagtgattggtcctccctcccacgataagatacaacccttggttggttgcttgcattcttcccaccttataaagaagccagctaagccgacctgccctctttccaagacacagatccctattaactgagctctttctaggacctgtttcccaatcatccctgcctatcccactttctggaatgaaggcctccagtggcccccccctccaaaccttcttcccttcccttgacagacagaccaatgtcctaccttctctctacagcagacataaacgtgacccaaaaaagcttcaattttgccaagaagttctccctgcccctgtatttcgtctcggctgctgatggtaccaatgttgtgaaggtgtggttgactgcagagctcttcaatgatgcaattcgattagctgtgtcttacaaacagaactcccaggacttcatggatgagatttttcaggagctcgagaacttcagcttggagcaggaagaggaggacgtgccagaccaggaacagagcagcagcatcgagaccccatcagaggaggcggcctctccccacagctgaggggctggggctaggggtgggtggagcccttttaaaatacccttcccttcaacaactctccagctctgaatggagaaactctctaggccatcccctcttctacctcctgcaacccacccatcctattagcctcccacattctaggcccgtgatacagggatgaggtcagcaccagcaaactctggactggtggaagaattccccaccagatctccttgaagcagaagtagggatcagcatcattaacaccttccccaccccctccccgcaggcagacagtgaagagaatcagaaaacatgattatgtgtcactttaatacaggaaatttaggtgttttttggtgtttttgtttttgtttttgttttctttccaaagctcacctcggggacaattccttgggcttctcctgaggtaatgatttacccccccacccacagctgagtctgtgaggccccatcctttccctacgttttctcccatcttttttcctcttcagtctcccagtcatctggtttgtttgtttctttgttcgttctgagacggagtctcgctctgtcgccaggctggagtgcagtggcgcagtctcggctcgctgcaacctctgactccctggttcaaacgattctcctgcctcagcctcccgagtggctggcatcaccacgcccagctaatttttgtatttttagtagagacggggtttcaccatgttgcccaggatggtctcgatctcctcacctcgtgatccgcccgcctcggcctcccaaagtgctgggattacaggcatgagccaccgcgcccggccccaatcatctgtttttaaacaatcgtttttgagcagatagctattcattccagattttcgtgtacccattctgtttcaggagctcttctaggtaaagctgagatcacaggaacagcaggtgacaggcctagctatagttaggaatacacaagccgtaaaatcgagtccttacagccataccacaaggtacgtccatttggactacaagaagagcttcctttaaagttcctatttcagcataaagaggctgtccttttttttgaggaatagtttggaccttgtgcctcctgtgggaggctgaggactgcaagaggagagctagcagatatgcctgttcacccctctctggtacttgtggcttgctagtatgtttttatgataatctcgggcattgtttgcattgtgtttattaatagggttttgtttttgttgtttccttttttacagtaaaggctgaattacataaacattgaaaaaatgtatgtgct

SEQ ID NO: 283009 - DNA, 2187 bp, Homo sapiens
agcagctgcgaggacgcgggccgagccggaagtggagtgtgctgcggcgcgagctgggccggcgggcgtggttcgagagcgcgcagagtccagactggcggcagggcccgaggggccgacccgcagcgtccctggtctctccagccctcactcggaaccgcacagtgacaataccctcccctcccttgggctggacccctctctacagctaggagccaatggcagaagacaaaaccaaaccgagtgagttggaccaagggaagtatgatgctgatgacaacgtgaagatcatctgcctgggagacagcgcagtgggcaaatccaaactcatggagagatttctcatggatggctttcagccacagcagctgtccacgtacgccctgaccctgtacaagcacacagccacggtagatggaaggaccatccttgtggacttttgggacacggcaggccaggagcggttccagagcatgcatgcctcctactaccacaaggcccacgcctgcatcatggtgtttgatgtacagaggaaagtcacctataggaacctgagcacctggtatacagagcttcgggagttcaggccagagatcccatgcatcgtggtggccaataaaattgatgcagacataaacgtgacccaaaaaagcttcaattttgccaagaagttctccctgcccctgtatttcgtctcggctgctgatggtaccaatgttgtgaagctcttcaatgatgcaattcgattagctgtgtcttacaaacagaactcccaggacttcatggatgagatttttcaggagctcgagaacttcagcttggagcaggaagaggaggacgtgccagaccaggaacagagcagcagcatcgagaccccatcagaggaggcggcctctccccacagctgaggggctggggctaggggtgggtggagcccttttaaaatacccttcccttcaacaactctccagctctgaatggagaaactctctaggccatcccctcttctacctcctgcaacccacccatcctattagcctcccacattctaggcccgtgatacagggatgaggtcagcaccagcaaactctggactggtggaagaattccccaccagatctccttgaagcagaagtagggatcagcatcattaacaccttccccaccccctccccgcaggcagacagtgaagagaatcagaaaacatgattatgtgtcactttaatacaggaaatttaggtgttttttggtgtttttgtttttgtttttgttttctttccaaagctcacctcggggacaattccttgggcttctcctgaggtaatgatttacccccccacccacagctgagtctgtgaggccccatcctttccctacgttttctcccatcttttttcctcttcagtctcccagtcatctggtttgtttgtttctttgttcgttctgagacggagtctcgctctgtcgccaggctggagtgcagtggcgcagtctcggctcgctgcaacctctgactccctggttcaaacgattctcctgcctcagcctcccgagtggctggcatcaccacgcccagctaatttttgtatttttagtagagacggggtttcaccatgttgcccaggatggtctcgatctcctcacctcgtgatccgcccgcctcggcctcccaaagtgctgggattacaggcatgagccaccgcgcccggccccaatcatctgtttttaaacaatcgtttttgagcagatagctattcattccagattttcgtgtacccattctgtttcaggagctcttctaggtaaagctgagatcacaggaacagcaggtgacaggcctagctatagttaggaatacacaagccgtaaaatcgagtccttacagccataccacaaggtacgtccatttggactacaagaagagcttcctttaaagttcctatttcagcataaagaggctgtccttttttttgaggaatagtttggaccttgtgcctcctgtgggaggctgaggactgcaagaggagagctagcagatatgcctgttcacccctctctggtacttgtggcttgctagtatgtttttatgataatctcgggcattgtttggactctgggcactgttggactctgggcactgtttggactctgggcactgtttggactctgagcactgtttggactctg

SEQ ID NO: 283010 - DNA, 1596 bp, Homo sapiens
agcagctgcgaggacgcgggccgagccggaagtggagtgtgctgcggcgcgagctgggccggcgggcgtggttcgagagcgcgcagagtccagactggcggcagggcccgaggggccgacccgcagcgtccctggtctctccagccctcactcggaaccgcacagtgacaataccctcccctcccttgggctggacccctctctacagctaggagccaatggcagaagacaaaaccaaaccgagtgagttggaccaagggaagtatgatgctgatgacaacgtgaagatcatctgcctgggagacagcgcagtgggcaaatccaaactcatggagagatttctcatggatggctttcagccacagcagctgtccacgtacgccctgaccctgtacaagcacacagccacggtagatggaaggaccatccttgtggacttttgggacacggcaggccaggagcggttccagagcatgcatgcctcctactaccacaaggcccacgcctgcatcatggtgtttgatgtacagaggaaagtcacctataggaacctgagcacctggtatacagagcttcgggagttcaggccagagatcccatgcatcgtggtggccaataaaattgatgcagacataaacgtgacccaaaaaagcttcaattttgccaagaagttctccctgcccctgtatttcgtctcggctgctgatggtaccaatgttgtgaagctcttcaatgatgcaattcgattagctgtgtcttacaaacagaactcccaggacttcatggatgagatttttcaggagctcgagaacttcagcttggagcaggaagaggaggacgtgccagaccaggaacagagcagcagcatcgagaccccatcagaggaggcggcctctccccacagctgaggggctggggctaggggtgggtggagcccttttaaaatacccttcccttcaacaactctccagctctgaatggagaaactctctaggccatcccctcttctacctcctgcaacccacccatcctattagcctcccacattctaggcccgtgatacagggatgaggtcagcaccagcaaactctggactggtggaagaattccccaccagatctccttgaagcagaagtagggatcagcatcattaacaccttccccaccccctccccgcaggcagacagtgaagagaatcagaaaacatgattatgtgtcactttaatacaggaaatttaggtgttttttggtgtttttgtttttgtttttgttttctttccaaagctcacctcggggacaattccttgggcttctcctgaggtaatgatttacccccccacccacagctgagtctgtgaggccccatcctttccctacgttttctcccatcttttttcctcttcagtctcccagtcatctggtttgtttgtttctttgttcgttctgagacggagtatagaaaaacataaataaggttgggcatggaggctcacacctgtaaccccagcactttgggaggccgagttgggtggttcacccgaggtcaggagttcgagaccagcctggccaacatggtgaaaccccatctctactaaa

SEQ ID NO: 283011 - DNA, 1280 bp, Homo sapiens
agcagctgcgaggacgcgggccgagccggaagtggagtgtgctgcggcgcgagctgggccggcgggcgtggttcgagagcgcgcagagtccagactggcggcagggcccgaggggccgacccgcagcgtccctggtctctccagccctcactcggaaccgcacagtgacaataccctcccctcccttgggctggacccctctctacagctaggagccaatggcagaagacaaaaccaaaccgagtgagttggaccaagggaagtatgatgctgatgacaacgtgaagatcatctgcctgggagacagcgcagtgggcaaatccaaactcatggagagatttctcatggatggctttcagccacagcagctgtccacgtacgccctgaccctgtacaagcacacagccacggtagatggaaggaccatccttgtggacttttgggacacggcaggccaggagcggttccagagcatgcatgcctcctactaccacaaggcccacgcctgcatcatggtgtttgatgtacagaggaaagtcacctataggaacctgagcacctggtatacagagcttcgggagttcaggccagagatcccatgcatcgtggtggccaataaaattgatggtggggccatccctgcacctgggtgttagcaattcactggggacctgccctcatacatttcctcctccattccccgggcaggcaaccttcagtgattggtcctccctcccacgataagatacaacccttggttggttgcttgcattcttcccaccttataaagaagccagctaagccgacctgccctctttccaagacacagatccctattaactgagctctttctaggacctgtttcccaatcatccctgcctatcccactttctggaatgaaggcctccagtggcccccccctccaaaccttcttcccttcccttgacagacagaccaatgtcctaccttctctctacagcagacataaacgtgacccaaaaaagcttcaattttgccaagaagttctccctgcccctgtatttcgtctcggctgctgatggtaccaatgttgtgaaggtgtggttgactgcagaggtagctagcaaggtcagggcgctaggtggtaaagggaagctgtgaagagaagggcttactgcaggtgtgatggagagaaccgggacagtgcatgggcatgggtggcagggaggggaggagctgatgggcctggacttgatgaggcagaagtccattgaccatacataggtaagagggctaggagg

SEQ ID NO: 283012 - DNA, 475 bp, Homo sapiens
cttgtggggaggcttaggacgggcgggtgcaatcctcgaaggggagtctcagcgaccatgggggacaccatccactagatgtcaggctgaaggagatgatgaaactctgtaagccgaagaacatggggaaagaggagacacaggaagccacgctatccccacagggacccctgccagccaggccacccgcaacggtgtgggacgtgagtgccgttgcccccggcggtccagcagcaggagccccgagcagcctggcctaggaggctcaccgcagccgtcaagggattctgggccacccgcccttccttctccaccttctacttcgtctttgccatttttgtggtgtccaccatctttcactgccaccagcacctggctctggtgcctgcgccctgggcatactcagcccgtgtggtcctggcccccagacacctgccccgggaggacctgttcactatcaactccaagggccgcc

SEQ ID NO: 283013 - DNA, 737 bp, Homo sapiens
agcggggggttcccgcccgcgcctctccctccacacctccccgcaagcagagggagccggctccggccttggccagcccagagacaggctcccacagtgcagcggcgggctgaagggctcctcaagcactgccagagtggacaccgaggccgaggagacgccaagagcgatgaaacaagcttctggttcaagagtttcttcaggttccactacgggctgttcttctacaggtgcgccgatgtccacagtgctaccttctgatgagctactgctttcattcagtttctgctgatttaatatgtgagctgacagaatgcagagaccacgttgtatatgaagcatccactttgccttgtacaccagggcattcaataaccacttaataactacaaccctgatgatccgattcactactaaagtcttccgtgtttaaattttcaaagtcagattctcctacagcaattggtacagtcacagtaagactggggttgtttatgaatgacatgtaatcactttcatcaataatgtatttttcaacactgctgccagttcctataccacttgtagttccatttacatctttaagatagtcaagatctttcccaatttctgctgtatgattggacatacaactgtctttcttgttgtttagatcatcaagtggtttaatttcatctaaaatcttttgtttcctaatgaaggactgttgaataaattcatatatttttcttttcaca

SEQ ID NO: 283014 - DNA, 479 bp, Homo sapiens
gcagagtctcctgcacaccatctccccttccagcctcggtgtctgggctggggaagagcacacagatgggtgctgctcctttaggcacactggcagaggctttcttttagcacttgtcccacagttcctcaatggaagtagtatttcccattcccaagctctgctcaccacactgaggagaggcagatcttaggagttcctttgccccaaggccgcctcttcctcacctaaaaccggatccttgcaagatcaccctgaggattctctgagaaccctgtcgcccgcaggcccattctaagcactagggatagagccatcagggagatggaccagagccacggacttcagtgcccaactcacagtgggcactaggccataggttatgacagtgccaaggaaggtacacctcccagatgccaggcagggtggctgctcccttctcaccctacttccctctccacagggcccacggacctcag

SEQ ID NO: 283015 - DNA, 642 bp, Homo sapiens
atccgttcctgcgggatcggttcccatcatccaatacctcccaccagactccacttccatcattggaggtcacatttcaactaagatttggaggggaccgtatcctaactatattaacttccaattttcatcgaaagcccacctgtctaagaagagctcctagacattccctttccccttcaacttggaggaattgggaatgacaaagagaaattaatcaaaagaagaattaatctctccaatcagccttggcattttctttctatctttgatatgttgttttttacagtgtcttggttttcagaataagctgtttgtaactacttcctccactatattgtgagcctctggagggcaaggtctgggccttactcatctttgagtaattttaaagccactaaatagggctctgcacatagtgagaattcaacatatgcttagttgaatctaatatttcagaaaaagtcaacatctattctttaagatagcccacagcaggctgagtgtgttattcgtaaatccattggccagcgtcatttcctccaaagtgcagcatttttgatagaaccaaaggctcatgactgaccttcagaaagacattttgtatttcaccatcaaagagtggtatgggttttattagac

SEQ ID NO: 283016 - DNA, 521 bp, Homo sapiens
tttggtcctttaagaaagtcagatttaatgatctgaaatgtctcatttttaggtgatatttggttagcaacgtcctactgtagacattttgatgtggtggtgattggaatatggtctgcagagatcaaccagaattagctccatgtgccactgggagtgggaactgaagtcacgcaggaataaaccagtcttcatgctttaggatgttctgatgtgccattgtcgtgaaatcttcattcatgagacattccagtttaccggcagtgtcgactagaatatgctacagcccccaaaatacgtttttagtataaggattattttgagctgattattttgagaaatagcagacgcaggagaaactctgaagacagaacgtaagtttaccttttgtaaagggatttacatttataagggaaatgtccatttgtaaggctgtctccctctgtaccggaaacacgggatgactataagtgacaaagagattaatttaaatctgcatgacaaatcttactcaagcttac

SEQ ID NO: 283017 - DNA, 523 bp, Homo sapiens
tttggtcctttaagaaagtcagatttaatgatctgaaatgtctcatttttaggtgatatttggttagcaacgtcctactgtagacattttgatgtggtggtgattggaatatggtctgcagagatcaaccagaattagctccatgtgccactgggagtgggaactgaagtcacgcaggaataaaccagtcttcatgctttaggatgttctgatgtgccattgtcgtgaaatcttcattcatgagacattccagtttaccggcagtgtcgactagaatatgctacagcccccaaaatacgtttttagtataaggattattttgagctgattattttgagaaatagcagacgcaggagaaactctgaagacagaacgcaaacttcagctagtgtcttgaatttaagtcccaaatcatctaagaagcggtcatctagctctccttcaataaaactgcaacaaccaatagaagcattcagcgattcagtttcttcctgagaataaaccagaaggcaatctttggctg

SEQ ID NO: 283018 - DNA, 1392 bp, Homo sapiens
atccgttcctgcgggatcggttcccatcatccaatacctcccaccagactccacttccatcattggaggtcacatttcaactaagatttggaggggaccgtatcctaactatattaacttccaattttcatcgaaagcccacctgtctaagaagagctcctagacattccctttccccttcaacttggaggaattgggaatgacaaagagaaattaatcaaaagaagaattaatctctccaatcagccttggcattttctttctatctttgatatgttgttttttacagtgtcttggttttcagaataagctgtttgtaactacttcctccactatattgtgagcctctggagggcaagctttgatagattgactttgcctcttttactgcgtgcatagtgccatcttgtggccataaagcatataacactcatagttatgccacagtgcttctgttccatcttatttctgtagtccagaggatctcttaagtgtagaaacacatggattattactagccaaggccatcactggccaagcccatctaaaagccagaggcagcaagcagtgcccgttgaaacatccataaaaggtgatatttggttagcaacgtcctactgtagacattttgatgtggtggtgattggaatatggtctgcagagatcaaccagaattagctccatgtgccactgggagtgggaactgaagtcacgcaggaataaaccagtcttcatgctttaggatgttctgatgtgccattgtcgtgaaatcttcattcatgagacattccagtttaccggcagtgtcgactagaatatgctacagcccccaaaatacgtttttagtataaggattattttgagctgattattttgagaaatagcagacgcaggagaaactctgaagacagaacgttatatatcctctgcctctcctacggagctcatccctaccaagcctgctcctgcagagggatgcaactttccgacccactgacatctgtcttggtcatatgacttgctttggtcaatgaaatgtggtgtaaaaaggtggaggctttgagagccattgcctggttctgccttgttcttttctttgggtcacaaggacggcagcttcccaggtacaatctgctctctcagtgtgcatcttgatatgaagacatcatgaaggaaagcagagctgactgactggcaaaaacataactgtggatagaacccaaagagaaaacaaagcccaaacagtctcagctcctttactctatgcgaccaatggcatttcaacctccctctacagtttgataccttcttctatagttacagaattcttaactttgttttgacctggatccatggccacccaaaataaagactatatttctaagcctctga

SEQ ID NO: 283019 - DNA, 1063 bp, Homo sapiens
atccgttcctgcgggatcggttcccatcatccaatacctcccaccagactccacttccatcattggaggtcacatttcaactaagatttggaggggaccgtatcctaactatattaacttccaattttcatcgaaagcccacctgtctaagaagagctcctagacattccctttccccttcaacttggaggaattgggaatgacaaagagaaattaatcaaaagaagaattaatctctccaatcagccttggcattttctttctatctttgatatgttgttttttacagtgtcttggttttcagaataagctgtttgtaactacttcctccactatattgtgagcctctggagggcaagctttgatagattgactttgcctcttttactgcgtgcatagtgccatcttgtggccataaagcatataacactcatagttatgccacagtgcttctgttccatcttatttctgtagtccagaggatctcttaagtgtagaaacacatggattattactagccaaggccatcactggccaagcccatctaaaagccagaggcagcaagcagtgcccgttgaaacatccataaaaggtgatatttggttagcaacgtcctactgtagacattttgatgtggtggtgattggaatatggtctgcagagatcaaccagaattagctccatgtgccactgggagtgggaactgaagtcacgcaggaataaaccagtcttcatgctttaggatgttctgatgtgccattgtcgtgaaatcttcattcatgagacattccagtttaccggcagtgtcgactagaatatgctacagcccccaaaatacgtttttagtataaggattattttgagctgattattttgagaaatagcagacgcaggagaaactctgaagacagaacgcaaacttcagctagtgtcttgaatttaagtcccaaatcatctaagaagcggtcatctagctctccttcaataaaactgcaacaaccaatagaagcattcagcgattcagtttcttcctgagaataaaccagaaggcaatctttggctg

SEQ ID NO: 283020 - DNA, 685 bp, Homo sapiens
aacggacgtgcagggggactgtgtccgtagacgtgatggcctgagcccagtcctgctgctagagggaaggaaaaaggcgaagtaggagggagagagagagacagagccgagcccacgccgtggagagctgtttggttgttattgttgtagtgtgtgtctgtgtgttttctttctggaacctctgagctctgcctatggtttccaactttcggcttctaatccccaccccacccaggaacgagcaacagaaaaacaacacttgtctgcctgagaaggctccggaaaaaaaaaaaaaaaaaaggaagaaaagcgacctcaaagagatgagctctcggctcagttgtcagcaaacaacaacactcccccgctcctccgctgggccatcctcccagccccagcccgccggagaggacagaccgacgcaccgacaggcccctctccccctcgcccgtctttgttacatctttagcagctttgtgcgtagctggcggcctcgagcagaatctgcacgttctgcagaaaagtgttgatgtgcttctccatcgagttctcgctggtgttgaaaatgtctgagaaggggcacctgggcttggccccagcggggtcctcgggcagggccgggggctggggcgcggccacggcggggggcacagccgggggcgcggcgggggccagccccgcgccc

SEQ ID NO: 283021 - DNA, 2142 bp, Homo sapiens
ctgcttctaccgcgggtgtacacatggtttgccagggtgtgcgcgtcttcccaaggggtctggggaccaaattccagctcccgccatcgggaggcacggtaagagaccgtaggggacacaatcccgagcaccgcagatgccgaggtctccgctgcgctccagtctgtcaacagaggcttcaggaccgcggggtcccttcaaatgccccgccagtcccaggccaatcaccgcgcagcttcttccgggatcgtcgccaatcatcggccgttgcgtattgcgggtacagaggggtaagtgaagcttcgggcccttacatctttcttgaaggcaagaagcctctcctctacttcccagacaccccgcctcccccactagaaaaagcagccgaagcggctttatttaagggcaagtgggacgatgaggccagagaagtcagaaaggctccatatttgatatggtcaaataatggcgcccttaagagcagcctgtgacaattgaagggtggtcgccatattttcagaaggcaccttccgggtcccttaacccgggtgtctatgtccaagcggccatgaagtgaataaacactgaggaattatatttgtccctatcagaatcctcgaatccctagcagccagtccctgctacttcggttgcctcggctgcgttcggacgccacggctgggcggggccgcccttcctgtggacaacgacagctgaggccgggagcggggaggcggcggctccagggacctggcggccgccgatcggggctgcgaggccccatggcgccgcccccagccccgctcctggcgccgaggcccggggagacccggcctggttgcaggaagcccgggactgtgagcttcgcggacgtggccgtgtacttctccccggaggagtggggctgtctgcggcccgcgcagagggctctgtaccgggacgtgatgcaggagacctacggccacctgggcgcgctcggtgagagccccgggtccgagccccctcctccttcaccgggttcacaggggagatgatgtagaagggccgagaggactgtgagccctaatcccgcactcttgcaccaacaccagcagccacctcccgttcccagggcttcaggtaccccctcgggagtgttttcacccgcatccatttcattcaggcagcagcactgcagccccttccaggttgagtataagctccgagggggtgccctcagcctggaggggaatgccatcttcccacgatggcctctcaggcccgcgctgtgatccctgttctctcccagggattcccaggccccaaaccagccctcatctcttggatggaacaggagagtgaggcttggagccccgccgcccaggatcctgagaagggggaaagactgggaggagctcggagaggagatgtcccaaacaggaaggaagaggaaccggaggaagtcccaagagccaaagggcctagaaaggctcctgtgaaggagagtcctgaagtgctggtggaacgcaaccctgacccagctattagcgtggccccggcacgggcacagccacccaaaaatgctgcctgggacccgaccacaggagcacagcccccggcacccatacccagcatggatgctcaggccggccagcggcgccacgtgtgcacggactgcggccgccgcttcacctacccctcactgctggtcagccacaggcgcatgcactcgggggagcggcctttcccctgccccgagtgtggcatgcgcttcaagaggaagttcgcagtggaagcgcaccagtggatccaccgctcctgctccggggggcggcggggccggaggcctgggatccgggctgtgcctcgggcccccgtccgaggtgaccgggacccgcctgtgctcttccggcactacccagacatcttcgaggagtgcggctgagcggcaccgcaggctggagttgagcctgaccttggcacgaaggactgacggatccctgaggtgggccactgagtcggggactccggaactgaaattcatgccctgggctttcctcaaggatccctcaagtttccaacttgtaaaaagaaaagtgcctgtaaagattcgaatagattagacttgccacccatctccccagtcttttgtttaacaaaaaa

SEQ ID NO: 283022 - DNA, 2111 bp, Homo sapiens
ctgcttctaccgcgggtgtacacatggtttgccagggtgtgcgcgtcttcccaaggggtctggggaccaaattccagctcccgccatcgggaggcacggtaagagaccgtaggggacacaatcccgagcaccgcagatgccgaggtctccgctgcgctccagtctgtcaacagaggcttcaggaccgcggggtcccttcaaatgccccgccagtcccaggccaatcaccgcgcagcttcttccgggatcgtcgccaatcatcggccgttgcgtattgcgggtacagaggggtaagtgaagcttcgggcccttacatctttcttgaaggcaagaagcctctcctctacttcccagacaccccgcctcccccactagaaaaagcagccgaagcggctttatttaagggcaagtgggacgatgaggccagagaagtcagaaaggctccatatttgatatggtcaaataatggcgcccttaagagcagcctgtgacaattgaagggtggtcgccatattttcagaaggcaccttccgggtcccttaacccgggtgtctatgtccaagcggccatgaagtgaataaacactgaggaattatatttgtccctatcagaatcctcgaatccctagcagccagtccctgctacttcggttgcctcggctgcgttcggacgccacggctgggcggggccgcccttcctgtggacaacgacagctgaggccgggagcggggaggcggcggctccagggacctggcggccgccgatcggggctgcgaggccccatggcgccgcccccagccccgctcctggcgccgaggcccggggagacccggcctggttgcaggaagcccgggactgtgagcttcgcggacgtggccgtgtacttctccccggaggagtggggctgtctgcggcccgcgcagagggctctgtaccgggacgtgatgcaggagacctacggccacctgggcgcgctcggtgagagccccgggtccgagccccctcctccttcaccgggttcacaggggagatgatgtagaagggccgagaggactgtgagccctaatcccgcactcttgcaccaacaccagcagccacctcccgttcccagggcttcaggtaccccctcgggagtgttttcacccgcatccatttcattcaggcagcagcactgcagccccttccaggttgagtataagctccgagggggtgccctcagcctggaggggaatgccatcttcccacgatggcctctcaggattcccaggccccaaaccagccctcatctcttggatggaacaggagagtgaggcttggagccccgccgcccaggatcctgagaagggggaaagactgggaggagctcggagaggagatgtcccaaacaggaaggaagaggaaccggaggaagtcccaagagccaaagggcctagaaaggctcctgtgaaggagagtcctgaagtgctggtggaacgcaaccctgacccagctattagcgtggccccggcacgggcacagccacccaaaaatgctgcctgggacccgaccacaggagcacagcccccggcacccatacccagcatggatgctcaggccggccagcggcgccacgtgtgcacggactgcggccgccgcttcacctacccctcactgctggtcagccacaggcgcatgcactcgggggagcggcctttcccctgccccgagtgtggcatgcgcttcaagaggaagttcgcagtggaagcgcaccagtggatccaccgctcctgctccggggggcggcggggccggaggcctgggatccgggctgtgcctcgggcccccgtccgaggtgaccgggacccgcctgtgctcttccggcactacccagacatcttcgaggagtgcggctgagcggcaccgcaggctggagttgagcctgaccttggcacgaaggactgacggatccctgaggtgggccactgagtcggggactccggaactgaaattcatgccctgggctttcctcaaggatccctcaagtttccaacttgtaaaaagaaaagtgcctgtaaagattcgaatagattagacttgccacccatctccccagtcttttgtttaacaaaaaa

SEQ ID NO: 283023 - DNA, 2335 bp, Homo sapiens
ctgcttctaccgcgggtgtacacatggtttgccagggtgtgcgcgtcttcccaaggggtctggggaccaaattccagctcccgccatcgggaggcacggtaagagaccgtaggggacacaatcccgagcaccgcagatgccgaggtctccgctgcgctccagtctgtcaacagaggcttcaggaccgcggggtcccttcaaatgccccgccagtcccaggccaatcaccgcgcagcttcttccgggatcgtcgccaatcatcggccgttgcgtattgcgggtacagaggggtaagtgaagcttcgggcccttacatctttcttgaaggcaagaagcctctcctctacttcccagacaccccgcctcccccactagaaaaagcagccgaagcggctttatttaagggcaagtgggacgatgaggccagagaagtcagaaaggctccatatttgatatggtcaaataatggcgcccttaagagcagcctgtgacaattgaagggtggtcgccatattttcagaaggcaccttccgggtcccttaacccgggtgtctatgtccaagcggccatgaagtgaataaacactgaggaattatatttgtccctatcagaatcctcgaatccctagcagccagtccctgctacttcggttgcctcggctgcgttcggacgccacggctgggcggggccgcccttcctgtggacaacgacagctgaggccgggagcggggaggcggcggctccagggacctggcggccgccgatcggggctgcgaggccccatggcgccgcccccagccccgctcctggcgccgaggcccggggagacccggcctggttgcaggaagcccgggactgtgagcttcgcggacgtggccgtgtacttctccccggaggagtggggctgtctgcggcccgcgcagagggctctgtaccgggacgtgatgcaggagacctacggccacctgggcgcgctcggattcccaggccccaaaccagccctcatctcttggatggaacaggagagtgaggcttggagccccgccgcccaggatcctgagaagggggaaagactgggaggagctcggagaggcccccacttccagcatccctaaagaaattcaactgtgttgggtactagaggagtaaagaaggcagacctggtacaaagttttcagaacatgggacagcggtcctgtgaggactgggagcccagtccaaccaggcactccagcctgggtgacagagtgagactccgtctcaaaaataaataaataaataaataaataaataaataaataaataaataatagcccctgcttcctgagcacttcctaagtgcttaacatgcatctactcagctaaaccagtaacgctgtgaagtcaaaagccattattattcccatttgatgcataaggaaccaaggctcagataaggcacttttaggagatctgaatcctgtttaccttgttctaaagcctgtgtgttaatcactggacagaacttccctcactgccttaagtgaaaagcattctataacctgagacagtctgtgcaaaagtgtttgtaagtgtaacttaattccggtttcccaggagatgtcccaaacaggaaggaagaggaaccggaggaagtcccaagagccaaagggcctagaaaggctcctgtgaaggagagtcctgaagtgctggtggaacgcaaccctgacccagctattagcgtggccccggcacgggcacagccacccaaaaatgctgcctgggacccgaccacaggagcacagcccccggcacccatacccagcatggatgctcaggccggccagcggcgccacgtgtgcacggactgcggccgccgcttcacctacccctcactgctggtcagccacaggcgcatgcactcgggggagcggcctttcccctgccccgagtgtggcatgcgcttcaagaggaagttcgcagtggaagcgcaccagtggatccaccgctcctgctccggggggcggcggggccggaggcctgggatccgggctgtgcctcgggcccccgtccgaggtgaccgggacccgcctgtgctcttccggcactacccagacatcttcgaggagtgcggctgagcggcaccgcaggctggagttgagcctgaccttggcacgaaggactgacggatccctgaggtgggccactgagtcggggactccggaactgaaattcatgccctgggctttcctcaaggatccctcaagtttccaacttgtaaaaagaaaagtgcctgtaaagattcgaatagattagacttgccacccatctccccagtcttttgtttaacaaaaaa

SEQ ID NO: 283024 - DNA, 2221 bp, Homo sapiens
ctgcttctaccgcgggtgtacacatggtttgccagggtgtgcgcgtcttcccaaggggtctggggaccaaattccagctcccgccatcgggaggcacggtaagagaccgtaggggacacaatcccgagcaccgcagatgccgaggtctccgctgcgctccagtctgtcaacagaggcttcaggaccgcggggtcccttcaaatgccccgccagtcccaggccaatcaccgcgcagcttcttccgggatcgtcgccaatcatcggccgttgcgtattgcgggtacagaggggtaagtgaagcttcgggcccttacatctttcttgaaggcaagaagcctctcctctacttcccagacaccccgcctcccccactagaaaaagcagccgaagcggctttatttaagggcaagtgggacgatgaggccagagaagtcagaaaggctccatatttgatatggtcaaataatggcgcccttaagagcagcctgtgacaattgaagggtggtcgccatattttcagaaggcaccttccgggtcccttaacccgggtgtctatgtccaagcggccatgaagtgaataaacactgaggaattatatttgtccctatcagaatcctcgaatccctagcagccagtccctgctacttcggttgcctcggctgcgttcggacgccacggctgggcggggccgcccttcctgtggacaacgacagctgaggccgggagcggggaggcggcggctccagggacctggcggccgccgatcggggctgcgaggccccatggcgccgcccccagccccgctcctggcgccgaggcccggggagacccggcctggttgcaggaagcccgggactgtgagcttcgcggacgtggccgtgtacttctccccggaggagtggggctgtctgcggcccgcgcagagggctctgtaccgggacgtgatgcaggagacctacggccacctgggcgcgctcggcccccacttccagcatccctaaagaaattcaactgtgttgggtactagaggagtaaagaaggcagacctggtacaaagttttcagaacatgggacagcggtcctgtgaggactgggagcccagtccaaccaggcactccagcctgggtgacagagtgagactccgtctcaaaaataaataaataaataaataaataaataaataaataaataaataatagcccctgcttcctgagcacttcctaagtgcttaacatgcatctactcagctaaaccagtaacgctgtgaagtcaaaagccattattattcccatttgatgcataaggaaccaaggctcagataaggcacttttaggagatctgaatcctgtttaccttgttctaaagcctgtgtgttaatcactggacagaacttccctcactgccttaagtgaaaagcattctataacctgagacagtctgtgcaaaagtgtttgtaagtgtaacttaattccggtttcccaggagatgtcccaaacaggaaggaagaggaaccggaggaagtcccaagagccaaagggcctagaaaggctcctgtgaaggagagtcctgaagtgctggtggaacgcaaccctgacccagctattagcgtggccccggcacgggcacagccacccaaaaatgctgcctgggacccgaccacaggagcacagcccccggcacccatacccagcatggatgctcaggccggccagcggcgccacgtgtgcacggactgcggccgccgcttcacctacccctcactgctggtcagccacaggcgcatgcactcgggggagcggcctttcccctgccccgagtgtggcatgcgcttcaagaggaagttcgcagtggaagcgcaccagtggatccaccgctcctgctccggggggcggcggggccggaggcctgggatccgggctgtgcctcgggcccccgtccgaggtgaccgggacccgcctgtgctcttccggcactacccagacatcttcgaggagtgcggctgagcggcaccgcaggctggagttgagcctgaccttggcacgaaggactgacggatccctgaggtgggccactgagtcggggactccggaactgaaattcatgccctgggctttcctcaaggatccctcaagtttccaacttgtaaaaagaaaagtgcctgtaaagattcgaatagattagacttgccacccatctccccagtcttttgtttaacaaaaaa

SEQ ID NO: 283025 - DNA, 1143 bp, Homo sapiens
ctgcttctaccgcgggtgtacacatggtttgccagggtgtgcgcgtcttcccaaggggtctggggaccaaattccagctcccgccatcgggaggcacggtaagagaccgtaggggacacaatcccgagcaccgcagatgccgaggtctccgctgcgctccagtctgtcaacagaggcttcaggaccgcggggtcccttcaaatgccccgccagtcccaggccaatcaccgcgcagcttcttccgggatcgtcgccaatcatcggccgttgcgtattgcgggtacagaggggattcccaggccccaaaccagccctcatctcttggatggaacaggagagtgaggcttggagccccgccgcccaggatcctgagaagggggaaagactgggaggagctcggagaggagatgtcccaaacaggaaggaagaggaaccggaggaagtcccaagagccaaagggcctagaaaggctcctgtgaaggagagtcctgaagtgctggtggaacgcaaccctgacccagctattagcgtggccccggcacgggcacagccacccaaaaatgctgcctgggacccgaccacaggagcacagcccccggcacccatacccagcatggatgctcaggccggccagcggcgccacgtgtgcacggactgcggccgccgcttcacctacccctcactgctggtcagccacaggcgcatgcactcgggggagcggcctttcccctgccccgagtgtggcatgcgcttcaagaggaagttcgcagtggaagcgcaccagtggatccaccgctcctgctccggggggcggcggggccggaggcctgggatccgggctgtgcctcgggcccccgtccgaggtgaccgggacccgcctgtgctcttccggcactacccagacatcttcgaggagtgcggctgagcggcaccgcaggctggagttgagcctgaccttggcacgaaggactgacggatccctgaggtgggccactgagtcggggactccggaactgaaattcatgccctgggctttcctcaaggatccctcaagtttccaacttgtaaaaagaaaagtgcctgtaaagattcgaatagattagacttgccacccatctccccagtcttttgtttaacaaaaaa

SEQ ID NO: 283026 - DNA, 1788 bp, Homo sapiens
ctgcttctaccgcgggtgtacacatggtttgccagggtgtgcgcgtcttcccaaggggtctggggaccaaattccagctcccgccatcgggaggcacggtaagagaccgtaggggacacaatcccgagcaccgcagatgccgaggtctccgctgcgctccagtctgtcaacagaggcttcaggaccgcggggtcccttcaaatgccccgccagtcccaggccaatcaccgcgcagcttcttccgggatcgtcgccaatcatcggccgttgcgtattgcgggtacagaggggtaagtgaagcttcgggcccttacatctttcttgaaggcaagaagcctctcctctacttcccagacaccccgcctcccccactagaaaaagcagccgaagcggctttatttaagggcaagtgggacgatgaggccagagaagtcagaaaggctccatatttgatatggtcaaataatggcgcccttaagagcagcctgtgacaattgaagggtggtcgccatattttcagaaggcaccttccgggtcccttaacccgggtgtctatgtccaagcggccatgaagtgaataaacactgaggaattatatttgtccctatcagaatcctcgaatccctagcagccagtccctgctacttcggttgcctcggctgcgttcggacgccacggctgggcggggccgcccttcctgtggacaacgacagctgaggccgggagcggggaggcggcggctccagggacctggcggccgccgatcggggctgcgaggccccatggcgccgcccccagccccgctcctggcgccgaggcccggggagacccggcctggttgcaggaagcccgggactgtgagcttcgcggacgtggccgtgtacttctccccggaggagtggggctgtctgcggcccgcgcagagggctctgtaccgggacgtgatgcaggagacctacggccacctgggcgcgctcggattcccaggccccaaaccagccctcatctcttggatggaacaggagagtgaggcttggagccccgccgcccaggatcctgagaagggggaaagactgggaggagctcggagaggagatgtcccaaacaggaaggaagaggaaccggaggaagtcccaagagccaaagggcctagaaaggctcctgtgaaggagagtcctgaagtgctggtggaacgcaaccctgacccagctattagcgtggccccggcacgggcacagccacccaaaaatgctgcctgggacccgaccacaggagcacagcccccggcacccatacccagcatggatgctcaggccggccagcggcgccacgtgtgcacggactgcggccgccgcttcacctacccctcactgctggtcagccacaggcgcatgcactcgggggagcggcctttcccctgccccgagtgtggcatgcgcttcaagaggaagttcgcagtggaagcgcaccagtggatccaccgctcctgctccaggatcctgagaagggggaaagactgggaggagctcggagaggagatgtcccagacatcttcgaggagtgcggctgagcggcaccgcaggctggagttgagcctgaccttggcacgaaggactgacggatccctgaggtgggccactgagtcggggactccggaactgaaattcatgccctgggctttcctcaaggatccctcaagtttccaacttgtaaaaagaaaagtgcctgtaaagattcgaatagattagacttgccacccatctccccagtcttttgtttaacaaaaaa

SEQ ID NO: 283027 - DNA, 1831 bp, Homo sapiens
ctgcttctaccgcgggtgtacacatggtttgccagggtgtgcgcgtcttcccaaggggtctggggaccaaattccagctcccgccatcgggaggcacggtaagagaccgtaggggacacaatcccgagcaccgcagatgccgaggtctccgctgcgctccagtctgtcaacagaggcttcaggaccgcggggtcccttcaaatgccccgccagtcccaggccaatcaccgcgcagcttcttccgggatcgtcgccaatcatcggccgttgcgtattgcgggtacagaggggtaagtgaagcttcgggcccttacatctttcttgaaggcaagaagcctctcctctacttcccagacaccccgcctcccccactagaaaaagcagccgaagcggctttatttaagggcaagtgggacgatgaggccagagaagtcagaaaggctccatatttgatatggtcaaataatggcgcccttaagagcagcctgtgacaattgaagggtggtcgccatattttcagaaggcaccttccgggtcccttaacccgggtgtctatgtccaagcggccatgaagtgaataaacactgaggaattatatttgtccctatcagaatcctcgaatccctagcagccagtccctgctacttcggttgcctcggctgcgttcggacgccacggctgggcggggccgcccttcctgtggacaacgacagctgaggccgggagcggggaggcggcggctccagggacctggcggccgccgatcggggctgcgaggccccatggcgccgcccccagccccgctcctggcgccgaggcccggggagacccggcctggttgcaggaagcccgggactgtgagcttcgcggacgtggccgtgtacttctccccggaggagtggggctgtctgcggcccgcgcagagggctctgtaccgggacgtgatgcaggagacctacggccacctgggcgcgctcggattcccaggccccaaaccagccctcatctcttggatggaacaggagagtgaggcttggagccccgccgcccaggatcctgagaagggggaaagactgggaggagctcggagaggagatgtcccaaacaggaaggaagaggaaccggaggaagtcccaagagccaaagggcctagaaaggctcctgtgaaggagagtcctgaagtgctggtggaacgcaaccctgacccagctattagcgtggccccggcacgggcacagccacccaaaaatgctgcctgggacccgaccacaggagcacagcccccggcacccatacccagcatggatgctcaggccggccagcggcgccacgtgtgcacggactgcggccgccgcttcacctacccctcactgctggtcagccacaggcgcatgcactcgggggagcggcctttcccctgccccgagtgtggcatgcgcttcaagaggaagttcgcagtggaagcgcaccagtggatccaccgctcctgctccggggggcggcggggccggaggcctgggatccgggctgtgcctcgggcccccgtccgaggtgaccgggacccgcctgtgctcttccggcactacccagacatcttcgaggagtgcggctgagcggcaccgcaggctggagttgagcctgaccttggcacgaaggactgacggatccctgaggtgggccactgagtcggggactccggaactgaaattcatgccctgggctttcctcaaggatccctcaagtttccaacttgtaaaaagaaaagtgcctgtaaagattcgaatagattagacttgccacccatctccccagtcttttgtttaacaaaaaa

SEQ ID NO: 283028 - DNA, 1972 bp, Homo sapiens
ctgcttctaccgcgggtgtacacatggtttgccagggtgtgcgcgtcttcccaaggggtctggggaccaaattccagctcccgccatcgggaggcacggtaagagaccgtaggggacacaatcccgagcaccgcagatgccgaggtctccgctgcgctccagtctgtcaacagaggcttcaggaccgcggggtcccttcaaatgccccgccagtcccaggccaatcaccgcgcagcttcttccgggatcgtcgccaatcatcggccgttgcgtattgcgggtacagaggggtaagtgaagcttcgggcccttacatctttcttgaaggcaagaagcctctcctctacttcccagacaccccgcctcccccactagaaaaagcagccgaagcggctttatttaagggcaagtgggacgatgaggccagagaagtcagaaaggctccatatttgatatggtcaaataatggcgcccttaagagcagcctgtgacaattgaagggtggtcgccatattttcagaaggcaccttccgggtcccttaacccgggtgtctatgtccaagcggccatgaagtgaataaacactgaggaattatatttgtccctatcagaatcctcgaatccctagcagccagtccctgctacttcggttgcctcggctgcgttcggacgccacggctgggcggggccgcccttcctgtggacaacgacagctgaggccgggagcggggaggcggcggctccagggacctggcggccgccgatcggggctgcgaggccccatggcgccgcccccagccccgctcctggcgccgaggcccggggagacccggcctggttgcaggaagcccgggactgtgagcttcgcggacgtggccgtgtacttctccccggaggagtggggctgtctgcggcccgcgcagagggctctgtaccgggacgtgatgcaggagacctacggccacctgggcgcgctcggtgagagccccgggtccgagccccctcctccttcaccgggttcacaggggagatgatgtagaagggccgagaggactgtgagccctaatcccgcactcttgcaccaacaccagcagccacctcccgttcccagggcttcaggattcccaggccccaaaccagccctcatctcttggatggaacaggagagtgaggcttggagccccgccgcccaggatcctgagaagggggaaagactgggaggagctcggagaggagatgtcccaaacaggaaggaagaggaaccggaggaagtcccaagagccaaagggcctagaaaggctcctgtgaaggagagtcctgaagtgctggtggaacgcaaccctgacccagctattagcgtggccccggcacgggcacagccacccaaaaatgctgcctgggacccgaccacaggagcacagcccccggcacccatacccagcatggatgctcaggccggccagcggcgccacgtgtgcacggactgcggccgccgcttcacctacccctcactgctggtcagccacaggcgcatgcactcgggggagcggcctttcccctgccccgagtgtggcatgcgcttcaagaggaagttcgcagtggaagcgcaccagtggatccaccgctcctgctccggggggcggcggggccggaggcctgggatccgggctgtgcctcgggcccccgtccgaggtgaccgggacccgcctgtgctcttccggcactacccagacatcttcgaggagtgcggctgagcggcaccgcaggctggagttgagcctgaccttggcacgaaggactgacggatccctgaggtgggccactgagtcggggactccggaactgaaattcatgccctgggctttcctcaaggatccctcaagtttccaacttgtaaaaagaaaagtgcctgtaaagattcgaatagattagacttgccacccatctccccagtcttttgtttaacaaaaaa

SEQ ID NO: 283029 - DNA, 2040 bp, Homo sapiens
ctgcttctaccgcgggtgtacacatggtttgccagggtgtgcgcgtcttcccaaggggtctggggaccaaattccagctcccgccatcgggaggcacggtaagagaccgtaggggacacaatcccgagcaccgcagatgccgaggtctccgctgcgctccagtctgtcaacagaggcttcaggaccgcggggtcccttcaaatgccccgccagtcccaggccaatcaccgcgcagcttcttccgggatcgtcgccaatcatcggccgttgcgtattgcgggtacagaggggtaagtgaagcttcgggcccttacatctttcttgaaggcaagaagcctctcctctacttcccagacaccccgcctcccccactagaaaaagcagccgaagcggctttatttaagggcaagtgggacgatgaggccagagaagtcagaaaggctccatatttgatatggtcaaataatggcgcccttaagagcagcctgtgacaattgaagggtggtcgccatattttcagaaggcaccttccgggtcccttaacccgggtgtctatgtccaagcggccatgaagtgaataaacactgaggaattatatttgtccctatcagaatcctcgaatccctagcagccagtccctgctacttcggttgcctcggctgcgttcggacgccacggctgggcggggccgcccttcctgtggacaacgacagctgaggccgggagcggggaggcggcggctccagggacctggcggccgccgatcggggctgcgaggccccatggcgccgcccccagccccgctcctggcgccgaggcccggggagacccggcctggttgcaggaagcccgggactgtgagcttcgcggacgtggccgtgtacttctccccggaggagtggggctgtctgcggcccgcgcagagggctctgtaccgggacgtgatgcaggagacctacggccacctgggcgcgctcggtgagagccccgggtccgagccccctcctccttcaccgggttcacaggggagatgatgtagaagggccgagaggactgtgagccctaatcccgcactcttgcaccaacaccagcagccacctcccgttcccagggcttcaggtaccccctcgggagtgttttcacccgcatccatttcattcaggcagcagcactgcagccccttccaggattcccaggccccaaaccagccctcatctcttggatggaacaggagagtgaggcttggagccccgccgcccaggatcctgagaagggggaaagactgggaggagctcggagaggagatgtcccaaacaggaaggaagaggaaccggaggaagtcccaagagccaaagggcctagaaaggctcctgtgaaggagagtcctgaagtgctggtggaacgcaaccctgacccagctattagcgtggccccggcacgggcacagccacccaaaaatgctgcctgggacccgaccacaggagcacagcccccggcacccatacccagcatggatgctcaggccggccagcggcgccacgtgtgcacggactgcggccgccgcttcacctacccctcactgctggtcagccacaggcgcatgcactcgggggagcggcctttcccctgccccgagtgtggcatgcgcttcaagaggaagttcgcagtggaagcgcaccagtggatccaccgctcctgctccggggggcggcggggccggaggcctgggatccgggctgtgcctcgggcccccgtccgaggtgaccgggacccgcctgtgctcttccggcactacccagacatcttcgaggagtgcggctgagcggcaccgcaggctggagttgagcctgaccttggcacgaaggactgacggatccctgaggtgggccactgagtcggggactccggaactgaaattcatgccctgggctttcctcaaggatccctcaagtttccaacttgtaaaaagaaaagtgcctgtaaagattcgaatagattagacttgccacccatctccccagtcttttgtttaacaaaaaa

SEQ ID NO: 283030 - DNA, 1926 bp, Homo sapiens
ctgcttctaccgcgggtgtacacatggtttgccagggtgtgcgcgtcttcccaaggggtctggggaccaaattccagctcccgccatcgggaggcacggtaagagaccgtaggggacacaatcccgagcaccgcagatgccgaggtctccgctgcgctccagtctgtcaacagaggcttcaggaccgcggggtcccttcaaatgccccgccagtcccaggccaatcaccgcgcagcttcttccgggatcgtcgccaatcatcggccgttgcgtattgcgggtacagaggggtaagtgaagcttcgggcccttacatctttcttgaaggcaagaagcctctcctctacttcccagacaccccgcctcccccactagaaaaagcagccgaagcggctttatttaagggcaagtgggacgatgaggccagagaagtcagaaaggctccatatttgatatggtcaaataatggcgcccttaagagcagcctgtgacaattgaagggtggtcgccatattttcagaaggcaccttccgggtcccttaacccgggtgtctatgtccaagcggccatgaagtgaataaacactgaggaattatatttgtccctatcagaatcctcgaatccctagcagccagtccctgctacttcggttgcctcggctgcgttcggacgccacggctgggcggggccgcccttcctgtggacaacgacagctgaggccgggagcggggaggcggcggctccagggacctggcggccgccgatcggggctgcgaggccccatggcgccgcccccagccccgctcctggcgccgaggcccggggagacccggcctggttgcaggaagcccgggactgtgagcttcgcggacgtggccgtgtacttctccccggaggagtggggctgtctgcggcccgcgcagagggctctgtaccgggacgtgatgcaggagacctacggccacctgggcgcgctcggtgagagccccgggtccgagccccctcctccttcaccgggttcacaggggagatgatgtagaagggccgagaggactgtgagccctaatcccgcactcttgcaccaacaccagcagccacctcccgttcccagggcttcaggtaccccctcgggagtgttttcacccgcatccatttcattcaggcagcagcactgcagccccttccaggagatgtcccaaacaggaaggaagaggaaccggaggaagtcccaagagccaaagggcctagaaaggctcctgtgaaggagagtcctgaagtgctggtggaacgcaaccctgacccagctattagcgtggccccggcacgggcacagccacccaaaaatgctgcctgggacccgaccacaggagcacagcccccggcacccatacccagcatggatgctcaggccggccagcggcgccacgtgtgcacggactgcggccgccgcttcacctacccctcactgctggtcagccacaggcgcatgcactcgggggagcggcctttcccctgccccgagtgtggcatgcgcttcaagaggaagttcgcagtggaagcgcaccagtggatccaccgctcctgctccggggggcggcggggccggaggcctgggatccgggctgtgcctcgggcccccgtccgaggtgaccgggacccgcctgtgctcttccggcactacccagacatcttcgaggagtgcggctgagcggcaccgcaggctggagttgagcctgaccttggcacgaaggactgacggatccctgaggtgggccactgagtcggggactccggaactgaaattcatgccctgggctttcctcaaggatccctcaagtttccaacttgtaaaaagaaaagtgcctgtaaagattcgaatagattagacttgccacccatctccccagtcttttgtttaacaaaaaa

SEQ ID NO: 283031 - DNA, 1756 bp, Homo sapiens
ctgcttctaccgcgggtgtacacatggtttgccagggtgtgcgcgtcttcccaaggggtctggggaccaaattccagctcccgccatcgggaggcacggtaagagaccgtaggggacacaatcccgagcaccgcagatgccgaggtctccgctgcgctccagtctgtcaacagaggcttcaggaccgcggggtcccttcaaatgccccgccagtcccaggccaatcaccgcgcagcttcttccgggatcgtcgccaatcatcggccgttgcgtattgcgggtacagaggggtaagtgaagcttcgggcccttacatctttcttgaaggcaagaagcctctcctctacttcccagacaccccgcctcccccactagaaaaagcagccgaagcggctttatttaagggcaagtgggacgatgaggccagagaagtcagaaaggctccatatttgatatggtcaaataatggcgcccttaagagcagcctgtgacaattgaagggtggtcgccatattttcagaaggcaccttccgggtcccttaacccgggtgtctatgtccaagcggccatgaagtgaataaacactgaggaattatatttgtccctatcagaatcctcgaatccctagcagccagtccctgctacttcggttgcctcggctgcgttcggacgccacggctgggcggggccgcccttcctgtggacaacgacagctgaggccgggagcggggaggcggcggctccagggacctggcggccgccgatcggggctgcgaggccccatggcgccgcccccagccccgctcctggcgccgaggcccggggagacccggcctggttgcaggaagcccgggactgtgagcttcgcggacgtggccgtgtacttctccccggaggagtggggctgtctgcggcccgcgcagagggctctgtaccgggacgtgatgcaggagacctacggccacctgggcgcgctcggattcccaggccccaaaccagccctcatctcttggatggaacaggagagtgaggcttggagccccgccgcccaggatcctgagaagggggaaagactgggaggagctcggagaggagatgtcccaaacaggaaggaagaggaaccggaggaagtcccaagagccaaagggcctagaaaggctcctgtgaaggagagtcctgaagtgctggtggaacgcaaccctgacccagctattagcgtggccccggcacgggcacagccacccaaaaatgctgcctgggacccgaccacaggagcacagcccccggcacccatacccagcatggatgctcaggccggccagcggcgccacgtgtgcacggactgcggccgccgcttcacctacccctcactgctggtcagccacaggcgcatgcactcgggggagcggcctttcccctgccccgagtgtggcatgcgcttcaagaggaagttcgcagtggaagcgcaccagtggatccaccgctcctgctccggggggcggcggggccggaggcctgggatccgggctgtgcctcgggcccccgtccgaggtgaccgggacccgcctgtgctcttccggcactacccagacatcttcgaggagtgcggctgagcggcaccgcaggctggagttgagcctgaccttggcacgaaaggatccctcaagtttccaacttgtaaaaagaaaagtgcctgtaaagattcgaatagattagacttgccacccatctccccagtcttttgtttaacaaaaaa

SEQ ID NO: 283032 - DNA, 4344 bp, Homo sapiens
gagattctgtgccccttgtcgggccgcttgtttggctgctgccgtcacctcatggcgacgcgggtagaggaggcagcgcggggaagaggcggcggcgccgaagaggcgactgaggccggacggggcggacggcgacgcagcccgcggcagaagtttgaaattggcacaatggaagaagctggaatttgtgggctaggggtgaaagcagatatgttgtgtaactctcaatcaaatgatattcttcaacatcaaggctcaaattgtggtggcacaagtaacaagcattcattggaagaggatgaaggcagtgactttataacagagaacaggaatttggtgagcccagcatactgcacgcaagaatcaagagaggaaatccctgggggagaagctcgaacagatccccctgatggtcagcaagattcagagtgcaacaggaacaaagaaaaaactttaggaaaagaagttttattactgatgcaagccctaaacaccctttcaaccccagaggagaagctggcagctctctgtaagaaatatgctgatcttctggaggagagcaggagtgttcagaagcaaatgaagatcctgcagaagaagcaagcccagattgtgaaagagaaagttcacttgcagagtgaacatagcaaggctatcttggcaagaagcaagctagaatctctttgcagagaacttcagcgtcacaataagacgttaaaggaggaaaatatgcagcaggcacgagaggaagaagaacgacgtaaagaagcaactgcacatttccagattaccttaaatgaaattcaagcccagctggagcagcatgacatccacaacgccaaactccgacaggaaaacattgagctgggggagaagctaaagaagctcatcgaacagtacgcactgagggaagagcacattgataaggtgttcaaacataaggaactgcaacagcagctcgtggatgccaaactgcagcaaacgacacaactgataaaagaagctgatgaaaaacatcagagagagagagagtttttattaaaagaagcgacagaatcgaggcacaaatacgaacaaatgaaacagcaagaagtacaactaaaacagcagctttctctttatatggataagtttgaagaattccagactaccatggcaaaaagcaatgaactgtttacaaccttcagacaggaaatggaaaagatgacaaagaaaattaaaaaactggaaaaagaaacaataatttggcgtaccaaatgggaaaacaataataaagcacttctgcaaatggctgaagagaaaacagtccgtgataaagagtacaaggcccttcaaataaaactggaacggttagagaagctgtgcagggctcttcaaacagaaaggaatgagctcaatgagaaggtggaagtcctgaaagagcaggtatccatcaaagcggccatcaaagcggcgaacagggatttagcaacacctgtgatgcagccctgtactgccctggattctcacaaggagctgaacacttcctcgaaaagagccctgggagcgcacctggaggctgagcccaagagtcagagaagcgctgtgcaaaagcccccgtccacaggctctgctccggccatcgagtcggttgactaagatgaggtgtgatcactgtattgagagatatattttgtgtataactttctctgttagtagttaactattggttttgtggtgaaaattttcttactttttctaccatatctgtattttcttagaactactggacttatgtggtacaggaggctgcttagcagttttgaatagtttaatctatcatgtgttcattgccttgtcctttctctccctgctccttgcacattatcatcctaatgaaaatttcactgacagggccgaccattacaagggaactttgttctgacgatggttccttgatgtgaaaacaatattaatttaaacgtcttagcccccccccccataatattattcagaaaaacaaaataccaaggcgattagttttgtctaataacccatttaaatgccaagtaaaaataaaactcctagtgttgggtcagaagcatatttgattgaaattagctttttgaaaacatttatatctcgggacaaattgagatggccacatgcctagaatcctaagtttcggcagaatatgtatataaagatgtcacttgtggacaaaatagtacatagaggcaaatcactagacaaataagcttagtgtttacgtgactgaacagtcatcctgctttggtttcaggtgtgggatttggaccatgaggggctcccgtagaggatggcggtttgtgtttgattctgatttgggatttcagtacatattctccacttcccatagaaggccacttattctttgaaaactggtgttcatgtttgccgttcaatgaagtcccttgtcaaagacaaggacggtcaattcacgtgtcactttcactaggcagaagtttctccaataccttctggctacttgaaagttactacaaaaattccaccagcaaagtactccaggtttttcaaaagggaattttcattatggatcagtaccaaccgaaattgattttcatttccaaaacaaacactggcaccaacatttttactttgggaagacttggcagagtgttagtcatgatctgttacttacgtgttcagtctgttttctcacccccttcttagttaccatctcttttttaagaagaaaaaagaaaagccacagtattatcaaggtctctacacttggactgggggaaaatttgaaattaagcacataacttttgaattagttctttgtttcaatgttgaatgtggcgcagttatgcagatgattaatcaggctgcactgatggaagttttgactttgtccctggtataatttgcattgaaatgctttatgaaataaaaggttctactagaactgatgttagcacattccactgagcaaaactatcagactgacacttgttaaattgcttactggactgaataaactctgttttgtccagttaaaagggttttctctttgttacaagtgttatttgtaaagtcctgtcacattcatggtcgaaactgggttgaaagaattgaaaattgtccaacagatagatagataggaaaccgcctggagtggaggagggttgtatctaagcctccactatcagtcatgttaattcaaggggccacagtggaggaaaataaatccacaaagtagattatctaattaccatcaaaatgagtcagaagcaaaaaacaccaccctccaacagcctcttaggagtacaccctgttctgctactaaaatactagactcatttccctggtggtgggggggaatgcaggtatagatcagaaatataatccaccttaaaattagtactaatgatcacattatttcacaagaactctgctggatgtacagctcttaacattttattaagccatttgtgtagcccaccacgtttctttgtggtgcttgtcctgtgtggaagattgtaaatcttgggcctgttgcatacttccaagggctttaaagcaatgtgattaacagtacttggcctgctgcttttggcttactttgtatttttagctagatgctattatagtgttgaaaggatatggattctgtctgggatgcatttgttgtcctttcagaacccttcctcccattaccctgtgaataaaaacaaatgggaccccctgagaaggacatcttcctacagtgatcacctcaccagcccagtgttgtggctttgtagcgcaccccgtatctaccatattctagaacactgtaatgctactaggctggcccagaaaaggtttaaatgttgaattcacttaaattgcaattgttgcaccatcatggaatcgtgatgtgtattatttatattggcggtggactccaaggtgtagagaaaacttgggtcttgggtaatatggaccatttcatcctcagacttgttaggagtacatttcttggtcttgagaccagtatttttcagttatgtatgcaactgcctttattacacctggttatcacaattcaattctcaggtgttgcagaaaaatctacctctttcagactgtagatggaaataactgtgaaaaaaatgatgcagatatcttctagtttgtgctaaacacactgctttatttttacagcccacgtctttcatgaggatacgaattgttaagaggcagtctcgttttgcttttcaaagacattttgtagagatttttcactaatgtgaatctgattttatctacttgattctgtatagattaagtaaatatgtatgataaacttaaaaaaaa

SEQ ID NO: 283033 - DNA, 4397 bp, Homo sapiens
gagattctgtgccccttgtcgggccgcttgtttggctgctgccgtcacctcatggcgacgcgggtagaggaggcagcgcggggaagaggcggcggcgccgaagaggcgactgaggccggacggggcggacggcgacgcagcccgcggcagaagtttgaaattggcacaatggaagaagctggaatttgtgggctaggggtgaaagcagatatgttgtgtaactctcaatcaaatgatattcttcaacatcaaggctcaaattgtggtggcacaagtaacaagcattcattggaagaggatgaaggcagtgactttataacagagaacaggaatttggtgagcccagcatactgcacgcaagaatcaagagaggaaatccctgggggagaagctcgaacagatccccctgatggtcagcaagattcagagtgcaacaggaacaaagaaaaaactttaggaaaagaagttttattactgatgcaagccctaaacaccctttcaaccccagaggagaagctggcagctctctgtaagaaatatgctgatcttctggaggagagcaggagtgttcagaagcaaatgaagatcctgcagaagaagcaagcccagattgtgaaagagaaagttcacttgcagagtgaacatagcaaggctatcttggcaagaagcaagctagaatctctttgcagagaacttcagcgtcacaataagacgttaaaggaggaaaatatgcagcaggcacgagaggaagaagaacgacgtaaagaagcaactgcacatttccagattaccttaaatgaaattcaagcccagctggagcagcatgacatccacaacgccaaactccgacaggaaaacattgagctgggggagaagctaaagaagctcatcgaacagtacgcactgagggaagagcacattgataaggtgttcaaacataaggaactgcaacagcagctcgtggatgccaaactgcagcaaacgacacaactgataaaagaagctgatgaaaaacatcagagagagagagagtttttattaaaagaagcgacagaatcgaggcacaaatacgaacaaatgaaacagcaagaagtacaactaaaacagcagctttctctttatatggataagtttgaagaattccagactaccatggcaaaaagcaatgaactgtttacaaccttcagacaggaaatggaaaagatgacaaagaaaattaaaaaactggaaaaagaaacaataatttggcgtaccaaatgggaaaacaataataaagcacttctgcaaatggctgaagagaaaacagtccgtgataaagagtacaaggcccttcaaataaaactggaacggttagagaagctgtgcagggctcttcaaacagaaaggaatgagctcaatgagaaggtggaagtcctgaaagagcaggtatccatcaaagcggccatcaaagcggcgaacagggatttagcaacacctgtgatgcagccctgtactgccctggattctcacaaggagctgaacacttcctcgaaaagagccctgggagcgcacctggaggctgagcccaagagtcagagaagcgctgtgcaaaagcccccgtccacaggctctgctccggccatcgagtcggttgactaagatgaggtgtgatcactgtattgagagatatattttgtgtataactttctctgttagtagttaactattggttttgtggtgaaaattttcttactttttctaccatatctgtattttcttagaactactggacttatgtggtacaggaggctgcttagcagttttgaatagtttaatctataaattttcctcagctgtgttgcacatcagcctcgttctccctccactggaatgcatgtgttcattgccttgtcctttctctccctgctccttgcacattatcatcctaatgaaaatttcactgacagggccgaccattacaagggaactttgttctgacgatggttccttgatgtgaaaacaatattaatttaaacgtcttagcccccccccccataatattattcagaaaaacaaaataccaaggcgattagttttgtctaataacccatttaaatgccaagtaaaaataaaactcctagtgttgggtcagaagcatatttgattgaaattagctttttgaaaacatttatatctcgggacaaattgagatggccacatgcctagaatcctaagtttcggcagaatatgtatataaagatgtcacttgtggacaaaatagtacatagaggcaaatcactagacaaataagcttagtgtttacgtgactgaacagtcatcctgctttggtttcaggtgtgggatttggaccatgaggggctcccgtagaggatggcggtttgtgtttgattctgatttgggatttcagtacatattctccacttcccatagaaggccacttattctttgaaaactggtgttcatgtttgccgttcaatgaagtcccttgtcaaagacaaggacggtcaattcacgtgtcactttcactaggcagaagtttctccaataccttctggctacttgaaagttactacaaaaattccaccagcaaagtactccaggtttttcaaaagggaattttcattatggatcagtaccaaccgaaattgattttcatttccaaaacaaacactggcaccaacatttttactttgggaagacttggcagagtgttagtcatgatctgttacttacgtgttcagtctgttttctcacccccttcttagttaccatctcttttttaagaagaaaaaagaaaagccacagtattatcaaggtctctacacttggactgggggaaaatttgaaattaagcacataacttttgaattagttctttgtttcaatgttgaatgtggcgcagttatgcagatgattaatcaggctgcactgatggaagttttgactttgtccctggtataatttgcattgaaatgctttatgaaataaaaggttctactagaactgatgttagcacattccactgagcaaaactatcagactgacacttgttaaattgcttactggactgaataaactctgttttgtccagttaaaagggttttctctttgttacaagtgttatttgtaaagtcctgtcacattcatggtcgaaactgggttgaaagaattgaaaattgtccaacagatagatagataggaaaccgcctggagtggaggagggttgtatctaagcctccactatcagtcatgttaattcaaggggccacagtggaggaaaataaatccacaaagtagattatctaattaccatcaaaatgagtcagaagcaaaaaacaccaccctccaacagcctcttaggagtacaccctgttctgctactaaaatactagactcatttccctggtggtgggggggaatgcaggtatagatcagaaatataatccaccttaaaattagtactaatgatcacattatttcacaagaactctgctggatgtacagctcttaacattttattaagccatttgtgtagcccaccacgtttctttgtggtgcttgtcctgtgtggaagattgtaaatcttgggcctgttgcatacttccaagggctttaaagcaatgtgattaacagtacttggcctgctgcttttggcttactttgtatttttagctagatgctattatagtgttgaaaggatatggattctgtctgggatgcatttgttgtcctttcagaacccttcctcccattaccctgtgaataaaaacaaatgggaccccctgagaaggacatcttcctacagtgatcacctcaccagcccagtgttgtggctttgtagcgcaccccgtatctaccatattctagaacactgtaatgctactaggctggcccagaaaaggtttaaatgttgaattcacttaaattgcaattgttgcaccatcatggaatcgtgatgtgtattatttatattggcggtggactccaaggtgtagagaaaacttgggtcttgggtaatatggaccatttcatcctcagacttgttaggagtacatttcttggtcttgagaccagtatttttcagttatgtatgcaactgcctttattacacctggttatcacaattcaattctcaggtgttgcagaaaaatctacctctttcagactgtagatggaaataactgtgaaaaaaatgatgcagatatcttctagtttgtgctaaacacactgctttatttttacagcccacgtctttcatgaggatacgaattgttaagaggcagtctcgttttgcttttcaaagacattttgtagagatttttcactaatgtgaatctgattttatctacttgattctgtatagattaagtaaatatgtatgataaacttaaaaaaaa

SEQ ID NO: 283034 - DNA, 447 bp, Homo sapiens
aaaatcgcctgatgatgcatgtgaagggctggaatgaagttgttttaatacatgggaatggaaacagacactattccaaggatgacagattatcttatatgtggttttaaaatatgtctatacaagtaaataaatattacatgtacactgtagattatgtcaccaatatttctagaggtttacattttcaccttcccttttctggttcaccttggaaagtgggtgttgccgcattctgtctgggtgctggtggtacttgtttaaaatgatgctttcgtgtttaccttgaaccatggtgtagaaagaatcgatcgaggacagatttgaagtgatgctgacatcttcttctcggctagatgactcaatgtccactgtgatagccttgtccatgtccccatgcagcaccagagaaaatttcaaaaatgatggtgtcgtctgaagaaagaa

SEQ ID NO: 283035 - DNA, 1251 bp, Homo sapiens
  misc_feature (2)..(4): n is a, c, g, or t
  misc_feature (8)..(8): n is a, c, g, or t
  misc_feature (11)..(11): n is a, c, g, or t
  misc_feature (13)..(13): n is a, c, g, or t
gnnntggncgngncgcaggacctgggcgtggggacaccaccaggcaggagcagaggcaggactgggacgccaaaagctgagaatcctcgatgcccgcgcgagagccccgtgttatggcgagttctggaggctgggaagttcaagaccaatgcacgagaatttggtctaaagagaatcttcttgctctgaacacacatagtagaaggcagaagggcaagagagagaacaaagtctgtgtctccacatggcagaagagcagaggagacagaacctactcctctatggcaaccaccccatcaatgacaaaaatcctagaaggatgtatgtataggaagttgaagtgttgagaagagaatggctcagagtcaagcgggaacaagattcaaacttcagagagagagggaagaaaaacatttaaatatatctggcataatccaagactatttacgacaagtgttctgtgtttctaataataaaacagacttcacctcggagtacctgcagaactgggaccccaatgaccagggagaatgaagaacaacttgttgaaggtatagagaaggcagcaaatcatacaagaaggtccatcccaaaccagagatagtatagataaatctctcatgttaactatggaaaaaataaaggaagatgacgtattttaatagaagggaaattgcgcttattgggagtaagaacactgaattgactgaatatcttaaagagagttaggaagtgaaattctcaacaggtgattattctttgaccaattttgtcttatctcttatccacattcttccctgctcttcccaatacatgtgtaagaatatccaagggcacacacataccataagcaggaatggtgtcctaaggaaagtcaatatagagagtaagaagtatatctgtcacaatgtgtacatgtatacatcctaaatatttgtacaattaatttacttctcttcatttccaacactcctagtctatgctatgaacatctcttacctaaaatgctacagatgtcccctaaatttttccataaatcagttttttcctctccaagctgtaagcagaaatgcatttttaaattgcagatatgaccgtgacacgtatctgtctcagtttatagaacaggtctctaacagggccagcagcttccagtcacttctgtcccttaccttttctccagtctcattttacatatttttttacatgctctctatattcctgtaattaaatattactttcccctcaatg

SEQ ID NO: 283036 - DNA, 231 bp, Homo sapiens
gcggccgccggaagccgactgggccctctgggcagccaatgcccgcccgccgtagtggagcccgagcgagggtcgcggggcccctgtccgcgctgggcgcagactctcctgcaccctccggggatggggcctcggaaacggacactgaggggcgtcccgcttgcgagcctaagtccatggaggcccaaatgtggaaagccgtctcgcatcctgggaaaggcttccttgcca

SEQ ID NO: 283037 - DNA, 1109 bp, Homo sapiens
agcaggatccctgcgtgcgatatttattgatataggaaaatgcttacagaatgtattaggagtatcttacacttttttaataattatgtatgtaatacatgaatagattctccttgtaaaaaacaaactcaaacacacagaaaaagttaatgactcccttgatgactgccagtttgaagtgtttttccagaccttaaaaaaatatactttcatacaagcatatgtacatatagaaagatatactttaatggggcatctttcatcataaattggatcataatgtgcaaattgtgtcacaacttttattctctgtttgttttcagacagggtctcactttgttgcccaggctggagtgcaatggcgcaatcatggctcactgcgccctccacctcccaggctcaagccatcctcctatctcagcctcctgagtagttgagacaacaggcatgtgccaccatgtctggctaatattttaataaaattttttgtagagacaggttctccatatgttgcccaggctttgattcttctaatgctcggtattaagactctatgactgtgtattatacatagagtttacatgtgagtaagttctgggtggagagacactattccttgctagggccttaagagtctggctgcagctctgctatcacatgggcaaaaccagctacataatttacaagatccagtgcaaaataaaaatgtgacatttcttgttaaaaatcattgtgaatttcaagatggcaacaacaaagcattaaaccaagcagggggcctttctaagcttgagcccccgtgtgactgcacaggtcatatgcccatgaagctggctctgcagagactagctgaccgttggactggctgtgtcctggattcttttagttaatgcattccgtgttctgacaatggacattcctgtctcagcctccacattggatctggtcccctgattctgcacccaacattcctcagccacattccctgctccaaagccagagctctatgtattccagcacaagcaaagtcccagggtccatgcctgccagtcagcattgctctggaggcacccacaaagatggcaaagatggggggtgaagggggtatt

SEQ ID NO: 283038 - DNA, 340 bp, Homo sapiens
cccggcggtgctgccctcctaggccccgggaaggccggccggcaggggcgggggcaggagtcgccgactctgggggtgctccgagctcgtgctgcggtcccactgtgcgccctgtcgccgccaccgcggaaaacgtcttgcacgtgcgaggggcatttcaggagtttcctgtctgtcaggctggagtgcaatggcgcaatcatggctcactgcgccctccacctcccaggctcaagccatcctcctatctcagcctcctgagtagttgagacaacaggcatgtgccaccatgtctggctaatattttaataaaattttttgtagagacaggttctccata

SEQ ID NO: 283039 - DNA, 246 bp, Homo sapiens
cagcaaaaattgttaaacaagtaagttaaagctaagtagttaaattgcaataaaatctataacaagttcacacgtccttttgcgtcgattcatctcaagtacaaaacatcaaaaaatttgaaagtaggtttttaactcttaaagtacatgacttatgaatccaagtttccttttttaagaaaaaaactaagtaaactgctttttaaaaatcaggaattctacttgatgtttttaatatgaaagata

SEQ ID NO: 283040 - DNA, 325 bp, Homo sapiens
gctccgcgttctccattttgggccacccatggggggggggggtctccgtagaggccccgagggagagttgggcgagggaaggaagagaaaatcttcagcgagggtagtcgaaaagaagagccctgcggtagaaagccactctaggagtaggagtgtattggacctttgaccgccaagagctctttactcgggggagaaaaactcgaggagggcctatcccctccaaagcgccgctttttccttggacaggaagaagtgacctattgcagtgtctccattgctgttatagaagttcgtagattcataaaatagtgtttgcttaaga

SEQ ID NO: 283041 - DNA, 1119 bp, Homo sapiens
ggttaactcaagatatatcttcctagtattcctgtgagttaattccctaaactttcttttccacatccaaagtcagaaaacatccacatgccatgaaattcacccttcttaaaaccctgtgatctctagatagtctttccttcatcagacccttgagcaaaattgaatgcagatgttctcttttcttttcttttttctgatatttgctaaactactgttttgattgtcctgtactttaaatttccattcaataaattattgctacataatattaatactgtaaagatctaatattaaaatagaattaattggtaaggactcctttaaactactcccttctcctcataccaaatcaggatagctttaaatagccatgagttggcaataatgactttcctttgttccttttattgcaagttaattgagcctgtcagaacatctctgctaaacaaacatacttctggaccagtgattcacagtcttgggcttcaaattagaattacctgggaagtttgaagactcccagagctgacacagcacccccagaataattagaatctcaaggtgagacccaggaatcgggatttttcaaaagttctccgggtgatctaaatgtgcaactactactgagaactactggtgtggagtttaagtgtgaaagatgaaagatttttgctttcccatttctgataaataaatctaaggtaaagtttcggcactggctacgggaaatatgtttaagactttatgatattaaaggactagctagaaacgtctagggcaaaaagcaaaaagttgctgccatctctttaatattggtcctttcacatcaacatggatggcacgtctgtgttaagaggaagatagaactggtacgatgttggaactttgaaagagagtctccttctgacaccatgtgattcctatgacaagacagactctttcattaataaaatctcctaagatgctgccaaccaaatgactgccttgagattcttctgccagcctaatgattcccgagcctaggaatccctgctatgggtgctggtagttgtgaagctggcactaatgggtctcctaggtattacagaaagcaacagcacctagcagaattcctag

SEQ ID NO: 283042 - DNA, 943 bp, Homo sapiens
agggggcgcggcttcgccttcaccgtcggctccctgctcctgtcagaacctcggtgacggttggccagttacagtggctctgaaatgagagaaattgcagaaattctccctgctcaggaaaaggtagaggcaaggattgacttaaagatgggtaagaagcctgttactgatcataagctaaatgtggacaaagtaattaaaaatattaacacaatttcttcggagttgaagaagataaaagttaattgagcctgtcagaacatctctgctaaacaaacatacttctggaccagtgattcacagtcttgggcttcaaattagaattacctgggaagtttgaagactcccagagctgacacagcacccccagaataattagaatctcaaggtgagacccaggaatcgggatttttcaaaagttctccgggtgatctaaatgtgcaactactactgagaactactggtgtggagtttaagtgtgaaagatgaaagatttttgctttcccatttctgataaataaatctaaggtaaagtttcggcactggctacgggaaatatgtttaagactttatgatattaaaggactagctagaaacgtctagggcaaaaagcaaaaagttgctgccatctctttaatattggtcctttcacatcaacatggatggcacgtctgtgttaagaggaagatagaactggtacgatgttggaactttgaaagagagtctccttctgacaccatgtgattcctatgacaagacagactctttcattaataaaatctcctaagatgctgccaaccaaatgactgccttgagattcttctgccagcctaatgattcccgagcctaggaatccctgctatgggtgctggtagttgtgaagctggcactaatgggtctcctaggtattacagaaagcaacagcacctagcagaattcctag

SEQ ID NO: 283043 - DNA, 389 bp, Homo sapiens
ttcctcccctaaatagtaatgtcagcagccaacctttacagaatttaccataatccaggactcttctaagagctctgcataaatgaactctcttcatcataatcctatgagagctctcccagttattgctttgtgaccttatcctacattttaatcatcccatcaagactgagaacttagcagaagcagaaagaaacaaccccctctttgaagagtctaaaatatcagatgtatcccttgtttctaacagtttttctatctgatttcttatttgttatgagtttctgttttattgttgaactaacaaatatttgggagagttgagtttactaatttgtatatatataatttaaaacaaaataaaaataatgtaaacaagcaaaaaatgt

SEQ ID NO: 283044 - DNA, 693 bp, Homo sapiens
agggggcgcggcttcgccttcaccgtcggctccctgctcctgtcagaacctcggtgacggttggccagttacagtggctctgaaatgagagaaattgcagaaattctccctgctcaggaaaaggtagaggcaaggattgacttaaagatgggtaagaagcctgttactgatcataagctaaatgtggacaaagtaattaaaaatattaacacaatttcttcggagttgaagaagataaaagatttgcatcacatgctgatgcttacagcagccacagctaaggggactgggactgccaagaccagtttggaccactcagaacttactacaggagctggggaaaggaacacctcaaacaaaatcaagctgtgactccaagaagaagagggcatggccgttcgttaggcaccaaataagctctcccagttattgctttgtgaccttatcctacattttaatcatcccatcaagactgagaacttagcagaagcagaaagaaacaaccccctctttgaagagtctaaaatatcagatgtatcccttgtttctaacagtttttctatctgatttcttatttgttatgagtttctgttttattgttgaactaacaaatatttgggagagttgagtttactaatttgtatatatataatttaaaacaaaataaaaataatgtaaacaagcaaaaaatgt

SEQ ID NO: 283045 - DNA, 1426 bp, Homo sapiens
acacaccattcaagactatgtcacattcagcaaaattcattgtctttataaattcttactaagcccctaaggtccattccaaattaaaaagtataaattagattctgtgacttaaagcttcttcattttaaacagattcatatagtaggattagaccttataggtcatgatgtttagtcgctcacctcacagacatattcagttattttatcccaagaaaatttctgtgattgaatatttctagggataatctatccctgaccaaacatttcttatgctggggaacttcctgtctcactagtcaatccattctattttaaacaattccttctcaccagctagctgaaatctgttcccctattgctttcacctaagagtcctatttctaaccatgaaaactacactgaatatgtagttattctttttaaaacaactcttgggtatttaaagataacctgtgtcagttatgaggcctacatctataagtaacaaaaaaaccaacttaacttatacaataaggaaaaacaagaagatccaaggtagcagagccctaaagttaattcagaggtttaaagattttgtcagggaccaggctctttccatctttctgctctgtcatgttcactctctttattacccctcatgatcattaccttcagaggtgctcatatatagacagtctctttttataagtctcctcccagatccctccagcacagttccctttcattggccagatttgcatcacatgctgatgcttacagcagccacagctaaggggactgggactgccaagaccagtttggaccactcagaacttactacaggagctggggaaaggaacacctcaaacaaaatcaagctgtgactccaagaagaagagggcatggccgttcgttaggcaccaaatacttcaacaccacagtgaagattctccttctaaaatgcgaatctgcagaaaaccctcattggctcaccattgtcctcaggataaagtctaaacatcttagaatggactatatgacctgctcagatcattcccctcctttcccctctagtctcttactctgttcttactgcatgttctatgctccagctgtactgaactatttgcatatctccacaagtgcttttctgtatctgtttcaacacatacttgtctgtctgaaatcccattgctataccctacctccaacacaccaggttaactgctagtagtcaaggtctcttacaatggaaaactttttttgagccagcatgttatcctttctgccttttgctatcacctgttatactattttataattgcatatttccttacttttcttatccctgctcaactgtaagctccttatgggtatttctagtacttaacacggtgccttgattgattcgattcttaaaaaatttttattaaatgaataaa

SEQ ID NO: 283046 - DNA, 930 bp, Homo sapiens
agggggcgcggcttcgccttcaccgtcggctccctgctcctgtcagaacctcggtgacggttggccagttacagtggctctgaaatgagagaaattgcagaaattctccctgctcaggaaaaggtagaggcaaggattgacttaaagatgggtaagaagcctgttactgatcataagctaaatgtggacaaagtaattaaaaatattaacacaatttcttcggagttgaagaagataaaagatttgcatcacatgctgatgcttacagcagccacagctaaggggactgggactgccaagaccagtttggaccactcagaacttactacaggagctggggaaaggaacacctcaaacaaaatcaagctgtgactccaagaagaagagggcatggccgttcgttaggcaccaaatacttcaacaccacagtgaagattctccttctaaaatgcgaatctgcagaaaaccctcattggctcaccattgtcctcaggataaagtctaaacatcttagaatggactatatgacctgctcagatcattcccctcctttcccctctagtctcttactctgttcttactgcatgttctatgctccagctgtactgaactatttgcatatctccacaagtgcttttctgtatctgtttcaacacatacttgtctgtctgaaatcccattgctataccctacctccaacacaccaggttaactgctagtagtcaaggtctcttacaatggaaaactttttttgagccagcatgttatcctttctgccttttgctatcacctgttatactattttataattgcatatttccttacttttcttatccctgctcaactgtaagctccttatgggtatttctagtacttaacacggtgccttgattgattcgattcttaaaaaatttttattaaatgaataaa

SEQ ID NO: 283047 - DNA, 580 bp, Homo sapiens
agggggcgcggcttcgccttcaccgtcggctccctgctcctgtcagaacctcggtgacggttggccagttacagtggctctgaaatgagagaaattgcagaaattctccctgctcaggaaaaggtagaggcaaggattgacttaaagatgggtaagaagcctgttactgatcataagctaaatgtggaccagtttggaccactcagaacttactacaggagctggggaaaggaacacctcaaacaaaatcaagctgtgactccaagaagaagagggcatggccgttcgttaggcaccaaataagctctcccagttattgctttgtgaccttatcctacattttaatcatcccatcaagactgagaacttagcagaagcagaaagaaacaaccccctctttgaagagtctaaaatatcagatgtatcccttgtttctaacagtttttctatctgatttcttatttgttatgagtttctgttttattgttgaactaacaaatatttgggagagttgagtttactaatttgtatatatataatttaaaacaaaataaaaataatgtaaacaagcaaaaaatgt

SEQ ID NO: 283048 - DNA, 322 bp, Homo sapiens
tctcttacaatggaaaactttttttgagccagcatgttatcctttctgccttttgctatcacctgttatactattttataattgcatatttccttacttttcttatccctgctcaactgtaagctccttatgggtatttctagtacttaacacggtgccttgattgattcgattcttaaaaaatttttattaaatgaataaatggttctggatgcttgaactcatttaaaacagttaagaagctttagattccccccaaacttgattatctaattgttctagtttggagaatattctttcataaaataaaatgtaataacta

SEQ ID NO: 283049 - DNA, 492 bp, Homo sapiens
cactctctttattacccctcatgatcattaccttcagaggtgctcatatatagacagtctctttttataagtctcctcccagatccctccagcacagttccctttcattggccagatttgcatcacatgctgatgcttacagcagccacagctaaggggactgggactgccaagaccagtttggaccactcagaacttactacaggagctggggaaaggaacacctcaaacaaaatcaagctgtgactccaagaagaagagggcatggccgttcgttaggcaccaaatagtgagtgcctaatatgctttttccatgtgttctccctaggacagcatttcctggactttgatctgtgaaccctgctgtttcaagcaatgttaatagatggtgtacagtagaacagagtcaatgttcttatggccaaataagtttggaaagtgctttatgctacatattttacaaatttacagtacatattaagaaatctgact

SEQ ID NO: 283050 - DNA, 472 bp, Homo sapiens
ccaccttccaccacccaacggttacagtggctctgaaatgagagaaattgcagaaattctccctgctcaggaaaaggtagaggcaaggattgacttaaagatgggtaagaagcctgttactgatcataagctaaatgtggacaaagtaattaaaaatattaacacaatttcttcggagttgaagaagataaaagagctctcccagttattgctttgtgaccttatcctacattttaatcatcccatcaagactgagaacttagcagaagcagaaagaaacaaccccctctttgaagagtctaaaatatcagatgtatcccttgtttctaacagtttttctatctgatttcttatttgttatgagtttctgttttattgttgaactaacaaatatttgggagagttgagtttactaatttgtatatatataatttaaaacaaaataaaaataatgtaaacaagcaaaaaatgt

SEQ ID NO: 283051 - DNA, 497 bp, Homo sapiens
cctgatttttattcttagagcaatttcttatatgggtctttatataacatttaaagggcagaataatagacaatatctccccggatactttttatcagcaagacaggaatgttccccaaatgacactgcttaagagaactttgaggagaactgagggcaagatacaagccatggttctatacagataagtctacggaagctgcagaaataacattccagatccccaggaatccacccacccacccctccgactttggccgaacaccatggctggctgccgtgtgaagaatggactgtagggggtgccagagtggctgtgggaaacatcccctagaaatctagaattcaaagcacttactttgagtgatatatccacaagaaagagccttctgtgctaaaagcaaaaaagaaataaaaacatatcatgttacttttaattctgagaaaggcgattttgtaaccattatcactgagcccggggctgagctaagagcctg

SEQ ID NO: 283052 - DNA, 481 bp, Homo sapiens
gcaaatttccaagggcacatgacatgtgggcacaaaagccgggatttcacaccaggggataaagtatatcagaaatgaaggctgggacaggaatgttccccaaatgacactgcttaagagaactttgaggagaactgagggcaagatacaagccatggttctatacagataagtctacggaagctgcagaaataacattccagatccccaggaatccacccacccacccctccgactttggccgaacaccatggctggctgccgtgtgaagaatggactgtagggggtgccagagtggctgtgggaaacatcccctagaaatctagaattcaaagcacttactttgagtgatatatccacaagaaagagccttctgtgctaaaagcaaaaaagaaataaaaacatatcatgttacttttaattctgagaaaggcgattttgtaaccattatcactgagcccggggctgagctaagagcctg

SEQ ID NO: 283053 - DNA, 1059 bp, Homo sapiens
ggaacagacgcccagtttgcgatttcaccagtctgcccttcctcgtcccgctgctcctcgtcctaaggagctctgctgccacacagcactgcgctcaccttcttcgccggcagaattgctacgctgaaagccaggccccgggaatcagggcaaacgccactgagttagaaactggcgggtcccctcagtgaaaggcagccggaacaacccccgccgctgcgcatgcgcactccgggacgcgcgcgaacacgcagcagcgagaatctacaggggcgtggtttgcgcacgcgggaactgggatctcaaccccagggctaggtgcctcctcccgctgctttccgccagctgcggggtgtgagattaatccccgccgattagcgccaggtgtactaagcgctggatggttccctgaccagatgaaacatcagccgatgttctaatgccggtcccctgggcgctgtccccgagagggaaaacctgttttctgaccccggctctagtcggcctctggaggtctgcagctgggttattttacctttgaaacggacgacacctgccccgtgcaccccagcggctcctccacacggagagatggtgtcagtcaaaggccgtctagatgacgagtttatgaaattgttcctggcccgtgccgggcacgaccttgcagagagcccagaagatgaaaccccagccttgccaggagctcacctgctaattaggaggacaacgaatcacctcacctccctagactttgcttctcctttattcagtgagggattggactagctggtccttgaggacttttcagaaagtctggttctgggagatgaccaatgggatcatcttatgctatgagctttcctggaatgacaggtaatggagagtgaggagattttacctgatatggtcctgtttgcaccatcagccagcaacatttctgggaagcatgcttattatgtaccaacataaaagcttgaatataaggtatgcagtcccaatttcctgatctcagattgaaatgttcaagctgtataacattaaattcaaagaaccatgtaa

SEQ ID NO: 283054 - DNA, 889 bp, Homo sapiens
gaggagctgggacgctggcggcagagccactgtggcagcttgagtctcgcgcgcgcaggaagcggaggtggaagttggggcgcaggaatgtggctgtccccgcctgtaaatcatggttggggaggagtcgcggaggcaccaggctggggtctgcagcgcgccatctgctgcagcacacaggaggcgctgaggctagttggagacagagtctcactgtgtcacccaggctggagtgaagtggcatgatcttggcttactgaaacctccatctcccaggttcaagcgattctcatgcctcagccacttgagtagctgggactacaggatttcgccatgttccccaggctggtctcaaactcctgaactcaggcagcccgcctaccttggcctcccaaagtgctaggattacagcccaaatgaccctccaagaccctctggaggcacccgcagtgctccttaatttgcagctctacagaatgagaccagcgtggcagccccctttcaggacagctcccgagacgagacgcgagagcagcccctaaatctcacccagcaaagccgtttcttcctaaccgggctggggagtgccgcgcgctgccagcagatggcgacagaggattagcctgcggaaaccgggtggcaaatgaatcttactataaccacttggaaccactgtgtttctggtccatcttgtgaggcccatctttggttcagagggatggaggcagaagtcatacggcagcttcacgattcgaactcaaatgtctggtcagctactcagccatctcttccaagctgtcaggtttccctaaggtaagagccatactgatatggtttggctctgtgtccccacccaaatctcatcttgaattttaatcccaataacccc

SEQ ID NO: 283055 - DNA, 822 bp, Homo sapiens
tccttgacgccgcgagcaggaccctgtctcactgaccccgtgcccacggcggtccttgcctgcttctattctcccggtttccccagtcccgagtattggaaagcgagagcgaaagcgaaagcatcctagtcgccgagacagagtctcactgtgtcacccaggctggagtgaagtggcatgatcttggcttactgaaacctccatctcccaggttcaagcgattctcatgcctcagccacttgagtagctgggactacaggatttcgccatgttccccaggctggtctcaaactcctgaactcaggcagcccgcctaccttggcctcccaaagtgctaggattacagcccaaatgaccctccaagaccctctggaggcacccgcagtgctccttaatttgcagctctacagaatgagaccagcgtggcagccccctttcaggacagctcccgagacgagacgcgagagcagcccctaaatctcacccagcaaagccgtttcttcctaaccgggctggggagtgccgcgcgctgccagcagatggcgacagaggattagcctgcggaaaccgggtaaggggagggcggagctgaggtgagaacccacatccctcatgcccagtggcagcaggacgtggaaatggtttgcccagccctcacttctcttggacagagcttgagccttctgggaaactgcttttccctggctgagtgattagcgggggtgttaagttgggaagctggacgttcacttccatgtgctcctctgagaaccatctgttggtctgatggtgctagatctgaagctggtgagcctcttgggg

SEQ ID NO: 283056 - DNA, 1333 bp, Homo sapiens
gaggagctgggacgctggcggcagagccactgtggcagcttgagtctcgcgcgcgcaggaagcggaggtggaagttggggcgcaggaatgtggctgtccccgcctgtaaatcatggttggggaggagtcgcggaggcaccaggctggggtctgcagcgcgccatctgctgcagcacacaggaggcgctgaggctagttggagacagagtctcactgtgtcacccaggctggagtgaagtggcatgatcttggcttactgaaacctccatctcccaggttcaagcgattctcatgcctcagccacttgagtagctgggactacaggatttcgccatgttccccaggctggtctcaaactcctgaactcaggcagcccgcctaccttggcctcccaaagtgctaggattacagcccaaatgaccctccaagaccctctggaggcacccgcagtgctccttaatttgcagctctacagaatgagaccagcgtggcagccccctttcaggacagctcccgagacgagacgcgagagcagcccctaaatctcacccagcaaagccgtttcttcctaaccgggctggggagtgccgcgcgctgccagcagatggcgacagaggattagcctgcggaaaccggcctttttatagccaacaagagcaaaagcacactgcaatgtccaaacgaattgcaggcgttttctgctccctgaagcctgggaattaatttatatactcagtcccttttcccttggctggccattgaagtagttgaaccacaggattggactgtccagaatcattagccagagttcactgtgagtggacgtcttttagttctgcttcaacgctataaccaacctttaccaaaagcaacaacaaaacaaaaaactgcagaaaccaatgagttctgttcacaaaggatggctcctcatgtcatcacaccggcaaggaatggacgagcctctgatttttctcttcttggctgactttacaaggttggatgcagtccatgaggatcatgcagcaaagacagaaagtgctggagaagcccaacctgcagggcctcacctttagctggtttgtgtggttccacttcatgtagctgttggaacaccagtctctctaatgtgctctatgggatagctgttaccttccactaatttatgtctaatacctataaacctaaagtatctttttaaaaattttattccgtctttttggaggaaatttttgtgcatgccagatatagtgtcaagcattgggattgctaagatgaacgtaacattgtcctcaccacccattaagtcacaatctagtagatgagtaaaagtaaa

SEQ ID NO: 283057 - DNA, 1206 bp, Homo sapiens
gaggagctgggacgctggcggcagagccactgtggcagcttgagtctcgcgcgcgcaggaagcggaggtggaagttggggcgcaggaatgtggctgtccccgcctgtaaatcatggttggggaggagtcgcggaggcaccaggctggggtctgcagcgcgccatctgctgcagcacacaggaggcgctgaggctagttggagacagagtctcactgtgtcacccaggctggagtgaagtggcatgatcttggcttactgaaacctccatctcccaggttcaagcgattctcatgcctcagccacttgagtagctgggactacaggatttcgccatgttccccaggctggtctcaaactcctgaactcaggcagcccgcctaccttggcctcccaaagtgctaggattacagcccaaatgaccctccaagaccctctggaggcacccgcagtgctccttaatttgcagctctacagaatgagaccagcgtggcagccccctttcaggacagctcccgagacgagacgcgagagcagcccctaaatctcacccagcaaagccgtttcttcctaaccgggctggggagtgccgcgcgctgccagcagatggcgacagaggattagcctgcggaaaccggcctttttatagccaacaagagcaaaagcacactgcaatgtccaaacgaattgcaggcgttttctgctccctgaagcctgggaattaatttatatactcagtcccttttcccttggctggccattgaagtagttgaaccacaggattggactgtccagaatcattagccagagttcactgtgagtggacgtcttttagttctgcttcaacgctataaccaacctttaccaaaagcaacaacaaaacaaaaaactgcagaaaccaatgagttctgttcacaaaggatggctcctcatgtcatcacaccggcaaggaatggacgagcctctgatttttctcttcttggctgactttacaaggttggatgcagtccatgaggatcatgcagcaaagacagaaagtgctggagaagcccaacctgcagggcctcacctttagctggtttgtgtggttccacttcatgtagctgttggaacaccagtctctctaatgtgctctatgggatagctgttaccttccactaatttatgtctaatacctataaacctaaagtatctttttaaaaatttta

SEQ ID NO: 283058 - DNA, 1355 bp, Homo sapiens
gaggagctgggacgctggcggcagagccactgtggcagcttgagtctcgcgcgcgcaggaagcggaggtggaagttggggcgcaggaatgtggctgtccccgcctgtaaatcatggttggggaggagtcgcggaggcaccaggctggggtctgcagcgcgccatctgctgcagcacacaggaggcgctgaggctagttggagacagagtctcactgtgtcacccaggctggagtgaagtggcatgatcttggcttactgaaacctccatctcccaggttcaagcgattctcatgcctcagccacttgagtagctgggactacaggatttcgccatgttccccaggctggtctcaaactcctgaactcaggcagcccgcctaccttggcctcccaaagtgctaggattacagcccaaatgaccctccaagaccctctggaggcacccgcagtgctccttaatttgcagctctacagaatgagaccagcgtggcagccccctttcaggacagctcccgagacgagacgcgagagcagcccctaaatctcacccagcaaagccgtttcttcctaaccgggctggggagtgccgcgcgctgccagcagatggcgacagaggattagcctgcggaaaccgggtaaggggagggcggagctgagcctttttatagccaacaagagcaaaagcacactgcaatgtccaaacgaattgcaggcgttttctgctccctgaagcctgggaattaatttatatactcagtcccttttcccttggctggccattgaagtagttgaaccacaggattggactgtccagaatcattagccagagttcactgtgagtggacgtcttttagttctgcttcaacgctataaccaacctttaccaaaagcaacaacaaaacaaaaaactgcagaaaccaatgagttctgttcacaaaggatggctcctcatgtcatcacaccggcaaggaatggacgagcctctgatttttctcttcttggctgactttacaaggttggatgcagtccatgaggatcatgcagcaaagacagaaagtgctggagaagcccaacctgcagggcctcacctttagctggtttgtgtggttccacttcatgtagctgttggaacaccagtctctctaatgtgctctatgggatagctgttaccttccactaatttatgtctaatacctataaacctaaagtatctttttaaaaattttattccgtctttttggaggaaatttttgtgcatgccagatatagtgtcaagcattgggattgctaagatgaacgtaacattgtcctcaccacccattaagtcacaatctagtagatgagtaaaagtaaa

SEQ ID NO: 283059 - DNA, 1279 bp, Homo sapiens
gaggagctgggacgctggcggcagagccactgtggcagcttgagtctcgcgcgcgcaggaagcggaggtggaagttggggcgcaggaatgtggctgtccccgcctgtaaatcatggttggggaggagtcgcggaggcaccaggctggggtctgcagcgcgccatctgctgcagcacacaggaggcgctgaggctagttggagacagagtctcactgtgtcacccaggctggagtgaagtggcatgatcttggcttactgaaacctccatctcccaggttcaagcgattctcatgcctcagccacttgagtagctgggactacaggatttcgccatgttccccaggctggtctcaaactcctgaactcaggcagcccgcctaccttggcctcccaaagtgctaggattacagcccaaatgaccctccaagaccctctggaggcacccgcagtgctccttaatttgcagctctacagaatgagaccagcgtggcagccccctttcaggacagctcccgagacgagacgcgagagcagcccctaaatctcacccagcaaagccgtttcttcctaaccgggctggggagtgccgcgcgctgccagcagatggcgacagaggattagcctgcggaaaccggcctttttatagccaacaagagcaaaagcacactgcaatgtccaaacgaattgcaggcgttttctgctccctgaagcctgggaattaatttatatactcagtcccttttcccttggctggccattgaagtagttgaaccacaggattggactgtccagaatcattagccagagttcactgtgagtggacgtcttttagttctgcttcaacgctataaccaacctttaccaaaagcaacaacaaaacaaaaaacggcaaggaatggacgagcctctgatttttctcttcttggctgactttacaaggttggatgcagtccatgaggatcatgcagcaaagacagaaagtgctggagaagcccaacctgcagggcctcacctttagctggtttgtgtggttccacttcatgtagctgttggaacaccagtctctctaatgtgctctatgggatagctgttaccttccactaatttatgtctaatacctataaacctaaagtatctttttaaaaattttattccgtctttttggaggaaatttttgtgcatgccagatatagtgtcaagcattgggattgctaagatgaacgtaacattgtcctcaccacccattaagtcacaatctagtagatgagtaaaagtaaa

SEQ ID NO: 283060 - DNA, 821 bp, Homo sapiens
atatgaatgttttcatttctttcgcatatatagccaggagaagaagtgctagaacacagtaactgtatgtttaacattttgaggaaatgacaagcttttccaaagtggctacaccatttcacattcctaccagcagcatttgaagatacccagttcttcatatcctcaccaacaaaatgtttaggtaatttgttatgcagcaataggtaactaatacatcattttggtagatgcggtacaaatgtcttcataaaattcaacatccttttaaaatttaagaaaaaaattcaaccaagactcaaaaacaagatattttaaactttctcccagtattgagaacaaacacatttacctacaattaccaccttaattcaacacttgtactgacaatcctaaccaattcggtaagaaaagcaaataaacggcataggaattggaaaggaagaaatgatgtatcacgtaaaatatactcataggaaatttaaaatagtcttcagatattagaagaaaaaagagggtttgctaagtctctggacataaatcaatagatgaaaatcagctgtttttctataggccagcaacagagtataattttttaaaagaatatcatttatctctgggcatggtggctcacgcctgtaatcccatcactttgggatgccgaggcaggtggattgtgaggtcaggagattgagaccatcctcgctaacacggtgaaacccgtctctactaaataaaacacaaaaaaattagccgggcttggtggcgggcgcctgtagtcccagctactcaggagactgaggcaggagaatggcgtgaac

SEQ ID NO: 283061 - DNA, 635 bp, Homo sapiens
ccctccagtccggcgccggatcgcggttgcccagcgcgctgtgccctgccgggggcgggccacgtttgatctccgggcccgcagcaagggatcgcgaaggtattgatctaggcgctgctgtgaagggaatttgcagatgtaattggcctaaatcagttggctttaatatcaggaaattgtcctcagtgggcatggccatatggagcccttacaagggactgggctcttcctggtgaaaaagatttgaatcacgagagtggctgatatgagggaaattctttgctgttgccttcgaagacagaagaggtccacaaggcaaaggatgcagacagcctgtaggagctgagactggctcctggctgacagccagcaaggaaatgaggacctcagtcctccaatcatgaagcagactccgacttctgctaacaacctgaatacacttcaaagaggattctgagctccagccgcctacacattgatttcagctgttgggaccctcagccgagaacccagctatgccgtgcccagatgtaagacctacacatctgtgagcttgtaagtgtgtgttgctttaagccactaagtttgtggtaatatgtttcactgcaatatgaaactaatacttctgtgtgcag

SEQ ID NO: 283062 - DNA, 1930 bp, Homo sapiens
ggcgcgagctccgccccacgagcacctgtttccgagcggagagcgcgggccgttttctttcctggtgtcccgtcgcggcttgggacccggcaagatgggcaagaagggcaagaaggagaagaagggccgcggcgcggagaagacggccgccaagatggagaagaaggtgtctaagcgctcgcggaaggaggaggaagacctggaagcgctcatagcccatttccagacactcgatgccaagaggactcagactgtggaacttccgtgccccccaccctcaccaaggttaaatgcctccctctcggttcatcctgagaaagatgagttaatcctttttggaggtgaatatttcaacggccaaaaaacttttttgtataacgagctctatgtctacaataccagaaaggacacctggaccaaagttgacatccccagtccacctccgaggcgctgtgctcaccaggcggtggtagtgcctcaaggtggcggacagctgtgggtctttggaggggagtttgcctctcccaacggagagcagttctaccactacaaggatctctgggtcctgcatttggccaccaagacctgggaacaagtcaaatcaacaggcggtccttcgggtcggagtggacatcggatggtggcctggaagagacaattgatcctgtttggtggcttccatgaaagtacacgggattacatctactacaacgacgtgtatgcctttaatctggacaccttcacatggagcaagctgtccccgtcagggacggggcccacacccagatcaggctgccagatgtccgtcactccccagggcggcatcgtcgtctatgggggctactcgaaacagagagttaagaaagacgtggacaagggcacacggcactcagacatgttcctgctgaagccagaggacggaagagaagacaagtgggtttggactcggatgaacccttcgggggtcaagcccaccccacggtctggcttttccgtggccatggccccgaatcaccagacactgttcttcgggggtgtctgtgacgaggaagaggaggagagcctgtcgggcgagttcttcaacgatctgtacttctacgacgccaccaggaaccgttggtttgagggacagctgaagggacccaagtctgaaaagaagaaacgcaggcggggcagaaaagaggagcccgaaggtggtagcaggccggcgtgtgggggagctggcacccaggggcctgtgcagctggtcaaggaggtggtggccgaggatggcaccgtggtcaccattaagcaggtgctcaccgcgccaggctcggcggggcagccccggtctgaggacgaagacagccttgaggaggccggcagccccgcacctgggccgtgtccacgctccaacgccatgctggctgtgaagcatggggtgctctacgtctatgggggcatgtttgaggccggcgaccgccaggtcaccctcagcgacctgcactgcctggacctgcacaggatggaggcgtggaaggccttggtggagatggacccagaaactcaggagtggctggaggagacggactcggaagaggacagtgaggaggttgagggcgccgagggtggggtcgacgacgaagacagcggagaggagagcggtgcggaggactgagaagagcccctgccaggggcgcctggcaagtgctgtgcccacgtccgcccaggacccagccgtgttgagtgaagctcttggggccagcgtgcgtcctgacgcacaggagagagctgaaggtgggtggcccaggccagggtgtgaactttctcccatggtttagtctctgacgcggcactgggccggaagttcaactgagtgcagtgcaggtggattccctcagcagcctgtgtgttgtgtgaaataaattggacttgaaacaagaaaaaaaag

SEQ ID NO: 283063 - DNA, 4345 bp, Homo sapiens
  misc_feature (450)..(450): n is a, c, g, or t
  misc_feature (1624)..(1624): n is a, c, g, or t
  misc_feature (1815)..(1815): n is a, c, g, or t
  misc_feature (2053)..(2053): n is a, c, g, or t
  misc_feature (2067)..(2067): n is a, c, g, or t
  misc_feature (2070)..(2070): n is a, c, g, or t
agttgctgccggagaagtgtgctctgatgtggctacatttggggacgcgggctccccagaggcccaagcgagaaagccgggggttcccaggctgggggtgcaggacgggccaggcactgccctgcagggcccgcccccctgcccctgcaccctcacacccatcttcctctctcagcctgaccccagggcctgggagcccccggcagaccggccctccttgccaaacagtggctgccctttatggactcggcgcctggcagagccactgtggaggaggagttggctgtcatggtcaggggaggcagcccttgggttgtcaaggttggtggtcaacgttgaacccatatctgctggaatctcccggtctgttccacacacgatcatgcgggaagctctgggacccgaaggctgttctgatctcgggggtcacaagttctcacagcagcctgnggtcaccagggaccagacccggcgttagcctctgtaaggagctgcctggctgctgggctgagctttgttgcaggcccaggaagatgaccaagaaggacagagcagagccccatctaccactgctgggagggcctgagggagcacgtgcacagcagagccccatcctccactccctgggctcgaagaggcttcctcggtgtggatggcagctgttaacgagcagtggtggtgcagctggaggcctctgtcccatggggcacagacgggagaaggatggcggacgggtgtgcacgcttgggaggacgggcgggcggcataggcctgagcaggtggcatgggcgcacgagaagggtgtgtctgagacaggatgtttatcccaaatgccaggagtggacgaggcggacgagtggcagtgaggtaggcatgtgaggttgttgcctggcccactctgccgaccccagaaacccagcggcctgggcccagcacccggctacacatggggtgagctcacgcccacactgtggcctgtgcccgtcacggggctgcttgcttctcctaggcttgggaacaagctggcatgaacgctgtggccgcattcacagctcaggcacttccactttgggttttatgaagaaacagacttaaagagcatttgttcctaatgggtgggctgaagcttgggaggagcattcagcttctctccacagtatggcttcacctgttcctgagcgccctgctaccctcttgctaacctgggtggctgaggtcctctgctttggtggcgttgacttcccgtctgcagccagcgccaggtgccagcccccgcctctgctcatcgggaagcgctggcctgcaggtgctttgtggttgccacggacccttgttctgtccctttccagcacccaccccccacccgctgtgcattccgtagttcattttcaaggcagggggcacatggtgaaaatacagcctggctttttttcaacaaatgcagctgcactcttccttgcttgttttgaaggctgagccagcaacctccttggcacctggggacagtcgcttcctcagtttctgcgtaccgactgcctcacctgacacgcggcctgggcgcgagagaagccaaccaggtgcctgagttgactgactccttccgccctccagcttcctccctccnccctccaacctcctccctccaccctccaacctcctccctccgccctccaacctcctccctctgccctgcaacctcctcccctctgccctccaacctcctccctccgccctccaatctcctccctctgccctgcatcctcctcccctccgccctccaacctcctccctccgccctccaacctcctccctccnccctccaacctcctccctccgccctctgccctcctccctctgccctccagcgttctccctcctccctccaccctgtttcctccctccacctcttctctcctccctccaccctcttccttctaccctcttccctctgccctcttcttctgccctcctccctccaccctctttcctccctcctccctccaccctctgccctcctccctctaccccctgccctcctccctccgccttatcnggaatcggggtctnggncctgggctggaggcagaccctggcccgggcgaggttaaaggtactgcaggagggcggcatcatgatgtcctgaagcttgttgcgcccggtgctgtcggccggctgaaggcagaaacagtcacagcacctgcagctatggaaggcgacgactgaaaatctaataggcaccttgatgtcaagtttccaagaccaaaggcaagaacagtcagatcaaacttcggaagagtcagagaaagtgagcatgacctagaggagggagacggtccttccgctgtctcctgcagagcgtctgtcgcacgtatgaggtgaaatccgcactgtcccatgaagactgtgaggggagttgccacccgcacacggcccaggagcgccagcagcttggggaccaccacaggcctcagggtctcttcagtccgacgggtccagctgtcgataaaacctcccggggaaggagtaaaggacaaccaagaacctgaactgcaaaagtatgaaaaacatttcatttccctcgagttctccacactttaggtctgcagcgccttgggggtgactgatggccctccgtgagacgcggtggccatgtgcttctacaagtgaaaaggagcaagtgtggttagagcctggagtatggacgtcccggggaccgctggcccatggcctggcttggggccttacaggggagcgagctgagtgaatgcaggggagggcccgtctttctacagtgtgtatcttgtttttgagacagactcactctgtcgtccaggctggagtgcagtggcgcgatctctgctcactgcaacctctgcctcccgggttcaagcgattctcctgcctcagcctcctcagtagctgggattacaggcacctgccaccacgcctggctaatttttgtattttttttttagtagagatggggtttcactatgttggtcaggctggcctcgagctcctgacctcaggtgatccacctgccttggcctcccaaagtgctgggattacaggcatgagccaccgcgcccggccctgccctgcttttctacatcaccactgtcttgtcagttagctcggctcaggcattgcatgcctgatctgtatctttgggaatcctgtgaggtaatggttctagatccaaaagaatggataaagagactgtttcagttcccgaaattatccaggcacattctgtgcgctactgaacttcagaaagcaccagtccatccagtgtgcagaggctggtaagtaaaacaggccagccgtgggcacagacagtttcaccagaggccccggggcagagggtcttctccagctcttccagggcggggctcatctgttcctgggccagaggtggacctgtctgcaggcttgtaagggtggggagacgccagcctggcccatgggctgtccacacccaccccccgcagaccgcgctgctgtctgcaggggatgccaccacttcctcctggcctcgggtgcacaggtgaaacatgaagaagctattggggcggaaaatggctctcaccaggctgctctcgggttaatgaaaactcgtcaaattctccatgcagcagcagccagccgggcacatgctgtcctgccctgcccgactgtgtgcagggaagcaggtcccctgggcctgggcggagggactgcgtgcctgtcagggaaggccgaggctccggacaggcgggaagcagccttctccttaatcaccccatgtggaaaccaattaaagattcgattctctcagacccggggcattttagccttggttgaatcctcctggaattcacagggaagtggctttgccctctgccctcgctgctggaaggcaaggggccgttctcgccttggttttctaggttgtgttgcggcaggagctgactgcccctaggcctagatctctgcacaacttcgctcagggacacctgcctctgtgcatgtctcatggtgtgaatgtgtttcctgctcacaggtaccgttttgtgtcatgcagttactggaatgtacaaaagcagctgtgatctttgtgagagctgcacagagcaggagtctttatttggttcacttctggtctgcagcaaccacttgctactaaaagatggaaaagatgtacaaaaatgtcacagccctttagaaagcgacattatcagaaatgtatgaccttcagtcctccctccctctcctatgcccccaccagaccaggcggcgagaaggaacagggagtgaacatgtaacggaaaacaataaaactgaatttaactggaaaaaaaaaaaa

SEQ ID NO: 283064 - DNA, 1298 bp, Homo sapiens
ggtcagtttctccctatggaactactgggcttttagaatgataggaaacctggcctgtccctttacaggtgcgttacagtcaggcgaagctgggctgcgtgaccctgggcagggtgggcggctctcacctgtggagatgcagcactgaggggcccctccagcgtggttgctaacacagactgcctaggagcgtgcttttctcatcctggaccccagctactgcttaatttgcaggcggtggtagtgcctcaaggtggcggacagctgtgggtctttggaggggagtttgcctctcccaacggagagcagttctaccactacaaggatctctgggtcctgcatttggccaccaagacctgggaacaagtcaaatcaacaggcggtccttcgggtcggagtggacatcggatggtggcctggaagagacaattgatcctgtttggtggcttccatgaaagtacacgggattacatctactacaacgacgtgtatgcctttaatctggacaccttcacatggagcaagctgtccccgtcagggacggggcccacacccagatcaggctgccagatgtccgtcactccccagggcggcatcgtcgtctatgggggctactcgaaacagagagttaagaaagacgtggacaagggcacacggcactcagacatgttcctgctgaagccagaggacggaagagaagacaagtgggtttggactcggatgaacccttcgggggtcaagcccaccccacggtctggcttttccgtggccatggccccgaatcaccagacactgttcttcgggggtgtctgtgacgaggaagaggaggagagcctgtcgggcgagttcttcaacgatctgtacttctacgacgccaccaggaaccgttggtttgagggacagctgaagaaactcaggagtggctggaggagacggactcggaagaggacagtgaggaggttgagggcgccgagggtggggtcgacgacgaagacagcggagaggagagcggtgcggaggactgagaagagcccctgccaggggcgcctggcaagtgctgtgcccacgtccgcccaggacccagccgtgttgagtgaagctcttggggccagcgtgcgtcctgacgcacaggagagagctgaaggtgggtggcccaggccagggtgtgaactttctcccatggtttagtctctgacgcggcactgggccggaagttcaactgagtgcagtgcaggtggattccctcagcagcctgtgtgttgtgtgaaataaattggacttgaaacaagaaaaaaaag

SEQ ID NO: 283065 - DNA, 3999 bp, Homo sapiens
ggcgcgagctccgccccacgagcacctgtttccgagcggagagcgcgggccgttttctttcctggtgtcccgtcgcggcttgggacccggcaagatgggcaagaagggcaagaaggagaagaagggccgcggcgcggagaagacggccgccaagatggagaagaaggtgtctaagcgctcgcggaaggaggaggaagacctggaagcgctcatagcccatttccagacactcgatgccaagaggactcagactgtggaacttccgtgccccccaccctcaccaaggttaaatgcctccctctcggttcatcctgagaaagatgagttaatcctttttggaggtgaatatttcaacggccaaaaaacttttttgtataacgagctctatgtctacaataccagaaaggacacctggaccaaagttgacatccccagtccacctccgaggcgctgtgctcaccaggcggtggtagtgcctcaaggtggcggacagctgtgggtctttggaggggagtttgcctctcccaacggagagcagttctaccactacaaggatctctgggtcctgcatttggccaccaagacctgggaacaagtcaaatcaacaggcggtccttcgggtcggagtggacatcggatggtggcctggaagagacaattgatcctgtttggtggcttccatgaaagtacacgggattacatctactacaacgacgtgtatgcctttaatctggacaccttcacatggagcaagctgtccccgtcagggacggggcccacacccagatcaggctgccagatgtccgtcactccccagggcggcatcgtcgtctatgggggctactcgaaacagagagttaagaaagacgtggacaagggcacacggcactcagacatgttcctgctgaagccagaggacggaagagaagacaagtgggtttggactcggatgaacccttcgggggtcaagcccaccccacggtctggcttttccgtggccatggccccgaatcaccagacactgttcttcgggggtgtctgtgacgaggaagaggaggagagcctgtcgggcgagttcttcaacgatctgtacttctacgacgccaccaggaaccgttggtttgagggacagctgaagggacccaagtctgaaaagaagaaacgcaggcggggcagaaaagaggagcccgaaggtggtagcaggccggcgtgtgggggagctggcacccaggggcctgtgcagctggtcaaggaggtggtggccgaggatggcaccgtggtcaccattaagcaggtgctcaccgcgccaggctcggcggggcagccccggtctgaggacgaagacagccttgaggaggccggcagccccgcacctgggccgtgtccacgctccaacgccatgctggctgtgaagcatggggtgctctacgtctatgggggcatgtttgaggccggcgaccgccaggtcaccctcagcgacctgcactgcctggacctgcacaggatggaggcgtggaaggccttggtggagatggacccagaaactcaggagtggctggaggagacggactcggaagaggacagtgaggaggttgagggcgccgagggtggggtcgacgacgaagacagcggagaggagagcggtgcggaggactgaggctgtgacaaaccctgtgcccacgctgcctccactgccgggagactcagggctgggggagacatgccctggtcaccactgcggagactcagggctgggggagacatgccctggccaccagtggtgagccagcgagacaggaccccacgcgcgctgacccggggacgccatggaactcactcgcgattcctgcacgcgcgctgacccggggacgccatggaactcactcgcgattcctgctcacagcacgtttcctgctcgaaaaccaggagagcctccacgtgccgactagctctgtccacacatccattccgctgtctcctgcagagcgtctgtcgcacgtatgaggtgaaatccgcactgtcccatgaagactgtgaggggagttgccacccgcacacggcccaggagcgccagcagcttggggaccaccacaggcctcagggtctcttcagtccgacgggtccagctgtcgataaaacctcccggggaaggagtaaaggacaaccaagaacctgaactgcaaaagtatgaaaaacatttcatttccctcgagttctccacactttaggtctgcagcgccttgggggtgactgatggccctccgtgagacgcggtggccatgtgcttctacaagtgaaaaggagcaagtgtggttagagcctggagtatggacgtcccggggaccgctggcccatggcctggcttggggccttacaggggagcgagctgagtgaatgcaggggagggcccgtctttctacagtgtgtatcttgtttttgagacagactcactctgtcgtccaggctggagtgcagtggcgcgatctctgctcactgcaacctctgcctcccgggttcaagcgattctcctgcctcagcctcctcagtagctgggattacaggcacctgccaccacgcctggctaatttttgtattttttttttagtagagatggggtttcactatgttggtcaggctggcctcgagctcctgacctcaggtgatccacctgccttggcctcccaaagtgctgggattacaggcatgagccaccgcgcccggccctgccctgcttttctacatcaccactgtcttgtcagttagctcggctcaggcattgcatgcctgatctgtatctttgggaatcctgtgaggtaatggttctagatccaaaagaatggataaagagactgtttcagttcccgaaattatccaggcacattctgtgcgctactgaacttcagaaagcaccagtccatccagtgtgcagaggctggtaagtaaaacaggccagccgtgggcacagacagtttcaccagaggccccggggcagagggtcttctccagctcttccagggcggggctcatctgttcctgggccagaggtggacctgtctgcaggcttgtaagggtggggagacgccagcctggcccatgggctgtccacacccaccccccgcagaccgcgctgctgtctgcaggggatgccaccacttcctcctggcctcgggtgcacaggtgaaacatgaagaagctattggggcggaaaatggctctcaccaggctgctctcgggttaatgaaaactcgtcaaattctccatgcagcagcagccagccgggcacatgctgtcctgccctgcccgactgtgtgcagggaagcaggtcccctgggcctgggcggagggactgcgtgcctgtcagggaaggccgaggctccggacaggcgggaagcagccttctccttaatcaccccatgtggaaaccaattaaagattcgattctctcagacccggggcattttagccttggttgaatcctcctggaattcacagggaagtggctttgccctctgccctcgctgctggaaggcaaggggccgttctcgccttggttttctaggttgtgttgcggcaggagctgactgcccctaggcctagatctctgcacaacttcgctcagggacacctgcctctgtgcatgtctcatggtgtgaatgtgtttcctgctcacaggtaccgttttgtgtcatgcagttactggaatgtacaaaagcagctgtgatctttgtgagagctgcacagagcaggagtctgagagctgcacagagcaggagtctttatttggttcacttctggtctgcagcaaccacttgctactaaaagatggaaaagatgtacaaaaatgtcacagccctttagaaagcgacattatcagaaatgtatgaccttcagtcctccctccctctcctatgcccccaccagaccaggcggcgagaaggaacagggagtgaacatgtaacggaaaacaataaaactgaatttaactggaaaaaaaaaaaa

SEQ ID NO: 283066 - DNA, 3906 bp, Homo sapiens
ggcgcgagctccgccccacgagcacctgtttccgagcggagagcgcgggccgttttctttcctggtgtcccgtcgcggcttgggacccggcaagatgggcaagaagggcaagaaggagaagaagggccgcggcgcggagaagacggccgccaagatggagaagaaggtgtctaagcgctcgcggaaggaggaggaagacctggaagcgctcatagcccatttccagacactcgatgccaagaggactcagactgtggaacttccgtgccccccaccctcaccaaggttaaatgcctccctctcggttcatcctgagaaagatgagttaatcctttttggaggtgaatatttcaacggccaaaaaacttttttgtataacgagctctatgtctacaataccagaaaggacacctggaccaaagttgacatccccagtccacctccgaggcgctgtgctcaccaggcggtggtagtgcctcaaggtggcggacagctgtgggtctttggaggggagtttgcctctcccaacggagagcagttctaccactacaaggatctctgggtcctgcatttggccaccaagacctgggaacaagtcaaggattacatctactacaacgacgtgtatgcctttaatctggacaccttcacatggagcaagctgtccccgtcagggacggggcccacacccagatcaggctgccagatgtccgtcactccccagggcggcatcgtcgtctatgggggctactcgaaacagagagttaagaaagacgtggacaagggcacacggcactcagacatgttcctgctgaagccagaggacggaagagaagacaagtgggtttggactcggatgaacccttcgggggtcaagcccaccccacggtctggcttttccgtggccatggccccgaatcaccagacactgttcttcgggggtgtctgtgacgaggaagaggaggagagcctgtcgggcgagttcttcaacgatctgtacttctacgacgccaccaggaaccgttggtttgagggacagctgaagggacccaagtctgaaaagaagaaacgcaggcggggcagaaaagaggagcccgaaggtggtagcaggccggcgtgtgggggagctggcacccaggggcctgtgcagctggtcaaggaggtggtggccgaggatggcaccgtggtcaccattaagcaggtgctcaccgcgccaggctcggcggggcagccccggtctgaggacgaagacagccttgaggaggccggcagccccgcacctgggccgtgtccacgctccaacgccatgctggctgtgaagcatggggtgctctacgtctatgggggcatgtttgaggccggcgaccgccaggtcaccctcagcgacctgcactgcctggacctgcacaggatggaggcgtggaaggccttggtggagatggacccagaaactcaggagtggctggaggagacggactcggaagaggacagtgaggaggttgagggcgccgagggtggggtcgacgacgaagacagcggagaggagagcggtgcggaggactgaggctgtgacaaaccctgtgcccacgctgcctccactgccgggagactcagggctgggggagacatgccctggtcaccactgcggagactcagggctgggggagacatgccctggccaccagtggtgagccagcgagacaggaccccacgcgcgctgacccggggacgccatggaactcactcgcgattcctgcacgcgcgctgacccggggacgccatggaactcactcgcgattcctgctcacagcacgtttcctgctcgaaaaccaggagagcctccacgtgccgactagctctgtccacacatccattccgctgtctcctgcagagcgtctgtcgcacgtatgaggtgaaatccgcactgtcccatgaagactgtgaggggagttgccacccgcacacggcccaggagcgccagcagcttggggaccaccacaggcctcagggtctcttcagtccgacgggtccagctgtcgataaaacctcccggggaaggagtaaaggacaaccaagaacctgaactgcaaaagtatgaaaaacatttcatttccctcgagttctccacactttaggtctgcagcgccttgggggtgactgatggccctccgtgagacgcggtggccatgtgcttctacaagtgaaaaggagcaagtgtggttagagcctggagtatggacgtcccggggaccgctggcccatggcctggcttggggccttacaggggagcgagctgagtgaatgcaggggagggcccgtctttctacagtgtgtatcttgtttttgagacagactcactctgtcgtccaggctggagtgcagtggcgcgatctctgctcactgcaacctctgcctcccgggttcaagcgattctcctgcctcagcctcctcagtagctgggattacaggcacctgccaccacgcctggctaatttttgtattttttttttagtagagatggggtttcactatgttggtcaggctggcctcgagctcctgacctcaggtgatccacctgccttggcctcccaaagtgctgggattacaggcatgagccaccgcgcccggccctgccctgcttttctacatcaccactgtcttgtcagttagctcggctcaggcattgcatgcctgatctgtatctttgggaatcctgtgaggtaatggttctagatccaaaagaatggataaagagactgtttcagttcccgaaattatccaggcacattctgtgcgctactgaacttcagaaagcaccagtccatccagtgtgcagaggctggtaagtaaaacaggccagccgtgggcacagacagtttcaccagaggccccggggcagagggtcttctccagctcttccagggcggggctcatctgttcctgggccagaggtggacctgtctgcaggcttgtaagggtggggagacgccagcctggcccatgggctgtccacacccaccccccgcagaccgcgctgctgtctgcaggggatgccaccacttcctcctggcctcgggtgcacaggtgaaacatgaagaagctattggggcggaaaatggctctcaccaggctgctctcgggttaatgaaaactcgtcaaattctccatgcagcagcagccagccgggcacatgctgtcctgccctgcccgactgtgtgcagggaagcaggtcccctgggcctgggcggagggactgcgtgcctgtcagggaaggccgaggctccggacaggcgggaagcagccttctccttaatcaccccatgtggaaaccaattaaagattcgattctctcagacccggggcattttagccttggttgaatcctcctggaattcacagggaagtggctttgccctctgccctcgctgctggaaggcaaggggccgttctcgccttggttttctaggttgtgttgcggcaggagctgactgcccctaggcctagatctctgcacaacttcgctcagggacacctgcctctgtgcatgtctcatggtgtgaatgtgtttcctgctcacaggtaccgttttgtgtcatgcagttactggaatgtacaaaagcagctgtgatctttgtgagagctgcacagagcaggagtctgagagctgcacagagcaggagtctttatttggttcacttctggtctgcagcaaccacttgctactaaaagatggaaaagatgtacaaaaatgtcacagccctttagaaagcgacattatcagaaatgtatgaccttcagtcctccctccctctcctatgcccccaccagaccaggcggcgagaaggaacagggagtgaacatgtaacggaaaacaataaaactgaatttaactggaaaaaaaaaaaa

SEQ ID NO: 283067 - DNA, 3920 bp, Homo sapiens
ggcgcgagctccgccccacgagcacctgtttccgagcggagagcgcgggccgttttctttcctggtgtcccgtcgcggcttgggacccggcaagatgggcaagaagggcaagaaggagaagaagggccgcggcgcggagaagacggccgccaagatggagaagaaggtgtctaagcgctcgcggaaggaggaggaagacctggaagcgctcatagcccatttccagacactcgatgccaagaggactcagactgtggaacttccgtgccccccaccctcaccaagacttttttgtataacgagctctatgtctacaataccagaaaggacacctggaccaaagttgacatccccagtccacctccgaggcgctgtgctcaccaggcggtggtagtgcctcaaggtggcggacagctgtgggtctttggaggggagtttgcctctcccaacggagagcagttctaccactacaaggatctctgggtcctgcatttggccaccaagacctgggaacaagtcaaatcaacaggcggtccttcgggtcggagtggacatcggatggtggcctggaagagacaattgatcctgtttggtggcttccatgaaagtacacgggattacatctactacaacgacgtgtatgcctttaatctggacaccttcacatggagcaagctgtccccgtcagggacggggcccacacccagatcaggctgccagatgtccgtcactccccagggcggcatcgtcgtctatgggggctactcgaaacagagagttaagaaagacgtggacaagggcacacggcactcagacatgttcctgctgaagccagaggacggaagagaagacaagtgggtttggactcggatgaacccttcgggggtcaagcccaccccacggtctggcttttccgtggccatggccccgaatcaccagacactgttcttcgggggtgtctgtgacgaggaagaggaggagagcctgtcgggcgagttcttcaacgatctgtacttctacgacgccaccaggaaccgttggtttgagggacagctgaagggacccaagtctgaaaagaagaaacgcaggcggggcagaaaagaggagcccgaaggtggtagcaggccggcgtgtgggggagctggcacccaggggcctgtgcagctggtcaaggaggtggtggccgaggatggcaccgtggtcaccattaagcaggtgctcaccgcgccaggctcggcggggcagccccggtctgaggacgaagacagccttgaggaggccggcagccccgcacctgggccgtgtccacgctccaacgccatgctggctgtgaagcatggggtgctctacgtctatgggggcatgtttgaggccggcgaccgccaggtcaccctcagcgacctgcactgcctggacctgcacaggatggaggcgtggaaggccttggtggagatggacccagaaactcaggagtggctggaggagacggactcggaagaggacagtgaggaggttgagggcgccgagggtggggtcgacgacgaagacagcggagaggagagcggtgcggaggactgaggctgtgacaaaccctgtgcccacgctgcctccactgccgggagactcagggctgggggagacatgccctggtcaccactgcggagactcagggctgggggagacatgccctggccaccagtggtgagccagcgagacaggaccccacgcgcgctgacccggggacgccatggaactcactcgcgattcctgcacgcgcgctgacccggggacgccatggaactcactcgcgattcctgctcacagcacgtttcctgctcgaaaaccaggagagcctccacgtgccgactagctctgtccacacatccattccgctgtctcctgcagagcgtctgtcgcacgtatgaggtgaaatccgcactgtcccatgaagactgtgaggggagttgccacccgcacacggcccaggagcgccagcagcttggggaccaccacaggcctcagggtctcttcagtccgacgggtccagctgtcgataaaacctcccggggaaggagtaaaggacaaccaagaacctgaactgcaaaagtatgaaaaacatttcatttccctcgagttctccacactttaggtctgcagcgccttgggggtgactgatggccctccgtgagacgcggtggccatgtgcttctacaagtgaaaaggagcaagtgtggttagagcctggagtatggacgtcccggggaccgctggcccatggcctggcttggggccttacaggggagcgagctgagtgaatgcaggggagggcccgtctttctacagtgtgtatcttgtttttgagacagactcactctgtcgtccaggctggagtgcagtggcgcgatctctgctcactgcaacctctgcctcccgggttcaagcgattctcctgcctcagcctcctcagtagctgggattacaggcacctgccaccacgcctggctaatttttgtattttttttttagtagagatggggtttcactatgttggtcaggctggcctcgagctcctgacctcaggtgatccacctgccttggcctcccaaagtgctgggattacaggcatgagccaccgcgcccggccctgccctgcttttctacatcaccactgtcttgtcagttagctcggctcaggcattgcatgcctgatctgtatctttgggaatcctgtgaggtaatggttctagatccaaaagaatggataaagagactgtttcagttcccgaaattatccaggcacattctgtgcgctactgaacttcagaaagcaccagtccatccagtgtgcagaggctggtaagtaaaacaggccagccgtgggcacagacagtttcaccagaggccccggggcagagggtcttctccagctcttccagggcggggctcatctgttcctgggccagaggtggacctgtctgcaggcttgtaagggtggggagacgccagcctggcccatgggctgtccacacccaccccccgcagaccgcgctgctgtctgcaggggatgccaccacttcctcctggcctcgggtgcacaggtgaaacatgaagaagctattggggcggaaaatggctctcaccaggctgctctcgggttaatgaaaactcgtcaaattctccatgcagcagcagccagccgggcacatgctgtcctgccctgcccgactgtgtgcagggaagcaggtcccctgggcctgggcggagggactgcgtgcctgtcagggaaggccgaggctccggacaggcgggaagcagccttctccttaatcaccccatgtggaaaccaattaaagattcgattctctcagacccggggcattttagccttggttgaatcctcctggaattcacagggaagtggctttgccctctgccctcgctgctggaaggcaaggggccgttctcgccttggttttctaggttgtgttgcggcaggagctgactgcccctaggcctagatctctgcacaacttcgctcagggacacctgcctctgtgcatgtctcatggtgtgaatgtgtttcctgctcacaggtaccgttttgtgtcatgcagttactggaatgtacaaaagcagctgtgatctttgtgagagctgcacagagcaggagtctgagagctgcacagagcaggagtctttatttggttcacttctggtctgcagcaaccacttgctactaaaagatggaaaagatgtacaaaaatgtcacagccctttagaaagcgacattatcagaaatgtatgaccttcagtcctccctccctctcctatgcccccaccagaccaggcggcgagaaggaacagggagtgaacatgtaacggaaaacaataaaactgaatttaactggaaaaaaaaaaaa

SEQ ID NO: 283068 - DNA, 3975 bp, Homo sapiens
ggcgcgagctccgccccacgagcacctgtttccgagcggagagcgcgggccgttttctttcctggtgtcccgtcgcggcttgggacccggcaagatgggcaagaagggcaagaaggagaagaagggccgcggcgcggagaagacggccgccaagatggagaagaaggtgtctaagcgctcgcggaaggaggaggaagacctggaagcgctcatagcccatttccagacactcgatgccaagaggactcagactgtggaacttccgtgccccccaccctcaccaaggttaaatgcctccctctcggttcatcctgagaaagatgagttaatcctttttggaggtgaatatttcaacggccaaaaaacttttttgtataacgagctctatgtctacaataccagaaaggacacctggaccaaagttgacatccccagtccacctccgaggcgctgtgctcaccaggcggtggtagtgcctcaaggtggcggacagctgtgggtctttggaggggagtttgcctctcccaacggagagcagttctaccactacaaggatctctgggtcctgcatttggccaccaagacctgggaacaagtcaaatcaacaggcggtccttcgggtcggagtggacatcggatggtggcctggaagagacaattgatcctgtttggtggcttccatgaaagtacacgggattacatctactacaacgacgtgtatgcctttaatctggacaccttcacatggagcaagctgtccccgtcagggacggggcccacacccagatcaggctgccagatgtccgtcactccccagggcggcatcgtcgtctatgggggctactcgaaacagagagttaagaaagacgtggacaagggcacacggcactcagacatgttcctgctgaagccagaggacggaagagaagacaagtgggtttggactcggatgaacccttcgggggtcaagcccaccccacggtctggcttttccgtggccatggccccgaatcaccagacactgttcttcgggggtgtctgtgacgaggaagaggaggagagcctgtcgggcgagttcttcaacgatctgtacttctacgacgccaccaggaaccgttggtttgagggacagctgaagggacccaagtctgaaaagaagaaacgcaggcggggcagaaaagaggagcccgaaggtggtagcaggccggcgtgtgggggagctggcacccaggggcctgtgcagctggtcaaggaggtggtggccgaggatggcaccgtggtcaccattaagcaggtgctcaccgcgccaggctcggcggggcagccccggtctgaggacgaagacagccttgaggaggccggcagccccgcacctgggccgtgtccacgctccaacgccatgctggctgtgaagcatggggtgctctacgtctatgggggcatgtttgaggccggcgaccgccaggtcaccctcagcgacctgcactgcctggacctgcacaggatggaggcgtggaaggccttggtggagatggacccagaaactcaggagtggctggaggagacggactcggaagaggacagtgaggaggttgagggcgccgagggtggggtcgacgacgaagacagcggagaggagagcggtgcggaggactgaggctgtgacaaaccctgtgcccacgctgcctccactgccgggagactcagggctgggggagacatgccctggtcaccactgcggagactcagggctgggggagacatgccctggccaccagtggtgagccagcgagacaggaccccacgcgcgctgacccggggacgccatggaactcactcgcgattcctgcacgcgcgctgacccggggacgccatggaactcactcgcgattcctgctcacagcacgtttcctgctcgaaaaccaggagagcctccacgtgccgactagctctgtccacacatccattccgctgtctcctgcagagcgtctgtcgcacgtatgaggtgaaatccgcactgtcccatgaagactgtgaggggagttgccacccgcacacggcccaggagcgccagcagcttggggaccaccacaggcctcagggtctcttcagtccgacgggtccagctgtcgataaaacctcccggggaaggagtaaaggacaaccaagaacctgaactgcaaaagtatgaaaaacatttcatttccctcgagttctccacactttaggtctgcagcgccttgggggtgactgatggccctccgtgagacgcggtggccatgtgcttctacaagtgaaaaggagcaagtgtggttagagcctggagtatggacgtcccggggaccgctggcccatggcctggcttggggccttacaggggagcgagctgagtgaatgcaggggagggcccgtctttctacagtgtgtatcttgtttttgagacagactcactctgtcgtccaggctggagtgcagtggcgcgatctctgctcactgcaacctctgcctcccgggttcaagcgattctcctgcctcagcctcctcagtagctgggattacaggcacctgccaccacgcctggctaatttttgtattttttttttagtagagatggggtttcactatgttggtcaggctggcctcgagctcctgacctcaggtgatccacctgccttggcctcccaaagtgctgggattacaggcatgagccaccgcgcccggccctgccctgcttttctacatcaccactgtcttgtcagttagctcggctcaggcattgcatgcctgatctgtatctttgggaatcctgtgaggtaatggttctagatccaaaagaatggataaagagactgtttcagttcccgaaattatccaggcacattctgtgcgctactgaacttcagaaagcaccagtccatccagtgtgcagaggctggtaagtaaaacaggccagccgtgggcacagacagtttcaccagaggccccggggcagagggtcttctccagctcttccagggcggggctcatctgttcctgggccagaggtggacctgtctgcaggcttgtaagggtggggagacgccagcctggcccatgggctgtccacacccaccccccgcagaccgcgctgctgtctgcaggggatgccaccacttcctcctggcctcgggtgcacaggtgaaacatgaagaagctattggggcggaaaatggctctcaccaggctgctctcgggttaatgaaaactcgtcaaattctccatgcagcagcagccagccgggcacatgctgtcctgccctgcccgactgtgtgcagggaagcaggtcccctgggcctgggcggagggactgcgtgcctgtcagggaaggccgaggctccggacaggcgggaagcagccttctccttaatcaccccatgtggaaaccaattaaagattcgattctctcagacccggggcattttagccttggttgaatcctcctggaattcacagggaagtggctttgccctctgccctcgctgctggaaggcaaggggccgttctcgccttggttttctaggttgtgttgcggcaggagctgactgcccctaggcctagatctctgcacaacttcgctcagggacacctgcctctgtgcatgtctcatggtgtgaatgtgtttcctgctcacaggtaccgttttgtgtcatgcagttactggaatgtacaaaagcagctgtgatctttgtgagagctgcacagagcaggagtctttatttggttcacttctggtctgcagcaaccacttgctactaaaagatggaaaagatgtacaaaaatgtcacagccctttagaaagcgacattatcagaaatgtatgaccttcagtcctccctccctctcctatgcccccaccagaccaggcggcgagaaggaacagggagtgaacatgtaacggaaaacaataaaactgaatttaactggaaaaaaaaaaaa

SEQ ID NO: 283069 - DNA, 2368 bp, Homo sapiens
ggcgcgagctccgccccacgagcacctgtttccgagcggagagcgcgggccgttttctttcctggtgtcccgtcgcggcttgggacccggcaagatgggcaagaagggcaagaaggagaagaagggccgcggcgcggagaagacggccgccaagatggagaagaaggtgtctaagcgctcgcggaaggaggaggaagacctggaagcgctcatagcccatttccagacactcgatgccaagaggactcagactgtggaacttccgtgccccccaccctcaccaaggttaaatgcctccctctcggttcatcctgagaaagatgagttaatcctttttggaggtgaatatttcaacggccaaaaaacttttttgtataacgagctctatgtctacaataccagaaaggacacctggaccaaagttgacatccccagtccacctccgaggcgctgtgctcaccaggcggtggtagtgcctcaaggtggcggacagctgtgggtctttggaggggagtttgcctctcccaacggagagcagttctaccactacaaggatctctgggtcctgcatttggccaccaagacctgggaacaagtcaaatcaacaggcggtccttcgggtcggagtggacatcggatggtggcctggaagagacaattgatcctgtttggtggcttccatgaaagtacacgggattacatctactacaacgacgtgtatgcctttaatctggacaccttcacatggagcaagctgtccccgtcagggacggggcccacacccagatcaggctgccagatgtccgtcactccccagggcggcatcgtcgtctatgggggctactcgaaacagagagttaagaaagacgtggacaagggcacacggcactcagacatgttcctgctgaagccagaggacggaagagaagacaagtgggtttggactcggatgaacccttcgggggtcaagcccaccccacggtctggcttttccgtggccatggccccgaatcaccagacactgttcttcgggggtgtctgtgacgaggaagaggaggagagcctgtcgggcgagttcttcaacgatctgtacttctacgacgccaccaggaaccgttggtttgagggacagctgaagggacccaagtctgaaaagaagaaacgcaggcggggcagaaaagaggagcccgaaggtggtagcaggccggcgtgtgggggagctggcacccaggggcctgtgcagctggtcaaggaggtggtggccgaggatggcaccgtggtcaccattaagcaggtgctcaccgcgccaggctcggcggggcagccccggtctgaggacgaagacagccttgaggaggccggcagccccgcacctgggccgtgtccacgctccaacgccatgctggctgtgaagcatggggtgctctacgtctatgggggcatgtttgaggccggcgaccgccaggtcaccctcagcgacctgcactgcctggacctgcacaggatggaggcgtggaaggccttggtggagatggacccagaaactcaggagtggctggaggagacggactcggaagaggacagtgaggaggttgagggcgccgagggtggggtcgacgacgaagacagcggagaggagagcggtgcggaggactgaggctgtgacaaaccctgtgcccacgctgcctccactgccgggagactcagggctgggggagacatgccctggtcaccactgcggagactcagggctgggggagacatgccctggccaccagtggtgagccagcgagacaggaccccacgcgcgctgacccggggacgccatggaactcactcgcgattcctgcacgcgcgctgacccggggacgccatggaactcactcgcgattcctgctcacagcacgtttcctgctcgaaaaccaggagagcctccacgtgccgactagctctgtccacacatccattgcgcagctctgcagcggaaggaccttcagtaaagacgctggtttgtaacgagagaagcgttccaaagtgtcacacgacattgtttattactaaaaggagcagaatttctttttaatcttgacagtgttgttttcgtaacagtatgatttaaactgttacattcatttaggaaaactttttttcatttcataagtaatcaagctatctttccagcttaaaagcaaagaaaaaaggctcagggtaactttttaaaccacttcatcaataagaaaagttctctctgtcattgcacggcgtgattgtacacagtattagcaagcagttcacatgcgccagggccgacttggaaggaaacacaggttaacactgtttcctgtccgagttcacagagatgtttgca

SEQ ID NO: 283070 - DNA, 1745 bp, Homo sapiens
ggcgcgagctccgccccacgagcacctgtttccgagcggagagcgcgggccgttttctttcctggtgtcccgtcgcggcttgggacccggcaagatgggcaagaagggcaagaaggagaagaagggccgcggcgcggagaagacggccgccaagatggagaagaaggtgtctaagcgctcgcggaaggaggaggaagacctggaagcgctcatagcccatttccagacactcgatgccaagaggactcagactgtggaacttccgtgccccccaccctcaccaaggttaaatgcctccctctcggttcatcctgagaaagatgagttaatcctttttggaggtgaatatttcaacggccaaaaaacttttttgtataacgagctctatgtctacaataccagaaaggacacctggaccaaagttgacatccccagtccacctccgaggcgctgtgctcaccaggcggtggtagtgcctcaaggtggcggacagctgtgggtctttggaggggagtttgcctctcccaacggagagcagttctaccactacaaggatctctgggtcctgcatttggccaccaagacctgggaacaagtcaaatcaacaggcggtccttcgggtcggagtggacatcggatggtggcctggaagagacaattgatcctgtttggtggcttccatgaaagtacacgggattacatctactacaacgacgtgtatgcctttaatctggacaccttcacatggagcaagctgtccccgtcagggacggggcccacacccagatcaggctgccagatgtccgtcactccccagggcggcatcgtcgtctatgggggctactcgaaacagagagttaagaaagacgtggacaagggcacacggcactcagacatgttcctgctgaagccagaggacggaagagaagacaagtgggtttggactcggatgaacccttcgggggtcaagcccaccccacggtctggcttttccgtggccatggccccgaatcaccagacactgttcttcgggggtgtctgtgacgaggaagaggaggagagcctgtcgggcgagttcttcaacgatctgtacttctacgacgccaccaggaaccgttggtttgagggacagctgaagggacccaagtctgaaaagaagaaacgcaggcggggcagaaaagaggagcccgaaggtggtagcaggccggcgtgtgggggagctggcacccaggggcctgtgcagctggtcaaggaggtggtggccgaggatggcaccgtggtcaccattaagcaggtgctcaccgcgccaggctcggcggggcagccccggtctgaggacgaagacagccttgaggaggccggcagccccgcacctgggccgtgtccacgctccaacgccatgctggctgtgaagcatggggtgctctacgtctatgggggcatgtttgaggccggcgaccgccaggtcaccctcagcgacctgcactgcctggacctgcacaggatggaggcgtggaaggccttggtggagatggacccagaaactcaggagtggctggaggagacggactcggaagaggacagtgaggaggttgagggcgccgagggtggggtcgacgacgaagacagcggagaggagagcggtgcggaggactgagccccaccagaccaggcggcgagaaggaacagggagtgaacatgtaacggaaaacaataaaactgaatttaactggaaaaaaaaaaaa

SEQ ID NO: 283071 - DNA, 426 bp, Homo sapiens
agtccaaggtcttggagatgttctcctgttttattcttgaggtttgagcttagctagctgggctcttagcaggatggttttggtagttcatagatcagattaaatggtatttaatttgtgagcagtaagtgctcacaaaacagaaatcagtgtaaaaattggattttgtttgttgttgtcgtctttagaacaaccagaaattaagcaggttgatagtgtctttttgtttatttcattttagatcaacaggcggtccttcgggtcggagtggacatcggatggtggcctggaagagacaattgatcctgtttggtggcttccatgaaagtacacggttggtaccaagaacggaaaaatctttctctcctgaagcattaaggagtgggctttttatagaaagagcattctgaatacacaagaaagacg

SEQ ID NO: 283072 - DNA, 354 bp, Homo sapiens
gaaaacccggtgttctctctacccctcctgcacgggcctccccctcggctgaatgtgtttctctctcattccttcctccttgcgtatcagaaagagcccctgccaggggcgcctggcaagtgctgtgcccacgtccgcccaggacccagccgtgttgagtgaagctcttggggccagcgtgcgtcctgacgcacaggagagagctgaaggtgggtggcccaggccagggtgtgaactttctcccatggtttagtctctgacgcggcactgggccggaagttcaactgagtgcagtgcaggtggattccctcagcagcctgtgtgttgtgtgaaataaattggacttgaaacaag

SEQ ID NO: 283073 - DNA, 1837 bp, Homo sapiens
ggcgcgagctccgccccacgagcacctgtttccgagcggagagcgcgggccgttttctttcctggtgtcccgtcgcggcttgggacccggcaagatgggcaagaagggcaagaaggagaagaagggccgcggcgcggagaagacggccgccaagatggagaagaaggtgtctaagcgctcgcggaaggaggaggaagacctggaagcgctcatagcccatttccagacactcgatgccaagaggactcagactgtggaacttccgtgccccccaccctcaccaaggttaaatgcctccctctcggttcatcctgagaaagatgagttaatcctttttggaggtgaatatttcaacggccaaaaaacttttttgtataacgagctctatgtctacaataccagaaaggacacctggaccaaagttgacatccccagtccacctccgaggcgctgtgctcaccaggcggtggtagtgcctcaaggtggcggacagctgtgggtctttggaggggagtttgcctctcccaacggagagcagttctaccactacaaggatctctgggtcctgcatttggccaccaagacctgggaacaagtcaaggattacatctactacaacgacgtgtatgcctttaatctggacaccttcacatggagcaagctgtccccgtcagggacggggcccacacccagatcaggctgccagatgtccgtcactccccagggcggcatcgtcgtctatgggggctactcgaaacagagagttaagaaagacgtggacaagggcacacggcactcagacatgttcctgctgaagccagaggacggaagagaagacaagtgggtttggactcggatgaacccttcgggggtcaagcccaccccacggtctggcttttccgtggccatggccccgaatcaccagacactgttcttcgggggtgtctgtgacgaggaagaggaggagagcctgtcgggcgagttcttcaacgatctgtacttctacgacgccaccaggaaccgttggtttgagggacagctgaagggacccaagtctgaaaagaagaaacgcaggcggggcagaaaagaggagcccgaaggtggtagcaggccggcgtgtgggggagctggcacccaggggcctgtgcagctggtcaaggaggtggtggccgaggatggcaccgtggtcaccattaagcaggtgctcaccgcgccaggctcggcggggcagccccggtctgaggacgaagacagccttgaggaggccggcagccccgcacctgggccgtgtccacgctccaacgccatgctggctgtgaagcatggggtgctctacgtctatgggggcatgtttgaggccggcgaccgccaggtcaccctcagcgacctgcactgcctggacctgcacaggatggaggcgtggaaggccttggtggagatggacccagaaactcaggagtggctggaggagacggactcggaagaggacagtgaggaggttgagggcgccgagggtggggtcgacgacgaagacagcggagaggagagcggtgcggaggactgagaagagcccctgccaggggcgcctggcaagtgctgtgcccacgtccgcccaggacccagccgtgttgagtgaagctcttggggccagcgtgcgtcctgacgcacaggagagagctgaaggtgggtggcccaggccagggtgtgaactttctcccatggtttagtctctgacgcggcactgggccggaagttcaactgagtgcagtgcaggtggattccctcagcagcctgtgtgttgtgtgaaataaattggacttgaaacaagaaaaaaaag

SEQ ID NO: 283074 - DNA, 831 bp, Homo sapiens
tttttgaaacaaacggagacgtttaattacatgaacgcacacatgttaaaaaccgcctgtgcactcccggagggcagagcctgcctctctggttatttttgtgtcctccattcacttacaggctgtgacaaaccctgtgcccacgctgcctccactgccgggagactcagggctgggggagacatgccctggtcaccactgcggagactcagggctgggggagacatgccctggccaccagtggtgagccagcgagacaggaccccacgcgcgctgacccggggacgccatggaactcactcgcgattcctgcacgcgcgctgacccggggacgccatggaactcactcgcgattcctgctcacagcacgtttcctgctcgaaaaccaggagagcctccacgtgccgactagctctgtccacacatccattgcgcagctctgcagcggaaggaccttcagtaaagacgctggtttgtaacgagagaagcgttccaaagtgtcacacgacattgtttattactaaaaggagcagaatttctttttaatcttgacagtgttgttttcgtaacagtatgatttaaactgttacattcatttaggaaaactttttttcatttcataagtaatcaagctatctttccagcttaaaagcaaagaaaaaaggctcagggtaactttttaaaccacttcatcaataagaaaagttctctctgtcattgcacggcgtgattgtacacagtattagcaagcagttcacatgcgccagggccgacttggaaggaaacacaggttaacactgtttcctgtccgagttcacagagatgtttgca

SEQ ID NO: 283075 - DNA, 4000 bp, Homo sapiens
  misc_feature (19)..(19): n is a, c, g, or t
  misc_feature (27)..(27): n is a, c, g, or t
gtgggttacccggcccccnggagttanggcatatgtcgaccagcgctcggtcgtaactaggcgtggtgtcccgtcgcggcttgggacccggcaagatgggcaagaagggcaagaaggagaagaagggccgcggcgcggagaagacggccgccaagatggagaagaaggtgtctaagcgctcgcggaaggaggaggaagacctggaagcgctcatagcccatttccagacactcgatgccaagaggactcagactgtggaacttccgtgccccccaccctcaccaaggttaaatgcctccctctcggttcatcctgagaaagatgagttaatcctttttggaggtgaatatttcaacggccaaaaaacttttttgtataacgagctctatgtctacaataccagaaaggacacctggaccaaagttgacatccccagtccacctccgaggcgctgtgctcaccaggcggtggtagtgcctcaaggtggcggacagctgtgggtctttggaggggagtttgcctctcccaacggagagcagttctaccactacaaggatctctgggtcctgcatttggccaccaagacctgggaacaagtcaaatcaacaggcggtccttcgggtcggagtggacatcggatggtggcctggaagagacaattgatcctgtttggtggcttccatgaaagtacacgggattacatctactacaacgacgtgtatgcctttaatctggacaccttcacatggagcaagctgtccccgtcagggacggggcccacacccagatcaggctgccagatgtccgtcactccccagggcggcatcgtcgtctatgggggctactcgaaacagagagttaagaaagacgtggacaagggcacacggcactcagacatgttcctgctgaagccagaggacggaagagaagacaagtgggtttggactcggatgaacccttcgggggtcaagcccaccccacggtctggcttttccgtggccatggccccgaatcaccagacactgttcttcgggggtgtctgtgacgaggaagaggaggagagcctgtcgggcgagttcttcaacgatctgtacttctacgacgccaccaggaaccgttggtttgagggacagctgaagggacccaagtctgaaaagaagaaacgcaggcggggcagaaaagaggagcccgaaggtggtagcaggccggcgtgtgggggagctggcacccaggggcctgtgcagctggtcaaggaggtggtggccgaggatggcaccgtggtcaccattaagcaggtgctcaccgcgccaggctcggcggggcagccccggtctgaggacgaagacagccttgaggaggccggcagccccgcacctgggccgtgtccacgctccaacgccatgctggctgtgaagcatggggtgctctacgtctatgggggcatgtttgaggccggcgaccgccaggtcaccctcagcgacctgcactgcctggacctgcacaggatggaggcgtggaaggccttggtggagatggacccagaaactcaggagtggctggaggagacggactcggaagaggacagtgaggaggttgagggcgccgagggtggggtcgacgacgaagacagcggagaggagagcggtgcggaggactgaggctgtgacaaaccctgtgcccacgctgcctccactgccgggagactcagggctgggggagacatgccctggtcaccactgcggagactcagggctgggggagacatgccctggccaccagtggtgagccagcgagacaggaccccacgcgcgctgacccggggacgccatggaactcactcgcgattcctgcacgcgcgctgacccggggacgccatggaactcactcgcgattcctgctcacagcacgtttcctgctcgaaaaccaggagagcctccacgtgccgactagctctgtccacacatccattccgctgtctcctgcagagcgtctgtcgcacgtatgaggtgaaatccgcactgtcccatgaagactgtgaggggagttgccacccgcacacggcccaggagcgccagcagcttggggaccaccacaggcctcagggtctcttcagtccgacgggtccagctgtcgataaaacctcccggggaaggagtaaaggacaaccaagaacctgaactgcaaaagtatgaaaaacatttcatttccctcgagttctccacactttaggtctgcagcgccttgggggtgactgatggccctccgtgagacgcggtggccatgtgcttctacaagtgaaaaggagcaagtgtggttagagcctggagtatggacgtcccggggaccgctggcccatggcctggcttggggccttacaggggagcgagctgagtgaatgcaggggagggcccgtctttctacagtgtgtatcttgtttttgagacagactcactctgtcgtccaggctggagtgcagtggcgcgatctctgctcactgcaacctctgcctcccgggttcaagcgattctcctgcctcagcctcctcagtagctgggattacaggcacctgccaccacgcctggctaatttttgtattttttttttagtagagatggggtttcactatgttggtcaggctggcctcgagctcctgacctcaggtgatccacctgccttggcctcccaaagtgctgggattacaggcatgagccaccgcgcccggccctgccctgcttttctacatcaccactgtcttgtcagttagctcggctcaggcattgcatgcctgatctgtatctttgggaatcctgtgaggtaatggttctagatccaaaagaatggataaagagactgtttcagttcccgaaattatccaggcacattctgtgcgctactgaacttcagaaagcaccagtccatccagtgtgcagaggctggtaagtaaaacaggccagccgtgggcacagacagtttcaccagaggccccggggcagagggtcttctccagctcttccagggcggggctcatctgttcctgggccagaggtggacctgtctgcaggcttgtaagggtggggagacgccagcctggcccatgggctgtccacacccaccccccgcagaccgcgctgctgtctgcaggggatgccaccacttcctcctggcctcgggtgcacaggtgaaacatgaagaagctattggggcggaaaatggctctcaccaggctgctctcgggttaatgaaaactcgtcaaattctccatgcagcagcagccagccgggcacatgctgtcctgccctgcccgactgtgtgcagggaagcaggtcccctgggcctgggcggagggactgcgtgcctgtcagggaaggccgaggctccggacaggcgggaagcagccttctccttaatcaccccatgtggaaaccaattaaagattcgattctctcagacccggggcattttagccttggttgaatcctcctggaattcacagggaagtggctttgccctctgccctcgctgctggaaggcaaggggccgttctcgccttggttttctaggttgtgttgcggcaggagctgactgcccctaggcctagatctctgcacaacttcgctcagggacacctgcctctgtgcatgtctcatggtgtgaatgtgtttcctgctcacaggtaccgttttgtgtcatgcagttactggaatgtacaaaagcagctgtgatctttgtgagagctgcacagagcaggagtctgagagctgcacagagcaggagtctttatttggttcacttctggtctgcagcaaccacttgctactaaaagatggaaaagatgtacaaaaatgtcacagccctttagaaagcgacattatcagaaatgtatgaccttcagtcctccctccctctcctatgcccccaccagaccaggcggcgagaaggaacagggagtgaacatgtaacggaaaacaataaaactgaatttaactggaaaaaaaaaaaa

SEQ ID NO: 283076 - DNA, 3829 bp, Homo sapiens
  misc_feature (19)..(19): n is a, c, g, or t
  misc_feature (27)..(27): n is a, c, g, or t
gtgggttacccggcccccnggagttanggcatatgtcgaccagcgctcggtcgtaactaggcgtggtgtcccgtcgcggcttgggacccggcaagatgggcaagaagggcaagaaggagaagaagggccgcggcgcggagaagacggccgccaagatggagaagaaggtgtctaagcgctcgcggaaggaggagacttttttgtataacgagctctatgtctacaataccagaaaggacacctggaccaaagttgacatccccagtccacctccgaggcgctgtgctcaccaggcggtggtagtgcctcaaggtggcggacagctgtgggtctttggaggggagtttgcctctcccaacggagagcagttctaccactacaaggatctctgggtcctgcatttggccaccaagacctgggaacaagtcaaatcaacaggcggtccttcgggtcggagtggacatcggatggtggcctggaagagacaattgatcctgtttggtggcttccatgaaagtacacgggattacatctactacaacgacgtgtatgcctttaatctggacaccttcacatggagcaagctgtccccgtcagggacggggcccacacccagatcaggctgccagatgtccgtcactccccagggcggcatcgtcgtctatgggggctactcgaaacagagagttaagaaagacgtggacaagggcacacggcactcagacatgttcctgctgaagccagaggacggaagagaagacaagtgggtttggactcggatgaacccttcgggggtcaagcccaccccacggtctggcttttccgtggccatggccccgaatcaccagacactgttcttcgggggtgtctgtgacgaggaagaggaggagagcctgtcgggcgagttcttcaacgatctgtacttctacgacgccaccaggaaccgttggtttgagggacagctgaagggacccaagtctgaaaagaagaaacgcaggcggggcagaaaagaggagcccgaaggtggtagcaggccggcgtgtgggggagctggcacccaggggcctgtgcagctggtcaaggaggtggtggccgaggatggcaccgtggtcaccattaagcaggtgctcaccgcgccaggctcggcggggcagccccggtctgaggacgaagacagccttgaggaggccggcagccccgcacctgggccgtgtccacgctccaacgccatgctggctgtgaagcatggggtgctctacgtctatgggggcatgtttgaggccggcgaccgccaggtcaccctcagcgacctgcactgcctggacctgcacaggatggaggcgtggaaggccttggtggagatggacccagaaactcaggagtggctggaggagacggactcggaagaggacagtgaggaggttgagggcgccgagggtggggtcgacgacgaagacagcggagaggagagcggtgcggaggactgaggctgtgacaaaccctgtgcccacgctgcctccactgccgggagactcagggctgggggagacatgccctggtcaccactgcggagactcagggctgggggagacatgccctggccaccagtggtgagccagcgagacaggaccccacgcgcgctgacccggggacgccatggaactcactcgcgattcctgcacgcgcgctgacccggggacgccatggaactcactcgcgattcctgctcacagcacgtttcctgctcgaaaaccaggagagcctccacgtgccgactagctctgtccacacatccattccgctgtctcctgcagagcgtctgtcgcacgtatgaggtgaaatccgcactgtcccatgaagactgtgaggggagttgccacccgcacacggcccaggagcgccagcagcttggggaccaccacaggcctcagggtctcttcagtccgacgggtccagctgtcgataaaacctcccggggaaggagtaaaggacaaccaagaacctgaactgcaaaagtatgaaaaacatttcatttccctcgagttctccacactttaggtctgcagcgccttgggggtgactgatggccctccgtgagacgcggtggccatgtgcttctacaagtgaaaaggagcaagtgtggttagagcctggagtatggacgtcccggggaccgctggcccatggcctggcttggggccttacaggggagcgagctgagtgaatgcaggggagggcccgtctttctacagtgtgtatcttgtttttgagacagactcactctgtcgtccaggctggagtgcagtggcgcgatctctgctcactgcaacctctgcctcccgggttcaagcgattctcctgcctcagcctcctcagtagctgggattacaggcacctgccaccacgcctggctaatttttgtattttttttttagtagagatggggtttcactatgttggtcaggctggcctcgagctcctgacctcaggtgatccacctgccttggcctcccaaagtgctgggattacaggcatgagccaccgcgcccggccctgccctgcttttctacatcaccactgtcttgtcagttagctcggctcaggcattgcatgcctgatctgtatctttgggaatcctgtgaggtaatggttctagatccaaaagaatggataaagagactgtttcagttcccgaaattatccaggcacattctgtgcgctactgaacttcagaaagcaccagtccatccagtgtgcagaggctggtaagtaaaacaggccagccgtgggcacagacagtttcaccagaggccccggggcagagggtcttctccagctcttccagggcggggctcatctgttcctgggccagaggtggacctgtctgcaggcttgtaagggtggggagacgccagcctggcccatgggctgtccacacccaccccccgcagaccgcgctgctgtctgcaggggatgccaccacttcctcctggcctcgggtgcacaggtgaaacatgaagaagctattggggcggaaaatggctctcaccaggctgctctcgggttaatgaaaactcgtcaaattctccatgcagcagcagccagccgggcacatgctgtcctgccctgcccgactgtgtgcagggaagcaggtcccctgggcctgggcggagggactgcgtgcctgtcagggaaggccgaggctccggacaggcgggaagcagccttctccttaatcaccccatgtggaaaccaattaaagattcgattctctcagacccggggcattttagccttggttgaatcctcctggaattcacagggaagtggctttgccctctgccctcgctgctggaaggcaaggggccgttctcgccttggttttctaggttgtgttgcggcaggagctgactgcccctaggcctagatctctgcacaacttcgctcagggacacctgcctctgtgcatgtctcatggtgtgaatgtgtttcctgctcacaggtaccgttttgtgtcatgcagttactggaatgtacaaaagcagctgtgatctttgtgagagctgcacagagcaggagtctgagagctgcacagagcaggagtctttatttggttcacttctggtctgcagcaaccacttgctactaaaagatggaaaagatgtacaaaaatgtcacagccctttagaaagcgacattatcagaaatgtatgaccttcagtcctccctccctctcctatgcccccaccagaccaggcggcgagaaggaacagggagtgaacatgtaacggaaaacaataaaactgaatttaactggaaaaaaaaaaaa

SEQ ID NO: 283077 - DNA, 1760 bp, Homo sapiens
  misc_feature (19)..(19): n is a, c, g, or t
  misc_feature (27)..(27): n is a, c, g, or t
gtgggttacccggcccccnggagttanggcatatgtcgaccagcgctcggtcgtaactaggcgtggtgtcccgtcgcggcttgggacccggcaagatgggcaagaagggcaagaaggagaagaagggccgcggcgcggagaagacggccgccaagatggagaagaaggtgtctaagcgctcgcggaaggaggagacttttttgtataacgagctctatgtctacaataccagaaaggacacctggaccaaagttgacatccccagtccacctccgaggcgctgtgctcaccaggcggtggtagtgcctcaaggtggcggacagctgtgggtctttggaggggagtttgcctctcccaacggagagcagttctaccactacaaggatctctgggtcctgcatttggccaccaagacctgggaacaagtcaaatcaacaggcggtccttcgggtcggagtggacatcggatggtggcctggaagagacaattgatcctgtttggtggcttccatgaaagtacacgggattacatctactacaacgacgtgtatgcctttaatctggacaccttcacatggagcaagctgtccccgtcagggacggggcccacacccagatcaggctgccagatgtccgtcactccccagggcggcatcgtcgtctatgggggctactcgaaacagagagttaagaaagacgtggacaagggcacacggcactcagacatgttcctgctgaagccagaggacggaagagaagacaagtgggtttggactcggatgaacccttcgggggtcaagcccaccccacggtctggcttttccgtggccatggccccgaatcaccagacactgttcttcgggggtgtctgtgacgaggaagaggaggagagcctgtcgggcgagttcttcaacgatctgtacttctacgacgccaccaggaaccgttggtttgagggacagctgaagggacccaagtctgaaaagaagaaacgcaggcggggcagaaaagaggagcccgaaggtggtagcaggccggcgtgtgggggagctggcacccaggggcctgtgcagctggtcaaggaggtggtggccgaggatggcaccgtggtcaccattaagcaggtgctcaccgcgccaggctcggcggggcagccccggtctgaggacgaagacagccttgaggaggccggcagccccgcacctgggccgtgtccacgctccaacgccatgctggctgtgaagcatggggtgctctacgtctatgggggcatgtttgaggccggcgaccgccaggtcaccctcagcgacctgcactgcctggacctgcacaggatggaggcgtggaaggccttggtggagatggacccagaaactcaggagtggctggaggagacggactcggaagaggacagtgaggaggttgagggcgccgagggtggggtcgacgacgaagacagcggagaggagagcggtgcggaggactgagaagagcccctgccaggggcgcctggcaagtgctgtgcccacgtccgcccaggacccagccgtgttgagtgaagctcttggggccagcgtgcgtcctgacgcacaggagagagctgaaggtgggtggcccaggccagggtgtgaactttctcccatggtttagtctctgacgcggcactgggccggaagttcaactgagtgcagtgcaggtggattccctcagcagcctgtgtgttgtgtgaaataaattggacttgaaacaagaaaaaaaag

SEQ ID NO: 283078 - DNA, 3107 bp, Homo sapiens
ggcgcgagctccgccccacgagcacctgtttccgagcggagagcgcgggccgttttctttcctggtgtcccgtcgcggcttgggacccggcaagatgggcaagaagggcaagaaggagaagaagggccgcggcgcggagaagacggccgccaagatggagaagaaggtgtctaagcgctcgcggaaggaggaggaagacctggaagcgctcatagcccatttccagacactcgatgccaagaggactcagactgtggaacttccgtgccccccaccctcaccaaggttaaatgcctccctctcggttcatcctgagaaagatgagttaatcctttttggaggtgaatatttcaacggccaaaaaacttttttgtataacgagctctatgtctacaataccagaaaggacacctggaccaaagttgacatccccagtccacctccgaggcgctgtgctcaccaggcggtggtagtgcctcaaggtggcggacagctgtgggtctttggaggggagtttgcctctcccaacggagagcagttctaccactacaaggatctctgggtcctgcatttggccaccaagacctgggaacaagtcaaatcaacaggcggtccttcgggtcggagtggacatcggatggtggcctggaagagacaattgatcctgtttggtggcttccatgaaagtacacgggattacatctactacaacgacgtgtatgcctttaatctggacaccttcacatggagcaagctgtccccgtcagggacggggcccacacccagatcaggctgccagatgtccgtcactccccagggcggcatcgtcgtctatgggggctactcgaaacagagagttaagaaagacgtggacaagggcacacggcactcagacatgttcctgctgaagccagaggacggaagagaagacaagtgggtttggactcggatgaacccttcgggggtcaagcccaccccacggtctggcttttccgtggccatggccccgaatcaccagacactgttcttcgggggtgtctgtgacgaggaagaggaggagagcctgtcgggcgagttcttcaacgatctgtacttctacgacgccaccaggaaccgttggtttgagggacagctgaagggacccaagtctgaaaagaagaaacgcaggcggggcagaaaagaggagcccgaaggtggtagcaggccggcgtgtgggggagctggcacccaggggcctgtgcagctggtcaaggaggtggtggccgaggatggcaccgtggtcaccattaagcaggtgctcaccgcgccaggctcggcggggcagccccggtctgaggacgaagacagccttgaggaggccggcagccccgcacctgggccgtgtccacgctccaacgccatgctggctgtgaagcatggggtgctctacgtctatgggggcatgtttgaggccggcgaccgccaggtcaccctcagcgacctgcactgcctggacctgcacaggatggaggcgtggaaggccttggtggagatggacccagaaactcaggagtggctggaggagacggactcggaagaggacagtgaggaggttgagggcgccgagggtggggtcgacgacgaagacagcggagaggagagcggtgcggaggactgaggctgtgacaaaccctgtgcccacgctgcctccactgccgggagactcagggctgggggagacatgccctggtcaccactgcggagactcagggctgggggagacatgccctggccaccagtggtgagccagcgagacaggaccccacgcgcgctgacccggggacgccatggaactcactcgcgattcctgcacgcgcgctgacccggggacgccatggaactcactcgcgattcctgctcacagcacgtttcctgctcgaaaaccaggagagcctccacgtgccgactagctctgtccacacatccattccgctgtctcctgcagagcgtctgtcgcacgtatgaggtgaaatccgcactgtcccatgaagactgtgaggggagttgccacccgcacacggcccaggagcgccagcagcttggggaccaccacaggcctcagggtctcttcagtccgacgggtccagctgtcgataaaacctcccggggaaggagtaaaggacaaccaagaacctgaactgcaaaagtatgaaaaacatttcatttccctcgagttctccacactttaggtctgcagcgccttgggggtgactgatggccctccgtgagacgcggtggccatgtgcttctacaagtgaaaaggagcaagtgtggttagagcctggagtatggacgtcccggggaccgctggcccatggcctggcttggggccttacaggggagcgagctgagtgaatgcaggggagggcccgtctttctacagtgtgtatcttgtttttgagacagactcactctgtcgtccaggctggagtgcagtggcgcgatctctgctcactgcaacctctgcctcccgggttcaagcgattctcctgcctcagcctcctcagtagctgggattacaggcacctgccaccacgcctggctaatttttgtattttttttttagtagagatggggtttcactatgttggtcaggctggcctcgagctcctgacctcaggtgatccacctgccttggcctcccaaagtgctgggattacaggcatgagccaccgcgcccggccctgccctgcttttctacatcaccactgtcttgtcagttagctcggctcaggcattgcatgcctgatctgtatctttgggaatcctgtgaggtaatggttctagatccaaaagaatggataaagagactgtttcagttcccgaaattatccaggcacattctgtgcgctactgaacttcagaaagcaccagtccatccagtgtgcagaggctgatgaaaaagttaataaacagaatggcgactccgatgttgagcaagatcaccatgaccaccaggataggcgctgagccctggaagagagcgaggggaagaggtgagcgacagctgcggggggctctgcctgggccaccacgcctcccacccacgtcttttcaccaagctagca

SEQ ID NO: 283079 - DNA, 148 bp, Homo sapiens
cccccacctgcctcagctgcgctgacgtgtatgtgcgttcattctgcttttgaagaaactcaggagtggctggaggagacggactcggaagaggacagtgaggaggttgagggcgccgagggtggggtcgacgacgaagacagcggag

SEQ ID NO: 283080 - DNA, 334 bp, Homo sapiens
ataagtaagttcaggacaagcttagatgcaaattcacctttagcggctgcctgggtctaggttccctcagagagctggggcctgtagcagcagcattagtaggacatcttgaagcaggttttgtgctttgcaaagggtgtgttatttaaaaacaaagaaagcaaaaagtctttaaaagttaacttagagccaagttggtagactccttttgtaagagtgtattgtaggcgtgatgactcatgcctataatcccaacactttgggaggctgaggttagcttgagtccaggagtttaagaccagcctgggcaacatagtgagacccctgtctctac

SEQ ID NO: 283081 - DNA, 281 bp, Homo sapiens
  misc_feature (41)..(41): n is a, c, g, or t
ctccaacccttctataaagactagttgaagagaggagagancccgcttttattggtaacgggcgataagaggataaatgctacatggaagtgcttgtcacttatgaaccccaacgcaagtctcatttcattgttccgcaagcgatttatgaacgtgcctgtgggcagcagtaagaaaagaaaaattgaagcatgagagatgagcattgctgtcaagtccccacagctgccacagaaacgcatgtgctgctttccatcatcccttgcattcaaaatgctact

SEQ ID NO: 283082 - DNA, 5607 bp, Homo sapiens
  misc_feature (434)..(434): n is a, c, g, or t
  misc_feature (1163)..(1163): n is a, c, g, or t
gccagaatcagccctattgtcggggactgccggatcctcaggacatcattagccaaagccttcaatcgccttctcagcaagctgccaaatccttttatgatcgaatcagtttccttataggatctgatagcacccatgttatacctggagaaagtcctttcaataagagccttgcatctgtcatcagaggccaagtactgactgctgatggaactccacttattggagtaaatgtctcgtttttccattacccagaatatggatatactattacccgccaggacggaatgtttgacttggtggcaaatggtggggcctctctaactttggtatttgaacgatccccattcctcactcagtatcatactgtgtggattccatggaatgtcttttatgtgatggataccctagtcatgaagaaagaagagaatganattcccagctgtgatctgagtggattcgtgaggccaaatcccatcattgtgtcatcacctttatccacctttttcagatcttctcctgaagacagtcccatcattcccgaaacacaggtactccacgaggaaactacaattccaggaacagatttgaaactctcctacttgagttccagagctgcagggtataagtcagttctcaagatcaccatgacccagtctattattccatttaatttaatgaaggttcatcttatggtagctgtagtaggaagactcttccaaaagtggtttcctgcctcaccaaacttggcctatactttcatatgggataaaacagatgcatataatcagaaagtctatggtctatctgaagctgttgtgtcagttggatatgagtatgagtcgtgtttggacctgactctgtgggaaaagaggactgccattctgcagggctatgaattggatgcgtccaacatgggtggctggacattagataaacatcacgtgctggatgtacagaacggtatactgtacaagggaaacggggaaaaccagttcatctcccagcagcctccagtcgtgagtagcatcatgggcaatgggcgaaggcgcagcatttcctgccccagttgcaatggtcaagctgatggtaacaagttactggccccagtggcgctagcttgtgggatcgatggcagtctgtacgtaggcgatttcaactangtgcggcggatattcccttctggaaatgtaacaagtgtcttagaactaagaaataaagattttagacatagcagcaacccagctcatagatactaccttgcaacggatccagtcacgggagatctgtacgtttctgacacaaacacccgcagaatttatcgcccaaagtcacttacgggggcaaaagacttgactaaaaatgcagaagtcgtcgcagggacaggggagcaatgccttccgtttgacgaggcgagatgtggggatggagggaaggccgtggaagccacactcatgagtcccaaaggaatggcagttgataagaatggattaatctactttgttgatggaaccatgattaggaaagttgaccaaaatggaatcatatcaactcttctgggctctaacgatttgacttcagccagacctttaacttgtgacaccagcatgcacatcagccaggtacgtctggaatggcccactgacctagccattaaccctatggataactccatttatgtcctggataataatgtagttttacagatcactgaaaatcgtcaagttcgcattgctgctggacggcccatgcactgtcaggttcccggagtggaatatcctgtggggaagcacgcggtgcagacaacactggaatcagccactgccattgctgtgtcctacagtggggtcctgtacattactgaaactgatgagaagaaaattaaccggataaggcaggtcacaacagatggagaaatctccttagtggccggaataccttcagagtgtgactgcaaaaatgatgccaactgtgactgttaccagagtggagatggctacgccaaggatgccaaactcagtgccccatcctccctggctgcttctccagatggtacactgtatattgcagatctagggaatatccggatccgggctgtgtcaaagaataagcctttacttaactctatgaacttctatgaagttgcgtctccaactgatcaagaactctacatctttgacatcaatggtactcaccaatatactgtaagtttagtcactggtgattacctttacaattttagctacagcaatgacaatgatattactgctgtgacagacagcaatggcaacacccttagaattagacgggacccaaatcgcatgccagttcgagtggtgtctcctgataaccaagtgatatggttgacaataggaacaaatggatgtttgaaaagcatgactgctcaaggactggaattagttttgtttacttaccatggcaatagtggccttttagccactaaaagtgatgaaactggatggacaacgttttttgactatgacagtgaaggtcgtctgacaaatgttacgtttccaactggagtggtcacaaacctgcatggggacatggacaaggctatcacagtggacattgagtcatctagccgagaagaagatgtcagcatcacttcaaatctgtcctcgatcgattctttctacaccatggttcaagatcagttaagaaacagctaccagattggttatgacggctccctcagaattatctacgccagtggcctggactcacactaccaaacagagccgcacgttctggctggcaccgctaatccgacggttgccaaaagaaacatgactttgcctggcgagaacggtcaaaacttggtggaatggagattccgaaaagagcaagcccaagggaaagtcaatgtctttggccgcaagctcagggttaatggcagaaacctcctttcagttgactttgatcgaacaacaaagacagaaaagatctatgacgaccaccgtaaatttctactgaggatcgcctacgacacgtctgggcacccgactctctggctgccaagcagcaagctgatggccgtcaatgtcacctattcatccacaggtcaaattgccagcatccagcgaggcaccactagcgagaaagtagattatgacggacaggggaggatcgtgtctcgggtctttgctgatggtaaaacatggagttacacatatttagaaaagtccatggttcttctgcttcatagccagcggcagtacatcttcgaatacgatatgtgggaccgcctgtctgccatcaccatgcccagtgtggctcgccacaccatgcagaccatccgatccattggctactaccgcaacatatacaaccccccggaaagcaacgcctccatcatcacggactacaacgaggaagggctgcttctacaaacagctttcttgggtacaagtcggagggtcttattcaaatacagaaggcagactaggctctcagaaattttatatgatagcacaagagtcagttttacctatgatgaaacagcaggagtcctaaagacagtaaacctccagagtgatggttttatttgcaccattagatacaggcaaattggtcccctgattgacaggcagattttccgctttagtgaagatgggatggtaaatgcaagatttgactatagctatgacaacagctttcgagtgaccagcatgcagggtgtgatcaatgaaacgccactgcctattgatctgtatcagtttgatgacatttctggcaaagttgagcagtttggaaagtttggagttatatattatgatattaaccagatcatttctacagctgtaatgacctatacgaagcactttgatgctcatggccgtatcaaggagattcaatatgagatattcaggtcgctcatgtactggattacaattcagtatgataacatgggtcgggtaaccaagagagagattaaaatagggccctttgccaacaccaccaaatatgcttatgaatatgatgttgatggacagctccaaacagtttacctcaatgaaaagataatgtggcggtacaactacgatctgaatggaaacctccatttactgaacccaagtaacagtgcgcgtctgacaccccttcgctatgacctgcgagacagaatcactcgactgggtgatgttcaatatcggttggatgaagatggtttcctacgtcaaaggggcacggaaatctttgaatatagctccaaggggcttctaactcgagtttacagtaaaggcagtggctggacagtgatctaccgttatgacggcctgggaaggcgtgtttctagcaaaaccagtctaggacagcacctgcagtttttttatgctgacttaacttatcccactaggattactcatgtctacaaccattcgagttcagaaattacctccctgtattatgatctccaaggacatctttttgccatggaaatcagcagtggggatgaattctatattgcatcggataacacagggacaccactggctgtgttcagtagcaatgggcttatgctgaaacagattcagtacactgcatatggggaaatctattttgactctaatattgactttcaactggtaattggatttcatggtggcctgtatgacccactcaccaaattaatccactttggagaaagagattatgacattttggcaggacggtggacaacacctgacatagaaatctggaaaagaattgggaaggacccagctccttttaacttgtacatgtttaggaataacaaccctgcaagcaaaatccatgacgtgaaagattacatcacagatgttaacagctggctggtgacatttggtttccatctgcacaatgctattcctggattccctgttcccaaatttgatttaacagaaccttcttacgaacttgtgaagagtcagcagtgggatgatataccgcccatcttcggagtccagcagcaagtggcgcggcaggccaaggccttcctgtcgctggggaagatggccgaggtgcaggtgagccggcgccgggccggcggcgcgcagtcctggctgtggttcgccacggtcaagtcgctgatcggcaagggcgtcatgctggccgtcagccagggccgcgtgcagaccaacgtgctcaacatcgccaacgaggactgcatcaaggtggcggccgtgctcaacaacgccttctacctggagaacctgcacttcaccatcgagggcaaggacacgcactacttcatcaagaccaccacgcccgagagcgacctgggcacgctgcggttgaccagcggccgcaaggcgctggagaacggcatcaacgtgacggtgtcgcagtccaccacggtggtgaacggcaggacgcgcaggttcgcggacgtggagatgcagttcggcgcgctggcgctgcacgtgccgctaaaggatgaccctggacgaggagaagggggcgcatcctggagcaggcgcggcagggcgcgctcgccgggccgggggccgcgaacagaggcgtgcgcgaaggcgaggaagggcgggcgcctctggacggaggcgagaacggaatgtgacgccggcagtgcagctacacggtctacgc

SEQ ID NO: 283083 - DNA, 2831 bp, Homo sapiens
  misc_feature (434)..(434): n is a, c, g, or t
  misc_feature (1163)..(1163): n is a, c, g, or t
gccagaatcagccctattgtcggggactgccggatcctcaggacatcattagccaaagccttcaatcgccttctcagcaagctgccaaatccttttatgatcgaatcagtttccttataggatctgatagcacccatgttatacctggagaaagtcctttcaataagagccttgcatctgtcatcagaggccaagtactgactgctgatggaactccacttattggagtaaatgtctcgtttttccattacccagaatatggatatactattacccgccaggacggaatgtttgacttggtggcaaatggtggggcctctctaactttggtatttgaacgatccccattcctcactcagtatcatactgtgtggattccatggaatgtcttttatgtgatggataccctagtcatgaagaaagaagagaatganattcccagctgtgatctgagtggattcgtgaggccaaatcccatcattgtgtcatcacctttatccacctttttcagatcttctcctgaagacagtcccatcattcccgaaacacaggtactccacgaggaaactacaattccaggaacagatttgaaactctcctacttgagttccagagctgcagggtataagtcagttctcaagatcaccatgacccagtctattattccatttaatttaatgaaggttcatcttatggtagctgtagtaggaagactcttccaaaagtggtttcctgcctcaccaaacttggcctatactttcatatgggataaaacagatgcatataatcagaaagtctatggtctatctgaagctgttgtgtcagttggatatgagtatgagtcgtgtttggacctgactctgtgggaaaagaggactgccattctgcagggctatgaattggatgcgtccaacatgggtggctggacattagataaacatcacgtgctggatgtacagaacggtatactgtacaagggaaacggggaaaaccagttcatctcccagcagcctccagtcgtgagtagcatcatgggcaatgggcgaaggcgcagcatttcctgccccagttgcaatggtcaagctgatggtaacaagttactggccccagtggcgctagcttgtgggatcgatggcagtctgtacgtaggcgatttcaactangtgcggcggatattcccttctggaaatgtaacaagtgtcttagaactaagaaataaagattttagacatagcagcaacccagctcatagatactaccttgcaacggatccagtcacgggagatctgtacgtttctgacacaaacacccgcagaatttatcgcccaaagtcacttacgggggcaaaagacttgactaaaaatgcagaagtcgtcgcagggacaggggagcaatgccttccgtttgacgaggcgagatgtggggatggagggaaggccgtggaagccacactcatgagtcccaaaggaatggcagttgataagaatggattaatctactttgttgatggaaccatgattaggaaagttgaccaaaatggaatcatatcaactcttctgggctctaacgatttgacttcagccagacctttaacttgtgacaccagcatgcacatcagccaggtacgtctggaatggcccactgacctagccattaaccctatggataactccatttatgtcctggataataatgtagttttacagatcactgaaaatcgtcaagttcgcattgctgctggacggcccatgcactgtcaggttcccggagtggaatatcctgtggggaagcacgcggtgcagacaacactggaatcagccactgccattgctgtgtcctacagtggggtcctgtacattactgaaactgatgagaagaaaattaaccggataaggcaggtcacaacagatggagaaatctccttagtggccggaataccttcagagtgtgactgcaaaaatgatgccaactgtgactgttaccagagtggagatggctacgccaaggatgccaaactcagtgccccatcctccctggctgcttctccagatggtacactgtatattgcagatctagggaatatccggatccgggctgtgtcaaagaataagcctttacttaactctatgaacttctatgaagttgcgtctccaactgatcaagaactctacatcccatcttcggagtccagcagcaagtggcgcggcaggccaaggccttcctgtcgctggggaagatggccgaggtgcaggtgagccggcgccgggccggcggcgcgcagtcctggctgtggttcgccacggtcaagtcgctgatcggcaagggcgtcatgctggccgtcagccagggccgcgtgcagaccaacgtgctcaacatcgccaacgaggactgcatcaaggtggcggccgtgctcaacaacgccttctacctggagaacctgcacttcaccatcgagggcaaggacacgcactacttcatcaagaccaccacgcccgagagcgacctgggcacgctgcggttgaccagcggccgcaaggcgctggagaacggcatcaacgtgacggtgtcgcagtccaccacggtggtgaacggcaggacgcgcaggttcgcggacgtggagatgcagttcggcgcgctggcgctgcacgtgccgctaaaggatgaccctggacgaggagaagggggcgcatcctggagcaggcgcggcagggcgcgctcgccgggccgggggccgcgaacagaggcgtgcgcgaaggcgaggaagggcgggcgcctctggacggaggcgagaacggaatgtgacgccggcagtgcagctacacggtctacgc

SEQ ID NO: 283084 - DNA, 737 bp, Homo sapiens
actaaaagtgatgaaactggatggacaacgttttttgagtaagtatatgaaaattctactctgattataaaatactgtgatataataatatcatctataataacaatataatcttaagagctggaggattccatgtttttgagagtctagagcttctgtaatttttggatcccggctgggcacggtggctcattcccgtagtctcagctcctggggaggctgagacgggaggattgcttgagcccaggacttcgaggccacagtgagctatgattgtgccactgcactccaggctgagtgacagagccagaacgtatctctaaagaaaaaaaaatggccgggcgcagtggctcacgcctgtaatcccagcactttgggaggccgaggcgggcggatcacgaggtcagaagatcgagaccatcctggataacacggtgaaacccccgtctctactaaaaatacaaaaaaaatagccgggcgtggtggcgggcgcctgtagtcccagctactcgggaggctgaggcaggagaatggcgtgaacccgggaggcgcagcttgcagtgagccgagatcgcgccactgcactccagtctctgggcgacagagcgagactccgcctcaaaaaaaaaaagatacctctttctgagaaagaagacaaaattgcaagatacaagatgtagggccttggaaagggaagggactcgtgtaagggagaagcccaaagcttaagtttcagt

SEQ ID NO: 283085 - DNA, 439 bp, Homo sapiens
gcggccgccaccagccggaatagcaaccggcggagcccgtgcgcaccgcagcgcagcgcagcggccggggggtgcgggcgccctcgccgcccggctacctaccgccgcctgggcgccgccgctgcctcccttccccgcttctaccctccagcagacgcccgccggagcgacccctcccagggtgaccgggggaaggtgttccacgtggccatagcgtttgcgtcacaatgacctggcggacaggtgggagccacagcgtacaccccaggattccctctgtgctgtgcgtagtgcctactgcttgcttccaggttaaatttctgtagctttagaggacaggagacttcatgacttcactgccaagaaaagttacagaggcctgctgtacctggaaatcaagtttgagcttcgagaataaaggtcatgttttaaaaacagc

SEQ ID NO: 283086 - DNA, 329 bp, Homo sapiens
ctgcaggtgactggaactgatttgacataaccatcgtatgcatggagaagctgagaacagtaatctgcagaagcaaaagtatgaaacagccgggcaaagatgcacagaggggtcaaagcatcgtagaaccacagatgtgaaagaactgcggagaggacgttctccaggagggacatcattaactcaacccgggcgagagactaggctttgaccaggctttccaacccacgcagcttcagcttccatcaagcccatcctaaccacaacgaacacaaggcaaggcaaacaagcaaaacataataaagatcagagagaacacagaaagactg

SEQ ID NO: 283087 - DNA, 8096 bp, Homo sapiens
  misc_feature (4166)..(4166): n is a, c, g, or t
  misc_feature (4571)..(4571): n is a, c, g, or t
  misc_feature (4593)..(4593): n is a, c, g, or t
  misc_feature (5084)..(5084): n is a, c, g, or t
  misc_feature (5246)..(5246): n is a, c, g, or t
  misc_feature (6013)..(6013): n is a, c, g, or t
  misc_feature (6495)..(6495): n is a, c, g, or t
  misc_feature (6512)..(6512): n is a, c, g, or t
  misc_feature (6532)..(6532): n is a, c, g, or t
  misc_feature (6547)..(6547): n is a, c, g, or t
  misc_feature (6672)..(6672): n is a, c, g, or t
  misc_feature (6722)..(6722): n is a, c, g, or t
  misc_feature (6748)..(6748): n is a, c, g, or t
aatgtgcaggatgacaagatggagcaaacagtgcttgtaccaccaggacctgacagcttcaacttcttcaccagagaatctcttgcggctattgaaagacgcattgcagaagaaaaggcaaagaatcccaaaccagacaaaaaagatgacgacgaaaatggcccaaagccaaatagtgacttggaagctggaaagaaccttccatttatttatggagacattcctccagagatggtgtcagagcccctggaggacctggacccctactatatcaataagaaaacttttatagtattgaataaagggaaggccatcttccggttcagtgccacctctgccctgtacattttaactcccttcaatcctcttaggaaaatagctattaagattttggtacattcattattcagcatgctaattatgtgcactattttgacaaactgtgtgtttatgacaatgagtaaccctcctgattggacaaagaatgtagaatacaccttcacaggaatatatacttttgaatcacttataaaaattattgcaaggggattctgtttagaagattttactttccttcgggatccatggaactggctcgatttcactgtcattacatttgcgtacgtcacagagtttgtggacctgggcaatgtctcggcattgagaacattcagagttctccgagcattgaagacgatttcagtcattccaggcctgaaaaccattgtgggagccctgatccagtctgtgaagaagctctcagatgtaatgatcctgactgtgttctgtctgagcgtatttgctctaattgggctgcagctgttcatgggcaacctgaggaataaatgtatacaatggcctcccaccaatgcttccttggaggaacatagtatagaaaagaatataactgtgaattataatggtacacttataaatgaaactgtctttgagtttgactggaagtcatatattcaagattcaagatatcattatttcctggagggttttttagatgcactactatgtggaaatagctctgatgcaggccaatgtccagagggatatatgtgtgtgaaagctggtagaaatcccaattatggctacacaagctttgataccttcagttgggcttttttgtccttgtttcgactaatgactcaggacttctgggaaaatctttatcaactgacattacgtgctgctgggaaaacgtacatgatattttttgtattggtcattttcttgggctcattctacctaataaatttgatcctggctgtggtggccatggcctacgaggaacagaatcaggccaccttggaagaagcagaacagaaagaggccgaatttcagcagatgattgaacagcttaaaaagcaacaggaggcagctcagcaggcagcaacggcaactgcctcagaacattccagagagcccagtgcagcaggcaggctctcagacagctcatctgaagcctctaagttgagttccaagagtgctaaggaaagaagaaatcggaggaagaaaagaaaacagaaagagcagtctggtggggaagagaaagatgaggatgaattccaaaaatctgaatctgaggacagcatcaggaggaaaggttttcgcttctccattgaagggaaccgattgacatatgaaaagaggtactcctccccacaccagtctttgttgagcatccgtggctccctattttcaccaaggcgaaatagcagaacaagccttttcagctttagagggcgagcaaaggatgtgggatctgagaacgacttcgcagatgatgagcacagcacctttgaggataacgagagccgtagagattccttgtttgtgccccgacgacacggagagagacgcaacagcaacctgagtcagaccagtaggtcatcccggatgctggcagtgtttccagcgaatgggaagatgcacagcactgtggattgcaatggtgtggtttccttggttggtggaccttcagttcctacatcgcctgttggacagcttctgccagagggaacaaccactgaaactgaaatgagaaagagaaggtcaagttctttccacgtttccatggactttctagaagatccttcccaaaggcaacgagcaatgagtatagccagcattctaacaaatacagtagaagaacttgaagaatccaggcagaaatgcccaccctgttggtataaattttccaacatattcttaatctgggactgttctccatattggttaaaagtgaaacatgttgtcaacctggtcgtgatggacccatttgttgacctggccatcaccatctgtattgtcttaaatactcttttcatggccatggagcactatccaatgacggaccatttcaataatgtgcttacagtaggaaacttggttttcactgggatctttacagcagaaatgtttctgaaaattattgccatggatccttactattatttccaagaaggctggaatatctttgacggttttattgtgacgcttagcctggtagaacttggactcgccaatgtggaaggattatctgttctccgttcatttcgattgctgcgagttttcaagttggcaaaatcttggccaacgttaaatatgctaataaagatcatcggcaattccgtgggggctctgggaaatttaaccctcgtcttggccatcatcgtcttcatttttgccgtggtcggcatgcagctctttggtaaaagctacaaagattgtgtctgcaagatcgccagtgattgtcaactcccacgctggcacatgaatgacttcttccactccttcctgattgtgttccgcgtgctgtgtggggagtggatagagaccatgtgggactgtatggaggttgctggtcaagccatgtgccttactgtcttcatgatggtcatggtgattggaaacctagtggtcctgaatctctttctggccttgcttctgagctcatttagtgcagacaaccttgcagccactgatgatgataatgaaatgaataatctccaaattgctgtggataggatgcacaaaggagtagcttatgtgaaaagaaaaatatatgaatttattcaacagtccttcattaggaaacaaaagattttagatgaaattaaaccacttgatgatctaaacaacaagaaagacagttgtatgtccaatcatacaacagaaattgggaaagatcttgactatcttaaagatgtaaatggaactacaagtggtataggaactggcagcagtgttgaaaaatacattattgatgaaagtgattacatgtcattcataaacaaccccagtcttactgtgactgtaccaattgctgtaggagaatctgactttgaaaatttaaacacggaagactttagtagtgaatcggatctggaagaaagcaaagagaaactgaatgaaagcagtagctcatcagaaggtagcactgtggacatcggcgccctgtagaagaacagcccgtagtggaacctgaagaaactcttgaaccagaagcttgtttcactgaaggctgtgtacaaagattcaagtgttgtcaaatcaatgtggaagaaggcagaggaaaacaatggtggaacctgagaaggacgtgtttccgaatagttgaacataactggtttgagaccttcattgttttcatgattctccttagtagtggtgctctggcatttgaagatatatatattgatcagcgaaagacgattaagacgatgttggaatatgctgacaaggttttcacttacattttcattctggaaatgcttctaaaatgggtggcatatggctatcaaacatatttcaccaatgcctggtgttggctggacttcttaattgttgatgtttcattggtcagtttaacagcaaatgccttgggttactcagaacttggagccatcaaatctctcaggacactaagagctctgagacctctaagagccttatctcgatttgaagggatgagggtggttgtgaatgcccttttaggagcaattccatccatcatgaatgtgcttctggtttgtcttatattctggctaattttcagcatcatgggcgtaaatttgtttgctggcaaattctaccactgtattaacaccacaactggtgacaggtttgacatcgaagacgtgaataatcatacngattgcctaaaactaatagaaagaaatgagactgctcgatggaaaaatgtgaaagtaaactttgataatgtaggatttgggtatctctctttgcttcaagttgccacattcaaaggatggatggatataatgtatgcagcagttgattccagaaatgtggaactccagcctaagtatgaagaaagtctgtacatgtatctttactttgttattttcatcatctttgggtccttcttcaccttgaacctgtttattggtgtcatcatagataatttcaaccagcagaaaaagaagtttggaggtcaagacatctttatgacagaagaacagaagaaatactataatgcaatgaaaaaattaggatcgaaaaaaccgcaaaagcctatacctcgaccaggaaacaantttcaaggaatggtctttgacntcgtaaccagacaagtttttgacataagcatcatgattctcatctgtcttaacatggtcacaatgatggtggaaacagatgaccagagtgaatatgtgactaccattttgtcacgcatcaatctggtgttcattgtgctatttactggagagtgtgtactgaaactcatctctctacgccattattattttaccattggatggaatatttttgattttgtggttgtcattctctccattgtaggtatgtttcttgccgagctgatagaaaagtatttcgtgtcccctaccctgttccgagtgatccgtcttgctaggattggccgaatcctacgtctgatcaaaggagcaaaggggatccgcacgctgctctttgctttgatgatgtcccttcctgcgttgtttaacatcggcctcctactcttcctagtcatgttcatctacgccatctttgggatgtccaactttgcctatgttaagagggaagttggnatcgatgacatgttcaactttgagacctttggcaacagcatgatctgcctattccaaattacaacctctgctggctgggatggattgctagcacccattctcaacagtaagccacccgactgtgaccctaataaagttaaccctggaagctcagttaagggngactgtgggaacccatctgttggaattttcttttttgtcagttacatcatcatatccttcctggttgtggtgaacatgtacatcgcggtcatcctggagaacttcagtgttgctactgaagaaagtgcagagcctctgagtgaggatgactttgagatgttctatgaggtttgggagaagtttgatcccgatgcaactcagttcatggaatttgaaaaattatctcagtttgcagctgcgcttgaaccgcctctcaatctgccacaaccaaacaaactccagctcattgccatggatttgcccatggtgagtggtgaccggatccactgtcttgatatcttatttgcttttacaaagcgggttctaggagagagtggagagatggatgctctacgaatacagatggaagagcgattcatggcttccaatccttccaaggtctcctatcagccaatcactactactttaaaacgaaaacaagaggaagtatctgctgtcattattcagcgtgcttacagacgccaccttttaaagcgaactgtaaaacaagcttcctttacgtacaataaaaacaaaatcaaaggtggggctaatcttcttataaaagaagacatgataattgacagaataaatgaaaactctattacagaaaaaactgatctgaccatgtccactgcagcttgtccaccttcctatgaccgggtgacaaagccaattgtggaaaaacatgagcaagaaggcaaagatgaaaaagccaaagggaaatnaatgaaaataaataaaaataattgggtgacaaattgtttacagcctgtgaaggtgatgtatttttatcaacaggactcctttaggaggtcaatgccaaactgactgtttttacacaaatctccttaaggtcagtgcctacaataagacagtgaccccttgtcagcaaactgtgactctgtgtaaaggggagatgaccttgacaggagattactgttctcactaccagctgacactgctgaagataagatgcacaatggctagtcagactgtagggaccagtttcaaggggtgcaaacctgtgattttggggttgtttaacatgaaacactttagtgtagtaattgtatccactgtttgcatttcaactgccacatttgtcacatttttatggaatctgttagtggattcatctttttgttaatccatgtgtttattatatgtgactatttttgtaaacgaagtttctgttgagaaataggcnaaggacctctataacangtatgccacctggggggtanggcaaccacatggcnctcccagctacacaaagtcgtggtttgcatgagggcatgctgcacttagagatcatgcatgagaaaaagtcacaagaaaaacaaattcttaaatttcaccatatttctgggaggggtaattgggngataagtggaggtgctttgttgatcttgttttgcgaaatccagcccctanaccaagtagattgtttgtgggtaggncagtaaatcttagcaggtgcaaacttcattcaaatgtttggagtcataaatgttatgtttctttttgttgtattaaaaaaaaacctgaatagtgaatattgcccctcaccctccaccgccagaagactgaattgaccaaaattactctttataaatttctgctttttcctgcactttgtttagccatcttcggctctcagcaaggttgacactgtatatgttaatgaaatgctatttattatgtaaatagtcattttaccctgtggtgcacgtttgagcaaacaaataacgacctaagcacagtatttattgcatcaaatatgtaccacaagaaatgtagagtgcaagctttacacaggtaataaaatgtattctgtaccatttatagatagtttggatgctatcaatgcatgtttatattaccatgctgctgtatctggtttctctcactgctcagaatctcatttatgagaaaccatatgtcagtggtaaagtcaaggaaattgttcaacagatctcatttatttaagtcattaagcaatagtttgcagcactttaacagctttttggttatttttacattttaagtggataacataggtatatagccagactgtacagacatgtttaaaaaaacacactgcttaacctattaaatatgtgtttagaattttataagcaaatataaatactgtaaaaagtcactttattttatttttcagcattatgtacataaatatgaagaggaaattatcttcaggttgatatcacaatcacttttcttactttctgtccatagtactttttcatgaaagaaatttgctaaataagacatgaaaacaagactgggtagttgtagatttctgctttttaaattacatttgctaattttagattatttcacaattttaaggagcaaaataggttcacgattcatatccaaattatgctttgcaattggaaaagggtttaaaattttatttatatttctggtagtacctgtactaactgaattgaaggtagtgcttatgttatttttgttctttttttctgacttcggtttatgttttcatttctttggagtaatgctgctctagattgttctaaatagaatgtgggcttcataatttttttttccacaaaaacagagtagtcaacttatatagtcaattacatcaggacattttgtgtttcttacagaagcaaaccataggctcctcttttccttaaaactacttagataaactgtattcgtgaactgcatgctggaaaatgctactattatgctaaataatgctaaccaacatttaaaatgtgcaaaactaataaagattacattttttattcg

SEQ ID NO: 283088 - DNA, 6043 bp, Homo sapiens
  misc_feature (4166)..(4166): n is a, c, g, or t
  misc_feature (4571)..(4571): n is a, c, g, or t
  misc_feature (4593)..(4593): n is a, c, g, or t
  misc_feature (5084)..(5084): n is a, c, g, or t
  misc_feature (5246)..(5246): n is a, c, g, or t
  misc_feature (6013)..(6013): n is a, c, g, or t
aatgtgcaggatgacaagatggagcaaacagtgcttgtaccaccaggacctgacagcttcaacttcttcaccagagaatctcttgcggctattgaaagacgcattgcagaagaaaaggcaaagaatcccaaaccagacaaaaaagatgacgacgaaaatggcccaaagccaaatagtgacttggaagctggaaagaaccttccatttatttatggagacattcctccagagatggtgtcagagcccctggaggacctggacccctactatatcaataagaaaacttttatagtattgaataaagggaaggccatcttccggttcagtgccacctctgccctgtacattttaactcccttcaatcctcttaggaaaatagctattaagattttggtacattcattattcagcatgctaattatgtgcactattttgacaaactgtgtgtttatgacaatgagtaaccctcctgattggacaaagaatgtagaatacaccttcacaggaatatatacttttgaatcacttataaaaattattgcaaggggattctgtttagaagattttactttccttcgggatccatggaactggctcgatttcactgtcattacatttgcgtacgtcacagagtttgtggacctgggcaatgtctcggcattgagaacattcagagttctccgagcattgaagacgatttcagtcattccaggcctgaaaaccattgtgggagccctgatccagtctgtgaagaagctctcagatgtaatgatcctgactgtgttctgtctgagcgtatttgctctaattgggctgcagctgttcatgggcaacctgaggaataaatgtatacaatggcctcccaccaatgcttccttggaggaacatagtatagaaaagaatataactgtgaattataatggtacacttataaatgaaactgtctttgagtttgactggaagtcatatattcaagattcaagatatcattatttcctggagggttttttagatgcactactatgtggaaatagctctgatgcaggccaatgtccagagggatatatgtgtgtgaaagctggtagaaatcccaattatggctacacaagctttgataccttcagttgggcttttttgtccttgtttcgactaatgactcaggacttctgggaaaatctttatcaactgacattacgtgctgctgggaaaacgtacatgatattttttgtattggtcattttcttgggctcattctacctaataaatttgatcctggctgtggtggccatggcctacgaggaacagaatcaggccaccttggaagaagcagaacagaaagaggccgaatttcagcagatgattgaacagcttaaaaagcaacaggaggcagctcagcaggcagcaacggcaactgcctcagaacattccagagagcccagtgcagcaggcaggctctcagacagctcatctgaagcctctaagttgagttccaagagtgctaaggaaagaagaaatcggaggaagaaaagaaaacagaaagagcagtctggtggggaagagaaagatgaggatgaattccaaaaatctgaatctgaggacagcatcaggaggaaaggttttcgcttctccattgaagggaaccgattgacatatgaaaagaggtactcctccccacaccagtctttgttgagcatccgtggctccctattttcaccaaggcgaaatagcagaacaagccttttcagctttagagggcgagcaaaggatgtgggatctgagaacgacttcgcagatgatgagcacagcacctttgaggataacgagagccgtagagattccttgtttgtgccccgacgacacggagagagacgcaacagcaacctgagtcagaccagtaggtcatcccggatgctggcagtgtttccagcgaatgggaagatgcacagcactgtggattgcaatggtgtggtttccttggttggtggaccttcagttcctacatcgcctgttggacagcttctgccagagggaacaaccactgaaactgaaatgagaaagagaaggtcaagttctttccacgtttccatggactttctagaagatccttcccaaaggcaacgagcaatgagtatagccagcattctaacaaatacagtagaagaacttgaagaatccaggcagaaatgcccaccctgttggtataaattttccaacatattcttaatctgggactgttctccatattggttaaaagtgaaacatgttgtcaacctggtcgtgatggacccatttgttgacctggccatcaccatctgtattgtcttaaatactcttttcatggccatggagcactatccaatgacggaccatttcaataatgtgcttacagtaggaaacttggttttcactgggatctttacagcagaaatgtttctgaaaattattgccatggatccttactattatttccaagaaggctggaatatctttgacggttttattgtgacgcttagcctggtagaacttggactcgccaatgtggaaggattatctgttctccgttcatttcgattgctgcgagttttcaagttggcaaaatcttggccaacgttaaatatgctaataaagatcatcggcaattccgtgggggctctgggaaatttaaccctcgtcttggccatcatcgtcttcatttttgccgtggtcggcatgcagctctttggtaaaagctacaaagattgtgtctgcaagatcgccagtgattgtcaactcccacgctggcacatgaatgacttcttccactccttcctgattgtgttccgcgtgctgtgtggggagtggatagagaccatgtgggactgtatggaggttgctggtcaagccatgtgccttactgtcttcatgatggtcatggtgattggaaacctagtggtcctgaatctctttctggccttgcttctgagctcatttagtgcagacaaccttgcagccactgatgatgataatgaaatgaataatctccaaattgctgtggataggatgcacaaaggagtagcttatgtgaaaagaaaaatatatgaatttattcaacagtccttcattaggaaacaaaagattttagatgaaattaaaccacttgatgatctaaacaacaagaaagacagttgtatgtccaatcatacaacagaaattgggaaagatcttgactatcttaaagatgtaaatggaactacaagtggtataggaactggcagcagtgttgaaaaatacattattgatgaaagtgattacatgtcattcataaacaaccccagtcttactgtgactgtaccaattgctgtaggagaatctgactttgaaaatttaaacacggaagactttagtagtgaatcggatctggaagaaagcaaagagaaactgaatgaaagcagtagctcatcagaaggtagcactgtggacatcggcgccctgtagaagaacagcccgtagtggaacctgaagaaactcttgaaccagaagcttgtttcactgaaggctgtgtacaaagattcaagtgttgtcaaatcaatgtggaagaaggcagaggaaaacaatggtggaacctgagaaggacgtgtttccgaatagttgaacataactggtttgagaccttcattgttttcatgattctccttagtagtggtgctctggcatttgaagatatatatattgatcagcgaaagacgattaagacgatgttggaatatgctgacaaggttttcacttacattttcattctggaaatgcttctaaaatgggtggcatatggctatcaaacatatttcaccaatgcctggtgttggctggacttcttaattgttgatgtttcattggtcagtttaacagcaaatgccttgggttactcagaacttggagccatcaaatctctcaggacactaagagctctgagacctctaagagccttatctcgatttgaagggatgagggtggttgtgaatgcccttttaggagcaattccatccatcatgaatgtgcttctggtttgtcttatattctggctaattttcagcatcatgggcgtaaatttgtttgctggcaaattctaccactgtattaacaccacaactggtgacaggtttgacatcgaagacgtgaataatcatacngattgcctaaaactaatagaaagaaatgagactgctcgatggaaaaatgtgaaagtaaactttgataatgtaggatttgggtatctctctttgcttcaagttgccacattcaaaggatggatggatataatgtatgcagcagttgattccagaaatgtggaactccagcctaagtatgaagaaagtctgtacatgtatctttactttgttattttcatcatctttgggtccttcttcaccttgaacctgtttattggtgtcatcatagataatttcaaccagcagaaaaagaagtttggaggtcaagacatctttatgacagaagaacagaagaaatactataatgcaatgaaaaaattaggatcgaaaaaaccgcaaaagcctatacctcgaccaggaaacaantttcaaggaatggtctttgacntcgtaaccagacaagtttttgacataagcatcatgattctcatctgtcttaacatggtcacaatgatggtggaaacagatgaccagagtgaatatgtgactaccattttgtcacgcatcaatctggtgttcattgtgctatttactggagagtgtgtactgaaactcatctctctacgccattattattttaccattggatggaatatttttgattttgtggttgtcattctctccattgtaggtatgtttcttgccgagctgatagaaaagtatttcgtgtcccctaccctgttccgagtgatccgtcttgctaggattggccgaatcctacgtctgatcaaaggagcaaaggggatccgcacgctgctctttgctttgatgatgtcccttcctgcgttgtttaacatcggcctcctactcttcctagtcatgttcatctacgccatctttgggatgtccaactttgcctatgttaagagggaagttggnatcgatgacatgttcaactttgagacctttggcaacagcatgatctgcctattccaaattacaacctctgctggctgggatggattgctagcacccattctcaacagtaagccacccgactgtgaccctaataaagttaaccctggaagctcagttaagggngactgtgggaacccatctgttggaattttcttttttgtcagttacatcatcatatccttcctggttgtggtgaacatgtacatcgcggtcatcctggagaacttcagtgttgctactgaagaaagtgcagagcctctgagtgaggatgactttgagatgttctatgaggtttgggagaagtttgatcccgatgcaactcagttcatggaatttgaaaaattatctcagtttgcagctgcgcttgaaccgcctctcaatctgccacaaccaaacaaactccagctcattgccatggatttgcccatggtgagtggtgaccggatccactgtcttgatatcttatttgcttttacaaagcgggttctaggagagagtggagagatggatgctctacgaatacagatggaagagcgattcatggcttccaatccttccaaggtctcctatcagccaatcactactactttaaaacgaaaacaagaggaagtatctgctgtcattattcagcgtgcttacagacgccaccttttaaagcgaactgtaaaacaagcttcctttacgtacaataaaaacaaaatcaaaggtggggctaatcttcttataaaagaagacatgataattgacagaataaatgaaaactctattacagaaaaaactgatctgaccatgtccactgcagcttgtccaccttcctatgaccgggtgacaaagccaattgtggaaaaacatgagcaagaaggcaaagatgaaaaagccaaagggaaatnaatgaaaataaataaaaataattgggtgac

SEQ ID NO: 283089 - DNA, 775 bp, Homo sapiens
agaggccccatagatgacaggcccaggtgctttagttgggcaggacctgggagtcagtgaggaactcgccccgagaacagagaaaaggtaggcaaggagaggagatgctgatggcatctggaaacaagtcttagagatggtctgcacccagagggaataaggggagacatccccaactggaatgtgtcctggagcagctgcctgggaagaagtcctcgagtttcctcaaggtgggggacagaggtcaaggatgaggccgagctaaatggaagggcgacagtgaggcaggtgggctttaaggctgtggattcgtcatgctggcggctgccaggcactttcaggttccttggggcttgtaggggatggggacttgtcagtggaaagacgggagggatgatgtttttggacttcagtacgggtgtgatgtcccaggaagtgggtgtggctccccatcctgtatgaaataagcagtaaagcttgctcatggctgttgcacatctctgtgactcttgtttctggcaggccccactcctggcagctgagtgctgcacctgccttctcgatcacgagcctgagaactgcacgggggagcagcccagactggctggaaaccatgttttcagagtgcagggtcaagtggcgtgtaggactctgtcaaaagaatgacccctttccccaccacatacccacaactgcacaggttaaaacagaaatcttgtcattttataattgtaatccacgccgggtgcagtagctcacacctgtaatcccagca

SEQ ID NO: 283090 - DNA, 2100 bp, Homo sapiens
  misc_feature (747)..(747): n is a, c, g, or t
  misc_feature (1625)..(1625): n is a, c, g, or t
atacttacctggcaggggagataccatgatcacgaaggtggttttcccagggcgaggcttatccattgcactccggatgtgctgacccctgcgatttccccaaatgtgggaaactcgactgcataatttgtggtagtgggggactgcgttcgcgctttcccctccgagagatctgagcccgacagccccctgtccagctgcggccacagccagcctccttgcctccatttcccgaattgcccaggaccccagctctgtgtccccaggaggcactgggggccagaagctggcccagctcccagaacttgcttctgccgagatgagtctccatgtcatctacctgcaccagcttcaccagcagcagcagcagcaggagccgtggggtgaggctgcagcctccatcctgtccaggccctgctccagcccctcacagccaccctcgcctgatgaggagaagccatcctggtcaagtgacggctccagtcctgcctctagccccagacaacagtggggaacccagaaggcccggaatctgttccccggagggtttcaggtgaccacagacacccagaaggagcctgaccgggcctcttgcactgactgagacgactcctcagggccccactcctggcagctgagtgctgcacctgccttctcgatcacgagcctgagaactgcacgggggagcagcccagactggctggaaaccatgttttcagagtgcagggtcaagtggcgtcctctggncagatgtgagaaggcaccacctcaagaggggaggagcggggctgatcctggtcgggcggacctgagtcgggcagccgctctcccggaactggaagggaaagccaggcggctctcaggggctgttggtgtctgagccgggagggtcgaacgcccagggcactgcgccccgcaactgacgctcctgcaaggaaaagctctggcacgccgatgacgtcgccggcctcgtccagctccatgtcgccctccgtcgccaggatgcgctgcacggtctgcaggacgttggttgccatggtaacatcgccgcagacaaacatgtggccccgctcgaggcacagcacgcggtgcacctccgcagccagctccgtcctcaggatgtcctgcacgttaccattgcgccctcagggtctcacaccttggggttgtcaggttcccgggagaaggcggtgaggactcggccaaacaccccgcgctgctgggcgttctgcacctcgtcgcggtagagatggtcaagttgggagcatcggcagccgaacaccaaagtcatgggagtgggctgcagccctgcaagcaaccccgcgcttgggaaggctcttctccggggcacagtgctagtggggcctccccacaggccaccgtcgcccagcctggcagcccagcgttttgggctgaaaccaccattactttggctgtttcatctctaagagagtgtagaatgctttcacagagaccctgcacagccctgatttacagagggaagggaagcgcgggtgaggtggtggcccctggtggagctgcgctagaatgcgcggcttcggactcagaattccatgccctttgcattgtgtgacatcgcagtccccttccccgctcccacttcntattctcccatacttataactctcctcccagtcacagccctcttcttttgattgacagaccaccctgggcaccccatgctcaatatgaacaccttgtagcatccttaggtcttggacagacctcggtcagctctggcacagtcaagaatccaccttgggcagttcttctttgagtcttagccctaatccctttgaaaattctattttcctttgtcctcaatccagtcaacacctactatgtaccaggcaccaggaagccagaagctcagggcccagcccttgcctttggtacctgccctccccttggtctcatgagcgtcttttcagctttgtggactttgtttcctgccaaccaccattactttggctgtttcatctctaagagagtgtagaatgctttcacagagaccctgcacagccctgatttacagagggaagggaagcgcgggtgaggtggtggcccctggtggagctg

SEQ ID NO: 283091 - DNA, 2183 bp, Homo sapiens
  misc_feature (830)..(830): n is a, c, g, or t
  misc_feature (1708)..(1708): n is a, c, g, or t
cagcgtgcggaggacggcaagactgagctttctttgatgcggttctccctggcgcatccactctggcgccccccagggcacagctttaagtttcttgggcacctctggggccgagtacaacaagatgcagctgcctggggtgccacctcggctcgcggcccctccaccccgggggtgctcagcaactgcacctcgcccctgcctgaggccttcctggccaacctcttcgtgcaccctctcctgcctccgagagatctgagcccgacagccccctgtccagctgcggccacagccagcctccttgcctccatttcccgaattgcccaggaccccagctctgtgtccccaggaggcactgggggccagaagctggcccagctcccagaacttgcttctgccgagatgagtctccatgtcatctacctgcaccagcttcaccagcagcagcagcagcaggagccgtggggtgaggctgcagcctccatcctgtccaggccctgctccagcccctcacagccaccctcgcctgatgaggagaagccatcctggtcaagtgacggctccagtcctgcctctagccccagacaacagtggggaacccagaaggcccggaatctgttccccggagggtttcaggtgaccacagacacccagaaggagcctgaccgggcctcttgcactgactgagacgactcctcagggccccactcctggcagctgagtgctgcacctgccttctcgatcacgagcctgagaactgcacgggggagcagcccagactggctggaaaccatgttttcagagtgcagggtcaagtggcgtcctctggncagatgtgagaaggcaccacctcaagaggggaggagcggggctgatcctggtcgggcggacctgagtcgggcagccgctctcccggaactggaagggaaagccaggcggctctcaggggctgttggtgtctgagccgggagggtcgaacgcccagggcactgcgccccgcaactgacgctcctgcaaggaaaagctctggcacgccgatgacgtcgccggcctcgtccagctccatgtcgccctccgtcgccaggatgcgctgcacggtctgcaggacgttggttgccatggtaacatcgccgcagacaaacatgtggccccgctcgaggcacagcacgcggtgcacctccgcagccagctccgtcctcaggatgtcctgcacgttaccattgcgccctcagggtctcacaccttggggttgtcaggttcccgggagaaggcggtgaggactcggccaaacaccccgcgctgctgggcgttctgcacctcgtcgcggtagagatggtcaagttgggagcatcggcagccgaacaccaaagtcatgggagtgggctgcagccctgcaagcaaccccgcgcttgggaaggctcttctccggggcacagtgctagtggggcctccccacaggccaccgtcgcccagcctggcagcccagcgttttgggctgaaaccaccattactttggctgtttcatctctaagagagtgtagaatgctttcacagagaccctgcacagccctgatttacagagggaagggaagcgcgggtgaggtggtggcccctggtggagctgcgctagaatgcgcggcttcggactcagaattccatgccctttgcattgtgtgacatcgcagtccccttccccgctcccacttcntattctcccatacttataactctcctcccagtcacagccctcttcttttgattgacagaccaccctgggcaccccatgctcaatatgaacaccttgtagcatccttaggtcttggacagacctcggtcagctctggcacagtcaagaatccaccttgggcagttcttctttgagtcttagccctaatccctttgaaaattctattttcctttgtcctcaatccagtcaacacctactatgtaccaggcaccaggaagccagaagctcagggcccagcccttgcctttggtacctgccctccccttggtctcatgagcgtcttttcagctttgtggactttgtttcctgccaaccaccattactttggctgtttcatctctaagagagtgtagaatgctttcacagagaccctgcacagccctgatttacagagggaagggaagcgcgggtgaggtggtggcccctggtggagctg

SEQ ID NO: 283092 - DNA, 954 bp, Homo sapiens
cagcgtgcggaggacggcaagactgagctttctttgatgcggttctccctggcgcatccactctggcgccccccagggcacagctttaagtttcttgggcacctctggggccgagtacaacaagatgcagctgcctggggtgccacctcggctcgcggcccctccaccccgggggtgctcagcaactgcacctcgcccctgcctgaggccttcctggccaacctcttcgtgcaccctctcctgcctccgagagatctgagcccgacagccccctgtccagctgcggccacagccagcctccttgcctccatttcccgaattgcccaggaccccagctctgtgtccccaggaggcactgggggccagaagctggcccagctcccagaacttgcttctgccgagatgagtctccatgtcatctacctgcaccagcttcaccagcagcagcagcagcaggagccgtggggtgaggctgcagcctccatcctgtccaggccctgctccagcccctcacagccaccctcgcctgatgaggagaagccatcctggtcaagtgacggctccagtcctgcctctagccccagacaacagtggggaacccagaaggcccggaatctgttccccggagggtttcaggtgaccacagacacccagaaggagcctgaccgggcctcttgcactgactgagacgactcctcagggccccactcctggcagctgagtgctgcacctgccttctcgatcacgagcctgagaactgcacgggggagcagcccagactggctggaaaccatgttttcagagtgcagggtcaagtggcgtgtaggactctgtcaaaagaatgacccctttccccaccacatacccacaactgcacaggttaaaacagaaatcttgtcattttataattgtaatccacgccgggtgcagtagctcacacctgtaatcccagca

SEQ ID NO: 283093 - DNA, 2004 bp, Homo sapiens
  misc_feature (651)..(651): n is a, c, g, or t
  misc_feature (1529)..(1529): n is a, c, g, or t
agaggccccatagatgacaggcccaggtgctttagttgggcaggacctgggagtcagtgaggaactcgccccgagaacagagaaaaggtaggcaaggagaggagatgctgatggcatctggaaacaagtcttagagatggtctgcacccagagggaataaggggagacatccccaactggaatgtgtcctggagcagctgcctgggaagaagtcctcgagtttcctcaaggtgggggacagaggtcaaggatgaggccgagctaaatggaagggcgacagtgaggcaggtgggctttaaggctgtggattcgtcatgctggcggctgccaggcactttcaggttccttggggcttgtaggggatggggacttgtcagtggaaagacgggagggatgatgtttttggacttcagtacgggtgtgatgtcccaggaagtgggtgtggctccccatcctgtatgaaataagcagtaaagcttgctcatggctgttgcacatctctgtgactcttgtttctggcaggccccactcctggcagctgagtgctgcacctgccttctcgatcacgagcctgagaactgcacgggggagcagcccagactggctggaaaccatgttttcagagtgcagggtcaagtggcgtcctctggncagatgtgagaaggcaccacctcaagaggggaggagcggggctgatcctggtcgggcggacctgagtcgggcagccgctctcccggaactggaagggaaagccaggcggctctcaggggctgttggtgtctgagccgggagggtcgaacgcccagggcactgcgccccgcaactgacgctcctgcaaggaaaagctctggcacgccgatgacgtcgccggcctcgtccagctccatgtcgccctccgtcgccaggatgcgctgcacggtctgcaggacgttggttgccatggtaacatcgccgcagacaaacatgtggccccgctcgaggcacagcacgcggtgcacctccgcagccagctccgtcctcaggatgtcctgcacgttaccattgcgccctcagggtctcacaccttggggttgtcaggttcccgggagaaggcggtgaggactcggccaaacaccccgcgctgctgggcgttctgcacctcgtcgcggtagagatggtcaagttgggagcatcggcagccgaacaccaaagtcatgggagtgggctgcagccctgcaagcaaccccgcgcttgggaaggctcttctccggggcacagtgctagtggggcctccccacaggccaccgtcgcccagcctggcagcccagcgttttgggctgaaaccaccattactttggctgtttcatctctaagagagtgtagaatgctttcacagagaccctgcacagccctgatttacagagggaagggaagcgcgggtgaggtggtggcccctggtggagctgcgctagaatgcgcggcttcggactcagaattccatgccctttgcattgtgtgacatcgcagtccccttccccgctcccacttcntattctcccatacttataactctcctcccagtcacagccctcttcttttgattgacagaccaccctgggcaccccatgctcaatatgaacaccttgtagcatccttaggtcttggacagacctcggtcagctctggcacagtcaagaatccaccttgggcagttcttctttgagtcttagccctaatccctttgaaaattctattttcctttgtcctcaatccagtcaacacctactatgtaccaggcaccaggaagccagaagctcagggcccagcccttgcctttggtacctgccctccccttggtctcatgagcgtcttttcagctttgtggactttgtttcctgccaaccaccattactttggctgtttcatctctaagagagtgtagaatgctttcacagagaccctgcacagccctgatttacagagggaagggaagcgcgggtgaggtggtggcccctggtggagctg

SEQ ID NO: 283094 - DNA, 2893 bp, Homo sapiens
acggctaggtacgaggctgggtgttaattcggccgacctcagtcgctgggccagcctgcccggccccagcatgcgggaggcagccttcatgtacagcacagcagtggccatcttcctggtcatcctggtggccgcactgcagggctcggctccccgtgagagccccctcccctatcacatccccctggacccggaggggtccctggagctctcatggaatgtcagctacacccaggaggccatccatttccagctcctggtgcggaggctcaaggctggcgtcctgtttgggatgtccgaccgtggcgagcttgagaacgcagatctcgtggtgctctggaccgatggggacactgcctattttgcggacgcctggagtgaccagaaggggcagatccacctggatccccagcaggactaccagctgctgcaggtgcagaggaccccagaaggcctgaccctgcttttcaagaggccctttggcacctgcgaccccaaggattacctcattgaggacggcactgtccacttggtctacgggatcctggaggagccgttccggtcactggaggccatcaacggctcgggcctgcagatggggctgcagagggtgcagctcctgaagcccaatatccccgaaccggagttgccctcagacgcgtgcaccatggaggtccaagctcccaatatccagatccccagccaggagaccacgtactggtgctacattaaggagcttccaaagggcttctctcggcaccacattatcaagtacgagcccatcgtcaccaagggcaatgaggcccttgtccaccacatggaagtcttccagtgcgcccccgagatggacagcgtcccccacttcagcgggccctgcgactccaagatgaaacccgaccgcctcaactactgccgccacgtgctggccgcctgggccctgggtgccaaggcattttactacccagaggaagccggccttgccttcgggggtccagggtcctccagatatctccgcctggaagttcactaccacaacccactggtgatagaaggacgaaacgactcctcaggcatccgcttgtactacacagccaagctgcggcgcttcaacgcggggatcatggagctgggactggtgtacacgccagtgatggccattccaccacgggagaccgccttcatcctcactggctactgcacggacaagtgcacccagctggcactgcctccctccgggatccacatcttcgcctctcagctccacacacacctgactgggagaaaggtggtcacagtgctggtccgggacggccgggagtgggagatcgtgaaccaggacaatcactacagccctcacttccaggagatccgcatgttgaagaaggtcgtgtcggtccatccgggagatgtgctcatcacctcctgcacgtacaacacggaagaccgggagctggccacagtggggggcttcgggatcctggaggagatgtgtgtcaactacgtgcactactacccccagacgcagctggagctctgcaagagcgctgtggacgccggcttcctgcagaagtacttccacctcatcaacaggttcaacaacgaggatgtctgcacctgccctcaggcgtccgtgtctcagcagttcacctctgttccctggaactccttcaaccgcgacgtactgaaggccctgtacagcttcgcgcccatctccatgcactgcaacaagtcctcagccgtccgcttccagggtgaatggaacctgcagcccctgcccaaggtcatctccacactggaagagcccaccccacagtgccccaccagccagggccgaagccctgctggccccaccgttgtcagcattggtgggggcaaaggctgaggggggacctactcctccccctcctccatgctgtccctgtgggctcacaccggcactgtgcactctactctgcgacgatccccatggaacagccctgcacgcccaggatgaaggggccagaccacgcccctgcctgagaccacggtccaatccagccttcttcccccagggtcccctgcatggctgagagggtgtgggtgccctgttgacctaccctggaccgagtggaccacgacctcgtccatttaaacccggctgactcagtgcagggacagcctgcacagtggtccagggtccagccctccgccagccctgttccgcctcactgggtgtggcctggcttctgggacaggcaccatgctgggccggggtgtggaatcaccgggaacgcccccgcccccgccccgctgctcccggtgtgcagcgggtgcgggtgccgcttaaacatttccctgctgagtggctcgtgtttcacagtgggcggcttccctgcgacggaggcaggaccaggcatttagctagttagagactcgcctgggaaattgctccattcctgagtaaacagatattttcgcccacctaaagggaagccctgacaacaactatcaccaaaagacgaggcggcaaagatccagcggggcttctgggcgccggttccacgtggggtggaattattagcaccagcttgcttctctgccggtggggccagcgctgaacagaccggggtggagtcagggctgtgctttccgcgtggttctgccacttagggagtgtgccttgggcgggccatttcacattcctgaccctcacttttctcatctgtaaaaccaggctgatgccgtgcgggctaatgagccaataaagctcacacttgggctggcacccactggaggtgggtatgtttgcactccgggccgtcgctccaggagagagaagcttgctcctgagcctcctccctgtgccaggcgtggtaccaagtgcttccccctgagcgtcctgaagctgcctcag

SEQ ID NO: 283095 - DNA, 2293 bp, Homo sapiens
  misc_feature (5)..(5): n is a, c, g, or t
agggnaaacaattgcaggtcgaggctggtgtaatcggacgaggcgcctcagtcgctgggccagcctgcccggccccagcatgcgggaggcagccttcatgtacagcacagcagtggccatcttcctggtcatcctggtggccgcactgcagggctcggctccccgtgagagccccctcccctatcacatccccctggacccggaggggtccctggagctctcatggaatgtcagctacacccaggaggccatccatttccagctcctggtgcggaggctcaaggctggcgtcctgtttgggatgtccgaccgtggcgagcttgagaacgcagatctcgtggtgctctggaccgatggggacactgcctattttgcggacgcctggagtgaccagaaggggcagatccacctggatccccagcaggactaccagctgctgcaggtgcagaggaccccagaaggcctgaccctgcttttcaagaggccctttggcacctgcgaccccaaggattacctcattgaggacggcactgtccacttggtctacgggatcctggaggagccgttccggtcactggaggccatcaacggctcgggcctgcagatggggctgcagagggtgcagctcctgaagcccaatatccccgaaccggagttgccctcagacgcgtgcaccatggaggtccaagctcccaatatccagatccccagccaggagaccacgtactggtgctacattaaggagcttccaaagggcttctctcggcaccacattatcaagtacgagcccatcgtcaccaagggcaatgaggcccttgtccaccacatggaagtcttccagtgcgcccccgagatggacagcgggggcttcgggatcctggaggagatgtgtgtcaactacgtgcactactacccccagacgcagctggagctctgcaagagcgctgtggacgccggcttcctgcagaagtacttccacctcatcaacaggttcaacaacgaggatgtctgcacctgccctcaggcgtccgtgtctcagcagttcacctctgttccctggaactccttcaaccgcgacgtactgaaggccctgtacagcttcgcgcccatctccatgcactgcaacaagtcctcagccgtccgcttccagggtgaatggaacctgcagcccctgcccaaggtcatctccacactggaagagcccaccccacagtgccccaccagccagggccgaagccctgctggccccaccgttgtcagcattggtgggggcaaaggctgaggggggacctactcctccccctcctccatgctgtccctgtgggctcacaccggcactgtgcactctactctgcgacgatccccatggaacagccctgcacgcccaggatgaaggggccagaccacgcccctgcctgagaccacggtccaatccagccttcttcccccagggtcccctgcatggctgagagggtgtgggtgccctgttgacctaccctggaccgagtggaccacgacctcgtccatttaaacccggctgactcagtgcagggacagcctgcacagtggtccagggtccagccctccgccagccctgttccgcctcactgggtgtggcctggcttctgggacaggcaccatgctgggccggggtgtggaatcaccgggaacgcccccgcccccgccccgctgctcccggtgtgcagcgggtgcgggtgccgcttaaacatttccctgctgagtggctcgtgtttcacagtgggcggcttccctgcgacggaggcaggaccaggcatttagctagttagagactcgcctgggaaattgctccattcctgagtaaacagatattttcgcccacctaaagggaagccctgacaacaactatcaccaaaagacgaggcggcaaagatccagcggggcttctgggcgccggttccacgtggggtggaattattagcaccagcttgcttctctgccggtggggccagcgctgaacagaccggggtggagtcagggctgtgctttccgcgtggttctgccacttagggagtgtgccttgggcgggccatttcacattcctgaccctcacttttctcatctgtaaaaccaggctgatgccgtgcgggctaatgagccaataaagctcacacttgggctggcacccactggaggtgggtatgtttgcactccgggccgtcgctccaggagagagaagcttgctcctgagcctcctccctgtgccaggcgtggtaccaagtgcttccccctgagcgtcctgaagctgcctcag

SEQ ID NO: 283096 - DNA, 2902 bp, Homo sapiens
  misc_feature (5)..(5): n is a, c, g, or t
agggnaaacaattgcaggtcgaggctggtgtaatcggacgaggcgcctcagtcgctgggccagcctgcccggccccagcatgcgggaggcagccttcatgtacagcacagcagtggccatcttcctggtcatcctggtggccgcactgcagggctcggctccccgtgagagccccctcccctatcacatccccctggacccggaggggtccctggagctctcatggaatgtcagctacacccaggaggccatccatttccagctcctggtgcggaggctcaaggctggcgtcctgtttgggatgtccgaccgtggcgagcttgagaacgcagatctcgtggtgctctggaccgatggggacactgcctattttgcggacgcctggagtgaccagaaggggcagatccacctggatccccagcaggactaccagctgctgcaggtgcagaggaccccagaaggcctgaccctgcttttcaagaggccctttggcacctgcgaccccaaggattacctcattgaggacggcactgtccacttggtctacgggatcctggaggagccgttccggtcactggaggccatcaacggctcgggcctgcagatggggctgcagagggtgcagctcctgaagcccaatatccccgaaccggagttgccctcagacgcgtgcaccatggaggtccaagctcccaatatccagatccccagccaggagaccacgtactggtgctacattaaggagcttccaaagggcttctctcggcaccacattatcaagtacgagcccatcgtcaccaagggcaatgaggcccttgtccaccacatggaagtcttccagtgcgcccccgagatggacagcgtcccccacttcagcgggccctgcgactccaagatgaaacccgaccgcctcaactactgccgccacgtgctggccgcctgggccctgggtgccaaggcattttactacccagaggaagccggccttgccttcgggggtccagggtcctccagatatctccgcctggaagttcactaccacaacccactggtgatagaaggacgaaacgactcctcaggcatccgcttgtactacacagccaagctgcggcgcttcaacgcggggatcatggagctgggactggtgtacacgccagtgatggccattccaccacgggagaccgccttcatcctcactggctactgcacggacaagtgcacccagctggcactgcctccctccgggatccacatcttcgcctctcagctccacacacacctgactgggagaaaggtggtcacagtgctggtccgggacggccgggagtgggagatcgtgaaccaggacaatcactacagccctcacttccaggagatccgcatgttgaagaaggtcgtgtcggtccatccgggagatgtgctcatcacctcctgcacgtacaacacggaagaccgggagctggccacagtggggggcttcgggatcctggaggagatgtgtgtcaactacgtgcactactacccccagacgcagctggagctctgcaagagcgctgtggacgccggcttcctgcagaagtacttccacctcatcaacaggttcaacaacgaggatgtctgcacctgccctcaggcgtccgtgtctcagcagttcacctctgttccctggaactccttcaaccgcgacgtactgaaggccctgtacagcttcgcgcccatctccatgcactgcaacaagtcctcagccgtccgcttccagggtgaatggaacctgcagcccctgcccaaggtcatctccacactggaagagcccaccccacagtgccccaccagccagggccgaagccctgctggccccaccgttgtcagcattggtgggggcaaaggctgaggggggacctactcctccccctcctccatgctgtccctgtgggctcacaccggcactgtgcactctactctgcgacgatccccatggaacagccctgcacgcccaggatgaaggggccagaccacgcccctgcctgagaccacggtccaatccagccttcttcccccagggtcccctgcatggctgagagggtgtgggtgccctgttgacctaccctggaccgagtggaccacgacctcgtccatttaaacccggctgactcagtgcagggacagcctgcacagtggtccagggtccagccctccgccagccctgttccgcctcactgggtgtggcctggcttctgggacaggcaccatgctgggccggggtgtggaatcaccgggaacgcccccgcccccgccccgctgctcccggtgtgcagcgggtgcgggtgccgcttaaacatttccctgctgagtggctcgtgtttcacagtgggcggcttccctgcgacggaggcaggaccaggcatttagctagttagagactcgcctgggaaattgctccattcctgagtaaacagatattttcgcccacctaaagggaagccctgacaacaactatcaccaaaagacgaggcggcaaagatccagcggggcttctgggcgccggttccacgtggggtggaattattagcaccagcttgcttctctgccggtggggccagcgctgaacagaccggggtggagtcagggctgtgctttccgcgtggttctgccacttagggagtgtgccttgggcgggccatttcacattcctgaccctcacttttctcatctgtaaaaccaggctgatgccgtgcgggctaatgagccaataaagctcacacttgggctggcacccactggaggtgggtatgtttgcactccgggccgtcgctccaggagagagaagcttgctcctgagcctcctccctgtgccaggcgtggtaccaagtgcttccccctgagcgtcctgaagctgcctcag

SEQ ID NO: 283097 - DNA, 2959 bp, Homo sapiens
  misc_feature (5)..(5): n is a, c, g, or t
agggnaaacaattgcaggtcgaggctggtgtaatcggacgaggcgcctcagtcgctgggccagcctgcccggccccagcatgcgggaggcagccttcatgtacagcacagcagtggccatcttcctggtcatcctggtggccgcactgcagggctcggctccccgtgagagccccctcccctatcacatccccctggacccggaggggtccctggagctctcatggaatgtcagctacacccaggaggccatccatttccagctcctggtgcggaggctcaaggctggcgtcctgtttgggatgtccgaccgtggcgagcttgagaacgcagatctcgtggtgctctggaccgatggggacactgcctattttgcggacgcctggagtgaccagaaggggcagatccacctggatccccagcaggactaccagctgctgcaggtgcagaggaccccagaaggcctgaccctgcttttcaagaggccctttggcacctgcgaccccaaggattacctcattgaggacggcactgtccacttggtctacgggatcctggaggagccgttccggtcactggaggccatcaacggctcgggcctgcagatggggctgcagagggtgcagctcctgaagcccaatatccccgaaccggagttgccctcagacgcgtgcaccatggaggtccaagctcccaatatccagatccccagccaggagaccacgtactggtgctacattaaggagcttccaaagggcttctctcggcaccacattatcaagtacgagcccatcgtcaccaagggcaatgaggcccttgtccaccacatggaagtcttccagtgcgcccccgagatggacagcgtcccccacttcagcgggccctgcgactccaagatgaaacccgaccgcctcaactactgccgccacgtgctggccgcctgggccctgggtgccaaggcattttactacccagaggaagccggccttgccttcgggggtccagggtcctccagatatctccgcctggaagttcactaccacaacccactggtgatagaaggacgaaacgactcctcaggcatccgcttgtactacacagccaagctgcggcgcttcaacgcggggatcatggagctgggactggtgtacacgccagtgatggccattccaccacgggagaccgccttcatcctcactggctactgcacggacaagtgcacccagctggcactgcctccctccgggatccacatcttcgcctctcagctccacacacacctgactgggagaaaggtggtcacagtgctggtccgggacggccgggagtgggagatcgtgaaccaggacaatcactacagccctcacttccaggagatccgcatgttgaagaaggtcgtgtcggtccatccgggagatgtgctcatcacctcctgcacgtacaacacggaagaccgggagctggccacagtggggggcttcgggatcctggaggagatgtgtgtcaactacgtgcactactacccccagacgcagctggagctctgcaagagcgctgtggacgccggcttcctgcagaagtacttccacctcatcaacagagcctcctcaacccagcctgcagcagccattacccacccgccaaggtgacaggagaggttcaacaacgaggatgtctgcacctgccctcaggcgtccgtgtctcagcagttcacctctgttccctggaactccttcaaccgcgacgtactgaaggccctgtacagcttcgcgcccatctccatgcactgcaacaagtcctcagccgtccgcttccagggtgaatggaacctgcagcccctgcccaaggtcatctccacactggaagagcccaccccacagtgccccaccagccagggccgaagccctgctggccccaccgttgtcagcattggtgggggcaaaggctgaggggggacctactcctccccctcctccatgctgtccctgtgggctcacaccggcactgtgcactctactctgcgacgatccccatggaacagccctgcacgcccaggatgaaggggccagaccacgcccctgcctgagaccacggtccaatccagccttcttcccccagggtcccctgcatggctgagagggtgtgggtgccctgttgacctaccctggaccgagtggaccacgacctcgtccatttaaacccggctgactcagtgcagggacagcctgcacagtggtccagggtccagccctccgccagccctgttccgcctcactgggtgtggcctggcttctgggacaggcaccatgctgggccggggtgtggaatcaccgggaacgcccccgcccccgccccgctgctcccggtgtgcagcgggtgcgggtgccgcttaaacatttccctgctgagtggctcgtgtttcacagtgggcggcttccctgcgacggaggcaggaccaggcatttagctagttagagactcgcctgggaaattgctccattcctgagtaaacagatattttcgcccacctaaagggaagccctgacaacaactatcaccaaaagacgaggcggcaaagatccagcggggcttctgggcgccggttccacgtggggtggaattattagcaccagcttgcttctctgccggtggggccagcgctgaacagaccggggtggagtcagggctgtgctttccgcgtggttctgccacttagggagtgtgccttgggcgggccatttcacattcctgaccctcacttttctcatctgtaaaaccaggctgatgccgtgcgggctaatgagccaataaagctcacacttgggctggcacccactggaggtgggtatgtttgcactccgggccgtcgctccaggagagagaagcttgctcctgagcctcctccctgtgccaggcgtggtaccaagtgcttccccctgagcgtcctgaagctgcctcag

SEQ ID NO: 283098 - DNA, 632 bp, Homo sapiens
ccacctcggcctcccaaagtgctaggattacactgtgagccactgcgcccagccttcaagagccccctttctttgagaagtttcttcagaagttatccatatagtagtacagacctagccattatagcacaccatcctctactatctaatgcattgatgcccagccttaagaagtctgaatattgtacgttttggggggagtcctccatgctgcctggaacagggaggagcacattgtcatgagtcgatcagaatggatcgctgatcggttcattgcctctctctctgctgcaggaggaaggatctcaggaagtcaccagcatctcacctctccaggtgggcaattaacgatggcgagggcacaccctcacccctgagcgtgccttctgcaccagcatattgcttgttggcatttttgatcaagagacttaacagactgctgagaaatttgtacctggtttttatttgttaaaataatattacgtacaaattttacaaactcatctgtgtttctcccacctaacagaacagcttttattttccgtgcatccttccagttcatccataggcatatatgtatgtatttacccatggttgtaatcttcatcgtcgcatgcatgcatgcaatttgg

SEQ ID NO: 283099 - DNA, 413 bp, Homo sapiens
gcgcgaattcgcgtcttcgtgcggaatacgtcagaggtcgtgccaggaattcgtcgtcgtggtatgtgccagcttttctcctttttcctttgaaaaacgatgcccctgcttgtggtcaggatcttccttggatatcttagggggcttgccctgtgctttatattaagtcctgacttctttccggttcaccttagcttggctattagtgtctacctcatttccgaaacctccacaagattgatattgtaattcctcttaaccttcttccactgtgtttatggtaaatatgccagaccactcaactgtagtagtagaaaaggtattgaggttacagtgctgaagcttgttgtgtgtcctgctgtgtcctacaaaaatgttgcattctagagaatgaaaccccagagcactctgga

SEQ ID NO: 283100 - DNA, 2774 bp, Homo sapiens
  misc_feature (2238)..(2238): n is a, c, g, or t
  misc_feature (2695)..(2695): n is a, c, g, or t
gatggtgccactgcgcagccgcgagagggcggtaccacggcggcagcgacatgggggggcgcggagcagacgccggaagtagtggtggtacgggtccgactgaggggtactcgccaccggctgcgtccacccgagcggctgcgagagccaaggcccgagggggtgggcgtggcggccgccgaaacacaaccccctctgttccctctcttcgcggagcggcgccgcgtagcttccatccgccagctgccatgagcgagcgcctccgtcccaggaaaaggagaaggaatggcaacgaagaagacaaccatcttcccccccagaccaaaagaagtagcagaaaccctgtctttcaggattcctgggacacagagtcttcaggcagtgacagtggtgggagcagcagcagcagcagcagcagcatcaacagcccggacagggccagcgggccggaaggcagcttgagccagaccatggccggatccagccctaacacgcctcagcccgtgcccgagcagtccgcgctgtgccaaggcctctacttccacatcaaccagaccctgagggaggcccacttccacagcctacagcaccgagggcggcctctgacatgatgtgccggcagtttcttgccttctgtgaagggacagcgctgtgcagatttgatatttcaacttacaacttgttttaaaagaaaaattgcacacgaaaaatgcctgttggcttttcagtctatatttgaaataacaggttaacaggcagttgtttacttgtggttttgctgcactattgcaatttcaaaggggctttgaagcaattttttataggattcttttgagggagggtatcaaatctatgtcaaggtagtggtttgaggaaaactcattctgtgtgttgaatccatagtatgtcccattcagactgatttccaaatctgtcaactagaaactctactttatgtaaagggccttttaaaaatgcgggatcttcaattttttttattcaataaactagtaaagagtatctagtttccatgaaaaaacataagtttttttccaaaatataggaagcttgattcagtcttgcactgaaattaactgccatactacctctcagtatgtagatgttctattgaaagtactctctcctgtgtaacaggagaacaatcagatccaattcagactgtcagtgaagcacactccctaataatagtctctactctttgttatatatttgtatttccagagagaatgtcttttagattcttgtatacccagataacttctgtgtcactattccaccagagtctgcacctcagactttagtaggaaacatggcacagttctgcaagtaaagtaatatgtaatgactttttgtcctacaaacttggtcagtcagcagcttacatgatctcattgacaattccaccttgtagtgtcaacaattaaggtgttgttgaacgctgataaaatgtaagctacctgaactgatgtctaaagcaacaagtattgtgaaattttgggacaaggattaacttgatgcttaaagtaacccccaacagtaactagggggccacattccatcagtgaaactggaaagattggtgtggctgagaatcagatgagcagaggcacctttagaagaaataatgtggtagtatttatttagggagagacagatgtgttgccatgttacttagtcatactagagagccagccaagtttgaataatgaaggtgcagacgtgttgtcttcttcactgacaagctgtctgaacaaggagccaggaactgtcgggtcaccagctgtggagcgtgccggggggacaacctgccattggatgtagagaaaagtgccttagagttggcctgagccctcctgcccactcgccctccgcgcgacgccactcggagtccacacggcacacacaagcggagctgagaagcacgatggctctagtcagaggactttgctgtcggtccagatttgaagaggacacggaacagcatgagcctttgtgacaaaactagaatttggaaatgaggactgtcttgggaaaagggtagacacaggcacttctctccacagcctgctaacctaatgtgggcagaactgaaagatcactgcagtggaaactgttctggaagaggctgcaacatagcccatgcttagggactggatggtttttgcaagagctttttttttttttaaactaccatctcccaacttttaaagccagatncttgacaaggattttagatcttaatgggttcgatggtagggaatacggaaaggatacactgctaatattgtgtctaacaataaagcaaacaactcgatgctgtaagaagacaagctgtttgagctttcaaacacacatgcacacagcacaattcagaaatacccaggaggattcctgcaggcttaacagttggcatcgtactgaaatgaaacgtgtattaacaagaaaatgtcaaacttttggggaaacaaattttctgttacttcccacccaactaaaagggaagataaaaccatcatcaccagaacaaaacagattttctccaaacaagtacaatgatagtgccgggttggcagttaactctttcaccctactaaattcaagagctcatctccaccctgtcctgtatattttctacatttctattaagaggctacttggtagtgtcagcgggcancttttacaccttctagtagctcaagctagtaaaaccttgtacttctctattgcgccgccattaaaagcagcattagtgc

SEQ ID NO: 283101 - DNA, 2837 bp, Homo sapiens
  misc_feature (2301)..(2301): n is a, c, g, or t
  misc_feature (2758)..(2758): n is a, c, g, or t
gatggtgccactgcgcagccgcgagagggcggtaccacggcggcagcgacatgggggggcgcggagcagacgccggaagtagtggtggtacgggtccgactgaggggtactcgccaccggctgcgtccacccgagcggctgcgagagccaaggcccgagggggtgggcgtggcggccgccgaaacacaaccccctctgttccctctcttcgcggagcggcgccgcgtagcttccatccgccagctgccatgagcgagcgcctccgtcccaggaaaaggagaaggaatggcaacgaagaagacaaccatcttcccccccagaccaaaagaagtagcagaaaccctgtctttcaggattcctgggacacagagacagtacctgtaatgagaaacagtaaagaaaacagactaagaggaaacaaagcgttctgcgcgtcttcaggcagtgacagtggtgggagcagcagcagcagcagcagcagcatcaacagcccggacagggccagcgggccggaaggcagcttgagccagaccatggccggatccagccctaacacgcctcagcccgtgcccgagcagtccgcgctgtgccaaggcctctacttccacatcaaccagaccctgagggaggcccacttccacagcctacagcaccgagggcggcctctgacatgatgtgccggcagtttcttgccttctgtgaagggacagcgctgtgcagatttgatatttcaacttacaacttgttttaaaagaaaaattgcacacgaaaaatgcctgttggcttttcagtctatatttgaaataacaggttaacaggcagttgtttacttgtggttttgctgcactattgcaatttcaaaggggctttgaagcaattttttataggattcttttgagggagggtatcaaatctatgtcaaggtagtggtttgaggaaaactcattctgtgtgttgaatccatagtatgtcccattcagactgatttccaaatctgtcaactagaaactctactttatgtaaagggccttttaaaaatgcgggatcttcaattttttttattcaataaactagtaaagagtatctagtttccatgaaaaaacataagtttttttccaaaatataggaagcttgattcagtcttgcactgaaattaactgccatactacctctcagtatgtagatgttctattgaaagtactctctcctgtgtaacaggagaacaatcagatccaattcagactgtcagtgaagcacactccctaataatagtctctactctttgttatatatttgtatttccagagagaatgtcttttagattcttgtatacccagataacttctgtgtcactattccaccagagtctgcacctcagactttagtaggaaacatggcacagttctgcaagtaaagtaatatgtaatgactttttgtcctacaaacttggtcagtcagcagcttacatgatctcattgacaattccaccttgtagtgtcaacaattaaggtgttgttgaacgctgataaaatgtaagctacctgaactgatgtctaaagcaacaagtattgtgaaattttgggacaaggattaacttgatgcttaaagtaacccccaacagtaactagggggccacattccatcagtgaaactggaaagattggtgtggctgagaatcagatgagcagaggcacctttagaagaaataatgtggtagtatttatttagggagagacagatgtgttgccatgttacttagtcatactagagagccagccaagtttgaataatgaaggtgcagacgtgttgtcttcttcactgacaagctgtctgaacaaggagccaggaactgtcgggtcaccagctgtggagcgtgccggggggacaacctgccattggatgtagagaaaagtgccttagagttggcctgagccctcctgcccactcgccctccgcgcgacgccactcggagtccacacggcacacacaagcggagctgagaagcacgatggctctagtcagaggactttgctgtcggtccagatttgaagaggacacggaacagcatgagcctttgtgacaaaactagaatttggaaatgaggactgtcttgggaaaagggtagacacaggcacttctctccacagcctgctaacctaatgtgggcagaactgaaagatcactgcagtggaaactgttctggaagaggctgcaacatagcccatgcttagggactggatggtttttgcaagagctttttttttttttaaactaccatctcccaacttttaaagccagatncttgacaaggattttagatcttaatgggttcgatggtagggaatacggaaaggatacactgctaatattgtgtctaacaataaagcaaacaactcgatgctgtaagaagacaagctgtttgagctttcaaacacacatgcacacagcacaattcagaaatacccaggaggattcctgcaggcttaacagttggcatcgtactgaaatgaaacgtgtattaacaagaaaatgtcaaacttttggggaaacaaattttctgttacttcccacccaactaaaagggaagataaaaccatcatcaccagaacaaaacagattttctccaaacaagtacaatgatagtgccgggttggcagttaactctttcaccctactaaattcaagagctcatctccaccctgtcctgtatattttctacatttctattaagaggctacttggtagtgtcagcgggcancttttacaccttctagtagctcaagctagtaaaaccttgtacttctctattgcgccgccattaaaagcagcattagtgc

SEQ ID NO: 283102 - DNA, 2736 bp, Homo sapiens
  misc_feature (2200)..(2200): n is a, c, g, or t
  misc_feature (2657)..(2657): n is a, c, g, or t
gatggtgccactgcgcagccgcgagagggcggtaccacggcggcagcgacatgggggggcgcggagcagacgccggaagtagtggtggtacgggtccgactgaggggtactcgccaccggctgcgtccacccgagcggctgcgagagccaaggcccgagggggtgggcgtggcggccgccgaaacacaaccccctctgttccctctcttcgcggagcggcgccgcgtagcttccatccgccagctgccatgagcgagcgcctccgtcccaggaaaaggagaaggaatggcaacgaagaagacaaccatcttcccccccagaccaaaagaagtagcagaaaccctgtctttcaggattcctgggacacagagacagtacctgtaatgagaaacagtaaagaaaacagactaagaggaaacaaagcgttctgcgcgtcttcaggcagtgacagtggtgggagcagcagcagcagcagcagcagcatcaacagcccggacagggccagcgggccggaaggcagcttgagccagaccatggccggatccagccctaacacgcctcagcccgtgcccgagcagtccgcgctgtgccaaggcctctacttccacatcaaccagaccctgagggaggcccacttccacagcctacagcaccgagggcggcctctgacatgatgtgccggcagtttcttgccttctgtgaagggacagcgctgtgcagatttgatatttcaacttacaacttgttttaaaagaaaaattgcacacgaaaaatgcctgttggcttttcagtctatatttgaaataacaggttaacaggcagttgtttacttgtggttttgctgcactattgcaatttcaaaggggctttgaagcaattttttataggattcttttgagggagggtatcaaatctatgtcaaggtagtggtttgaggaaaactcattctgtgtgttgaatccatagtatgtcccattcagactgatttccaaatctgtcaactagaaactctatccaaaatataggaagcttgattcagtcttgcactgaaattaactgccatactacctctcagtatgtagatgttctattgaaagtactctctcctgtgtaacaggagaacaatcagatccaattcagactgtcagtgaagcacactccctaataatagtctctactctttgttatatatttgtatttccagagagaatgtcttttagattcttgtatacccagataacttctgtgtcactattccaccagagtctgcacctcagactttagtaggaaacatggcacagttctgcaagtaaagtaatatgtaatgactttttgtcctacaaacttggtcagtcagcagcttacatgatctcattgacaattccaccttgtagtgtcaacaattaaggtgttgttgaacgctgataaaatgtaagctacctgaactgatgtctaaagcaacaagtattgtgaaattttgggacaaggattaacttgatgcttaaagtaacccccaacagtaactagggggccacattccatcagtgaaactggaaagattggtgtggctgagaatcagatgagcagaggcacctttagaagaaataatgtggtagtatttatttagggagagacagatgtgttgccatgttacttagtcatactagagagccagccaagtttgaataatgaaggtgcagacgtgttgtcttcttcactgacaagctgtctgaacaaggagccaggaactgtcgggtcaccagctgtggagcgtgccggggggacaacctgccattggatgtagagaaaagtgccttagagttggcctgagccctcctgcccactcgccctccgcgcgacgccactcggagtccacacggcacacacaagcggagctgagaagcacgatggctctagtcagaggactttgctgtcggtccagatttgaagaggacacggaacagcatgagcctttgtgacaaaactagaatttggaaatgaggactgtcttgggaaaagggtagacacaggcacttctctccacagcctgctaacctaatgtgggcagaactgaaagatcactgcagtggaaactgttctggaagaggctgcaacatagcccatgcttagggactggatggtttttgcaagagctttttttttttttaaactaccatctcccaacttttaaagccagatncttgacaaggattttagatcttaatgggttcgatggtagggaatacggaaaggatacactgctaatattgtgtctaacaataaagcaaacaactcgatgctgtaagaagacaagctgtttgagctttcaaacacacatgcacacagcacaattcagaaatacccaggaggattcctgcaggcttaacagttggcatcgtactgaaatgaaacgtgtattaacaagaaaatgtcaaacttttggggaaacaaattttctgttacttcccacccaactaaaagggaagataaaaccatcatcaccagaacaaaacagattttctccaaacaagtacaatgatagtgccgggttggcagttaactctttcaccctactaaattcaagagctcatctccaccctgtcctgtatattttctacatttctattaagaggctacttggtagtgtcagcgggcancttttacaccttctagtagctcaagctagtaaaaccttgtacttctctattgcgccgccattaaaagcagcattagtgc

SEQ ID NO: 283103 - DNA, 2468 bp, Homo sapiens
  misc_feature (44)..(45): n is a, c, g, or t
  misc_feature (1932)..(1932): n is a, c, g, or t
  misc_feature (2389)..(2389): n is a, c, g, or t
tgtgcgcgcggcaaccgcgcctccctacgcccagcgcgcggagnncagtggttttatacttacactcttcaggcagtgacagtggtgggagcagcagcagcagcagcagcagcatcaacagcccggacagggccagcgggccggaaggcagcttgagccagaccatggccggatccagccctaacacgcctcagcccgtgcccgagcagtccgcgctgtgccaaggcctctacttccacatcaaccagaccctgagggaggcccacttccacagcctacagcaccgagggcggcctctgacatgatgtgccggcagtttcttgccttctgtgaagggacagcgctgtgcagatttgatatttcaacttacaacttgttttaaaagaaaaattgcacacgaaaaatgcctgttggcttttcagtctatatttgaaataacaggttaacaggcagttgtttacttgtggttttgctgcactattgcaatttcaaaggggctttgaagcaattttttataggattcttttgagggagggtatcaaatctatgtcaaggtagtggtttgaggaaaactcattctgtgtgttgaatccatagtatgtcccattcagactgatttccaaatctgtcaactagaaactctactttatgtaaagggccttttaaaaatgcgggatcttcaattttttttattcaataaactagtaaagagtatctagtttccatgaaaaaacataagtttttttccaaaatataggaagcttgattcagtcttgcactgaaattaactgccatactacctctcagtatgtagatgttctattgaaagtactctctcctgtgtaacaggagaacaatcagatccaattcagactgtcagtgaagcacactccctaataatagtctctactctttgttatatatttgtatttccagagagaatgtcttttagattcttgtatacccagataacttctgtgtcactattccaccagagtctgcacctcagactttagtaggaaacatggcacagttctgcaagtaaagtaatatgtaatgactttttgtcctacaaacttggtcagtcagcagcttacatgatctcattgacaattccaccttgtagtgtcaacaattaaggtgttgttgaacgctgataaaatgtaagctacctgaactgatgtctaaagcaacaagtattgtgaaattttgggacaaggattaacttgatgcttaaagtaacccccaacagtaactagggggccacattccatcagtgaaactggaaagattggtgtggctgagaatcagatgagcagaggcacctttagaagaaataatgtggtagtatttatttagggagagacagatgtgttgccatgttacttagtcatactagagagccagccaagtttgaataatgaaggtgcagacgtgttgtcttcttcactgacaagctgtctgaacaaggagccaggaactgtcgggtcaccagctgtggagcgtgccggggggacaacctgccattggatgtagagaaaagtgccttagagttggcctgagccctcctgcccactcgccctccgcgcgacgccactcggagtccacacggcacacacaagcggagctgagaagcacgatggctctagtcagaggactttgctgtcggtccagatttgaagaggacacggaacagcatgagcctttgtgacaaaactagaatttggaaatgaggactgtcttgggaaaagggtagacacaggcacttctctccacagcctgctaacctaatgtgggcagaactgaaagatcactgcagtggaaactgttctggaagaggctgcaacatagcccatgcttagggactggatggtttttgcaagagctttttttttttttaaactaccatctcccaacttttaaagccagatncttgacaaggattttagatcttaatgggttcgatggtagggaatacggaaaggatacactgctaatattgtgtctaacaataaagcaaacaactcgatgctgtaagaagacaagctgtttgagctttcaaacacacatgcacacagcacaattcagaaatacccaggaggattcctgcaggcttaacagttggcatcgtactgaaatgaaacgtgtattaacaagaaaatgtcaaacttttggggaaacaaattttctgttacttcccacccaactaaaagggaagataaaaccatcatcaccagaacaaaacagattttctccaaacaagtacaatgatagtgccgggttggcagttaactctttcaccctactaaattcaagagctcatctccaccctgtcctgtatattttctacatttctattaagaggctacttggtagtgtcagcgggcancttttacaccttctagtagctcaagctagtaaaaccttgtacttctctattgcgccgccattaaaagcagcattagtgc

SEQ ID NO: 283104 - DNA, 347 bp, Homo sapiens
gttcagaaatcgttttgacagcacataattcttaaatagagtacatgcaaatttggtctttcttgcatgtccgagaacacttgcctaagaaagatgtgtgatttttctttaaacctggaaattttaagcagcttatgctatcatctcatagtaacaatctagtgaagtaattgttatatcataataccggctagtgttgccagaataagcaggtgaatgtgaccaagaggtacttttataagggttttcagggcaaataggcaaaggcagccactcttatatcaaatgttgtcatatggaagggagtacaattaggtaactcggaatcctaatttcagggagtgtaa

SEQ ID NO: 283105 - DNA, 2631 bp, Homo sapiens
  misc_feature (2095)..(2095): n is a, c, g, or t
  misc_feature (2552)..(2552): n is a, c, g, or t
gggcaaataggcaaaggcagccactcttatatcaaatgttgtcatatggaagggagtacaattaggaaaaggagaaggaatggcaacgaagaagacaaccatcttcccccccagaccaaaagaagtagcagaaaccctgtctttcaggattcctgggacacagagacagtacctgtaatgagaaacagtaaagaaaacagactaagaggaaacaaagcgttctgcgcgtcttcaggcagtgacagtggtgggagcagcagcagcagcagcagcagcatcaacagcccggacagggccagcgggccggaaggcagcttgagccagaccatggccggatccagccctaacacgcctcagcccgtgcccgagcagtccgcgctgtgccaaggcctctacttccacatcaaccagaccctgagggaggcccacttccacagcctacagcaccgagggcggcctctgacatgatgtgccggcagtttcttgccttctgtgaagggacagcgctgtgcagatttgatatttcaacttacaacttgttttaaaagaaaaattgcacacgaaaaatgcctgttggcttttcagtctatatttgaaataacaggttaacaggcagttgtttacttgtggttttgctgcactattgcaatttcaaaggggctttgaagcaattttttataggattcttttgagggagggtatcaaatctatgtcaaggtagtggtttgaggaaaactcattctgtgtgttgaatccatagtatgtcccattcagactgatttccaaatctgtcaactagaaactctactttatgtaaagggccttttaaaaatgcgggatcttcaattttttttattcaataaactagtaaagagtatctagtttccatgaaaaaacataagtttttttccaaaatataggaagcttgattcagtcttgcactgaaattaactgccatactacctctcagtatgtagatgttctattgaaagtactctctcctgtgtaacaggagaacaatcagatccaattcagactgtcagtgaagcacactccctaataatagtctctactctttgttatatatttgtatttccagagagaatgtcttttagattcttgtatacccagataacttctgtgtcactattccaccagagtctgcacctcagactttagtaggaaacatggcacagttctgcaagtaaagtaatatgtaatgactttttgtcctacaaacttggtcagtcagcagcttacatgatctcattgacaattccaccttgtagtgtcaacaattaaggtgttgttgaacgctgataaaatgtaagctacctgaactgatgtctaaagcaacaagtattgtgaaattttgggacaaggattaacttgatgcttaaagtaacccccaacagtaactagggggccacattccatcagtgaaactggaaagattggtgtggctgagaatcagatgagcagaggcacctttagaagaaataatgtggtagtatttatttagggagagacagatgtgttgccatgttacttagtcatactagagagccagccaagtttgaataatgaaggtgcagacgtgttgtcttcttcactgacaagctgtctgaacaaggagccaggaactgtcgggtcaccagctgtggagcgtgccggggggacaacctgccattggatgtagagaaaagtgccttagagttggcctgagccctcctgcccactcgccctccgcgcgacgccactcggagtccacacggcacacacaagcggagctgagaagcacgatggctctagtcagaggactttgctgtcggtccagatttgaagaggacacggaacagcatgagcctttgtgacaaaactagaatttggaaatgaggactgtcttgggaaaagggtagacacaggcacttctctccacagcctgctaacctaatgtgggcagaactgaaagatcactgcagtggaaactgttctggaagaggctgcaacatagcccatgcttagggactggatggtttttgcaagagctttttttttttttaaactaccatctcccaacttttaaagccagatncttgacaaggattttagatcttaatgggttcgatggtagggaatacggaaaggatacactgctaatattgtgtctaacaataaagcaaacaactcgatgctgtaagaagacaagctgtttgagctttcaaacacacatgcacacagcacaattcagaaatacccaggaggattcctgcaggcttaacagttggcatcgtactgaaatgaaacgtgtattaacaagaaaatgtcaaacttttggggaaacaaattttctgttacttcccacccaactaaaagggaagataaaaccatcatcaccagaacaaaacagattttctccaaacaagtacaatgatagtgccgggttggcagttaactctttcaccctactaaattcaagagctcatctccaccctgtcctgtatattttctacatttctattaagaggctacttggtagtgtcagcgggcancttttacaccttctagtagctcaagctagtaaaaccttgtacttctctattgcgccgccattaaaagcagcattagtgc

SEQ ID NO: 283106 - DNA, 525 bp, Homo sapiens
gaagagcggaggaccaggaaccagagagagagagagagaaaagagagaggagagacagagcgcttgggggcgaaaggagagagggagggaagggtgggtaaggaggagagagcggtctgctgcaaaccccaggaggagagcttggagcccaagccagaactcgagccctagccggagccgttcacagggaggcggctgccgggaccgtcagccctgcatgatgcatctccggctcttctgcatcctgctcgccgcggtctcaggagccgagggctgggggctactacggctgcgacgaggagctggtgggtcccctgtatgcacgctccctgggcgcctcctcctactacagtctccttactgcgccgcgattcgccaggctgcacggcataagcgggtggtcaccacggattggggatccgaatccctggctccagatagacttaatgaagaagcaccggatccgggccgtggccacacagggctccttaattcttgggactgggtcacacgttacatgctact

SEQ ID NO: 283107 - DNA, 974 bp, Homo sapiens
aatttgcaaaaatttattcatatacaaatgtgcaatatcaataaaatgaccaaacaggttctgcctgaagcccaagttcatttagtatgtcatggttaattcagagtaaaatcaagagttagtacttgatttatgcttgttatataaagaaagagacaacttcactgtatgatcattttgtcacttttcaaaagcatttaattcccattcaattgaaaatgtttcaagaacaaacctgtttggtcattttattgatattgcacatttgtatatgaataaatttttgcaaattaaaaaaaaaaagatgtaggttctgaaacagggtgaggtccaggatcctgcctttctaaggagctcccacgttgtgcagttgctgctggcccggggaccacattgaatgacggctctacgtcctcatgcctccagctgctgccctgtacatgtccaactgcacggagcactttacatcctctaaaaccacagtaaattgctccatttcctaaattacctcttcaagagaagactggttttgatgtcatttttaaataaaggagaagttgaatttcaaaaccaagtggaacaggaatgatgtgacttggttgacattgattttaacatttggttcatggtgagtgttttgctttattgttaaaaactcgccactaaaagcatgacagaacattttatcaaatgatggcgtcatcctttaccgtaagtttgcccctagcaagacagctcttcctgagacgtgcttgcaggccgctatgtgggttttcccaccgcagtcatcatccgtcatctgtgaccttgctgcatttactccatgctcacaccccagcagcccgcctggctttggcatcgccctcagaggcatcaaacttcccctgctgcaatgtacaagagttagccaggaagcttgcagagtgctttggttttgttttgtttttttgacatgtcgccctggctggagtaca

SEQ ID NO: 283108 - DNA, 412 bp, Homo sapiens
tttggcctattctcttcgtataagacaccaggcagattggattagggcccacactacttggcctcgctttcacttacttgcctctttaaaagccctgtttccgaatacaatcccacgctgaaatactgggggttagggcttcagcgtatgaattgtgcagggacacagtgtagcccataacaccaggagcaagtcagacccataccagacttgtggaaccctgaattggtcattttgctgaggctgcctgaggaaaacaaaaggcccaatgcgtgtccagtttcctccctggtcagccactctgtctgcatctttgaagagtaggaatgggctgggctcctatctaaaccctgagtgtgccataccattcttcccagcaacttttactttgttgactttgttggccgaggat

SEQ ID NO: 283109 - DNA, 350 bp, Homo sapiens
ggaatggatgacattaatgtgcatgcagagtctcacagtgatgccggaaggaaggatgtataggcagtgaatgaatgatctttccttgaaatgctataaaaagcaacctgcattccagtcttttcttcctggttgaagttggcagatttccatttgcagggtatgggctgcgagagtaatcagggtaacattgctgtcatttccaagagaaatcagtaggggaaagcaagggaggtctttttttttttccttttttgagacagagtttccctcttgttgcccaggttgcagtgagccgaggtcgtgccattgcactccagcctgggtgacagtgagactttgtctcaaaa

SEQ ID NO: 283110 - DNA, 2824 bp, Homo sapiens
tgcactctagcctgggcgacagagcgagactccatttccaaaaaaaacacactaggcgtaaacaagaatgaagacctggaaccgtagagaaaatactagaaacccctcgtatcacgttgtgcctgaggacaataataaagtagtttactaggcatcagacattcctcagcagtgctgtgggtcacaggcgtgaagcggagctcgaggcaggattgcttgtgttgctgcatgtcctgtctgctgttttagcccgtgtcagtagatggggccattgtactgtttgttctgcacacttggcggagcagcagaggctctcagcacgccttttccctttgtagtattttctgagctaaggaaagtcaggcagaagtagttcataagaaggcatcactgcctgtgatcggggctgcatttagccctgacctgataatggtaggagagttcatttagcctttctgctgcgaagattgtaaatagattaaagaaaacagctgtggccttctcccgtcatacatcattagactgtgtaaactaacattttagaacctctaatattggacttaaaaccaatttctgtcgtgcttaattgaaaatcacaactaaaccaataaaccattattaaatttccattctgcagcagaaggcacctctggacggctcccggcttgtagtttaatgaagtatgtgctccctgctgttaacccgcagccctccccaactctccagcagctttgccaagtcagcctccgggccatctggctgtccttggccaaggcactgttaacggagtgacgttaaccatcttgtattgtgacctgtggccgcttttctggtttaagtccttcactttttcaagaggaatggatgaaattaatgtgcatgcagagtctcacagtgatgccggaaggaaggatgtataggcagtgaatgaatgatctttccttgaaatgctataaaaagcaacctgcattccagtcttttcttcctggttgaagttggcagatttccatttgcagggtatgggctgcgagagtaatcagggtaacattgctgtcatttccaagagaaatcagtaggggaaagcaagggaggtctttttttttttcttttttgagacggagtttccctcttgttacccaggctggagtggcagtggtgtgaacacggctcactgcagcctccacctcctgggttcaagagattctcctgccccagcctcccgagtagctggtattataggtgcacaccaccacacccaactaattttttgtatttttagtagagatggggtttcatgatgttggccaagctggtctcgagctcctgaccccaggtgatccacccacctcggcctcccaaagtgctggaattataggcgtgagccactgcgcacggcctggggaggttttatttcttgacaaaggtatttgatactcgtgcagtccctggagggtctcactggagagacaacatttaggctgagatctgattaacaggaggcagctgcagtgcagaggtcaaaagggagggtgttccaggcagagaaaacagcctgtgcaaaggccctgaggcagaaacaaactctacttgaggtcagcctggttagaaagcccaactcaaaatagaaagtattacatgataaggtctgaggcaggctggacccagatcttacaggaccttgttaataaggatcccatttggtcccccacagtcctgagaagcgggcagggctgtgggaaacagcagatatttagtggtaagcctgagatcagaacccaagtctgcacttcctagtcacgttctccctgtagtgctaagcccagagacctgagctgttaacctagaacagtgtgcttcctaagccttaatgtgcatacccatcgcctggagctcgccttaagatgtaggttctgcctgaagcccaagttcatttagtatgtcatggttaattcagagtaaaatcaagagttagtacttgatttatgcttgttatataaagaaagagacaacttcactgtatgatcattttgtcacttttcaaaagcatttaattcccattcaattgaaaatgtttcaagaacaaacctgtttggtcattttattgatattgcacatttgtatatgaataaatttttgcaaattaaaaaaaaaaagatgtaggttctgaaacagggtgaggtccaggatcctgcctttctaaggagctcccacgttgtgcagttgctgctggcccggggaccacattgaatgacggctctacgtcctcatgcctccagctgctgccctgtacatgtccaactgcacggagcactttacatcctctaaaaccacagtaaattgctccatttcctaaattacctcttcaagagaagactggttttgatgtcatttttaaataaaggagaagttgaatttcaaaaccaagtggaacaggaatgatgtgacttggttgacattgattttaacatttggttcatggtgagtgttttgctttattgttaaaaactcgccactaaaagcatgacagaacattttatcaaatgatggcgtcatcctttaccgtaagtttgcccctagcaagacagctcttcctgagacgtgcttgcaggccgctatgtgggttttcccaccgcagtcatcatccgtcatctgtgaccttgctgcatttactccatgctcacaccccagcagcccgcctggctttggcatcgccctcagaggcatcaaacttcccctgctgcaatgtacaagagttagccaggaagcttgcagagtgctttggttttgttttgtttttttgacatgtcgccctggctggagtaca

SEQ ID NO: 283111 - DNA, 1594 bp, Homo sapiens
gaggatcccagctgattgtcacggtccaactaattttttgtatttttagtagagatggggtttcatgatgttggccaagctggtctcgagctcctgaccccaggtgatccacccacctcggcctcccaaagtgctggaattataggcgtgagccactgcgcacggcctggggaggttttatttcttgacaaaggtatttgatactcgtgcagtccctggagggtctcactggagagacaacatttaggctgagatctgattaacaggaggcagctgcagtgcagaggtcaaaagggagggtgttccaggcagagaaaacagcctgtgcaaaggccctgaggcagaaacaaactctacttgaggtcagcctggttagaaagcccaactcaaaatagaaagtattacatgataaggtctgaggcaggctggacccagatcttacaggaccttgttaataaggatcccatttggtcccccacagtcctgagaagcgggcagggctgtgggaaacagcagatatttagtggtaagcctgagatcagaacccaagtctgcacttcctagtcacgttctccctgtagtgctaagcccagagacctgagctgttaacctagaacagtgtgcttcctaagccttaatgtgcatacccatcgcctggagctcgccttaagatgtaggttctgcctgaagcccaagttcatttagtatgtcatggttaattcagagtaaaatcaagagttagtacttgatttatgcttgttatataaagaaagagacaacttcactgtatgatcattttgtcacttttcaaaagcatttaattcccattcaattgaaaatgtttcaagaacaaacctgtttggtcattttattgatattgcacatttgtatatgaataaatttttgcaaattaaaaaaaaaaagatgtaggttctgaaacagggtgaggtccaggatcctgcctttctaaggagctcccacgttgtgcagttgctgctggcccggggaccacattgaatgacggctctacgtcctcatgcctccagctgctgccctgtacatgtccaactgcacggagcactttacatcctctaaaaccacagtaaattgctccatttcctaaattacctcttcaagagaagactggttttgatgtcatttttaaataaaggagaagttgaatttcaaaaccaagtggaacaggaatgatgtgacttggttgacattgattttaacatttggttcatggtgagtgttttgctttattgttaaaaactcgccactaaaagcatgacagaacattttatcaaatgatggcgtcatcctttaccgtaagtttgcccctagcaagacagctcttcctgagacgtgcttgcaggccgctatgtgggttttcccaccgcagtcatcatccgtcatctgtgaccttgctgcatttactccatgctcacaccccagcagcccgcctggctttggcatcgccctcagaggcatcaaacttcccctgctgcaatgtacaagagttagccaggaagcttgcagagtgctttggttttgttttgtttttttgacatgtcgccctggctggagtaca

SEQ ID NO: 283112 - DNA, 692 bp, Homo sapiens
tttgcgagagtagcgcgggagctgagaagttgcagggttgagttggtcccggcaagtccttgagcagtttgttcctctgtcttcccgcttcctggtgccccgactgcgtccccacgaacgccccgtccttaccgccggctgctgtggagtgcctcgctgtctcccaggtccccgagtgagcgtcgaatgggacctctgtggctagggcaggcctgtgtgggtggcactgagagggaggaggggagggggatgttcgcagtttccttgcgaccccagggactttctttgtccccgccatccacctccttaggcctttgggatcgccgactggtctaatgtcgccggcccttgtggctctgggaaattagcattgattaatcttcctaacaatttttgtttttatagagacaggatctccctatgttgcccaggctggtctcgaactcctgggctcaaggtatcttcctgcctcggcttcccaaagtgctgggattacaggcgtgagcccggccagctcctaataatgttaagtgcttgctaggagtcaagcgctgtgctgagcgcaggggcttcccacgtcattgcgtccccagtgcttagtgccaggcactgagcagaggcgcgattcgtatttgaactaaaacgaaccccgtccctgaggaacaagacctctactgggaagtcaaagaaat

SEQ ID NO: 283113 - DNA, 407 bp, Homo sapiens
ctgggctcctatctaaaccctgagtgtgccataccattcttcccagcaacttttactttgttgactttgttggccgaggatttcctaatcacattgttgttttcctggcagttcccaaaccagatctagattcttacgtgtttctgagagtgagagaacgacaagaaaacatactggtagaaccagacacagatgagcagaggtgagtggcgtgcatctttcacagtgggcacattcctcccgatggagggccagccgagctctgcaggcaaatgtgtttccctctttttcagggactacgtgattgacctggagaagggctcacagcacttgatccgatacaaaaccattgcacctctggttgcatctggagctgtccagctaatttaaaactaggcataaacagc

SEQ ID NO: 283114 - DNA, 414 bp, Homo sapiens
tgagccgaggtcgtgccattgcactccagcctgggtgacagtgagactttgtctcaaaaaaaaaaacaaaaaacaaaaaaaaaacaaactaggcataaactcatgaggtcaggagatcaagaccatcctggctactaaaccccatctctactaaacccatctctactaaaaatacaaaaaattagccaggcatggtggcgggcccatctactcaggaggctgaggcaggagaatggtgtgaacccgggaggtggagcttgcagtgagccaagatcgtgccattgcactctagcctgggcgacagagcgagactccatttccaaaaaaaacacactaggcgtaaacaagaatgaagacctggaaccgtagagaaaatactagaaacccctcgtatcacgttgtgcctgaggacaa

SEQ ID NO: 283115 - DNA, 1161 bp, Homo sapiens
gcgagagtagcgcgggagctgagaagttgcagggttgagttggtcccggcaagtccttgagcagtttgttcctctgtcttcccgcttcctggtgccccgactgcgtccccacgaacgccccgtccttaccgccggctgctgtggagtgcctcgctgtctcccaggtccccgagttcctggtttcagagaagatgaccgaagaagtggatttcctgggacaggactctgatgggggtagtgaggaagtggtcctaactcctgcagagctcattgaaagattggagcaggcctggatgaatgaaaagtttgcccctgagctgctggagagcaagcctgagattgtagaatgtgtcatggaacagctggagcacatggaagaaaatctcaggagagccaaaagggaggacctgaaggtcagcatccaccaaatggagatggagaggatccgctacgtcctcagcagctacttgcggtgtcgcctcatgaagatagagaagtttttccctcatgtccttgagaaggaaaaaacacgtcctgagggggagccttccagcctctcgccggaagagttggcctttgccagagagttcatggcgaacacagagtcctatctgaaaaatgtcgccttgaagcacatgccccctaacttacagaaggtggacctctttcgggcagttcccaaaccagatctagattcttacgtgtttctgagagtgagagaacgacaagaaaacatactggtagaaccagacacagatgagcagagggactacgtgattgacctggagaagggctcacagcacttgatccgatacaaaaccattgcacctctggttgcatctggagctgtccagctaatttaaaactaggcataaacagccaggcatggtgactcaggcctgtaatcccagcactttgggaggccgaggcgggcggatcatgaggtcaggagttcgagaccaaccgaccaacatggtgaaaccccatctttactgaaaatacaaaataattagccgggtgttggtggtgtgcacctgtaatcccggctactcggggggccggggcaggagaatcgcttgaacctgggagcaggaggttgcagtgagccgaggtcgtgccattgcactccagcctgggtgacagtgagactttgtctcaaaa

SEQ ID NO: 283116 - DNA, 838 bp, Homo sapiens
cccccccccccgcacgcccagccacaagaagttttccggcggcggccgatccacttggcactgtgcacctgtctgattcccaaggccacagagggcatggtgctggtgaagaagtcaggtttctccatgtgggacgccagcaaccacagactgcctctcaaataaagaacctggaaccttcatgctgagaatgcactctctttcccttcctgataaagaaggctcctgctctgggccaagaaatcccaaaacacaatagtgttctcagggcacaggattgtatggctccacaccctacagggtctcacttggttgcccaggctggaaagcaatggcacaatcttggctcactgcaacctgtgcctcctaggttcaagctattctcctgcctcagccttccaaatagctgggattacaggcacatgccaccacaaccagggtcttaaaacataaatgatagtctgtgggcggtttattctctccatttcttctcatgaaggaccaaggagttgaactgaagcctgagcgtctgtataagcttttccccatgctgctcttttttgcaaacaccaacacaatttgggctccatttataaggcatctgctgcaccaaccctctttcttggtgcttactggacctgctcagggttaatttctaactcaaagaacctaacttggagtaactccgtaccaccagcaaagcgactggctttggggaatgacatttacaatgtatccactgttatttggtcacccagcaaactgtcatttttcagaaaccagggctgtctcacaaactggctttcaataaggtgggttgcttagcaactgccaagga

SEQ ID NO: 283117 - DNA, 709 bp, Homo sapiens
aatagaggtgaggtcacaacataggaaagttgcttggtgtataattagtgtggggagcacaggggggtggattacaatgcacagacaaattctaatccatagcctgtaatttgagggttgggtcaatcataatttgggtgcaagcacacctacttccttttttaataagggagaatttagctcttgttacccacaagagttctcaaagtagaaaataataaaccatgttcttgaagccagtactgaattatcaaagctgaaggaagggaagctaaagaaagattaggcaacttggggtacaaatgcgttcaaaatcctctccgtcagtatgccaagtctctggataccagtgacttatttgccctggggtgagagaaaactccattttccatcaagctggagaagcagcctttgtttttcagccatggataaggccacttattaggaggacaacaagaagtgaaatctcaggaggatgcttaccaggaatcaggaaactggaaaaacaatggcctgctgggacagatctccaagccctagaggaccacaggtgaatgtcacctgtaagtctccgctcattctagccaatgtaattctacaaaaggccacatctaaactactgaaatgcatgcaagtaattttcaaaggcctacagactctgctatgcttcagtagctgtcctatcaaaattaacctgaagggtgtcact

SEQ ID NO: 283118 - DNA, 686 bp, Homo sapiens
aatagaggtgaggtcacaacataggaaagttgcttggtgtataattagtgtggggagcacaggggggtggattacaatgcacagacaaattctaatccatagcctgtaatttgagggttgggtcaatcataatttgggtgcaagcacacctacttccttttttaataagggagaatttagctcttgttacccacaagagttctcaaagtagaaaataataaaccatgttcttgaagccagtactgaattatcaaagctgaaggaagggaagctaaagaaagattaggcaacttggggtacaaatgcgttcaaaatcctctccgtcagtatgccaagtctctggataccagtgacttatttgccctggggtgagagaaaactccattttccatcaagctggagaagcagcctttgtttttcagccatggataaggccacttattaggaggacaacaagaaggtggaccagtaagacaacatgacacgtaaggcaggagaatcacttgaacctggaaggcggagattgcagtgaactgagatcacaccaatgcactctagcctgggcaacagagtgagactctgtctcaaaaaagaaaaaaaacaaagacaatacgacatacctagattctaattcaacacagaaaatgcaaaacaaataaataaataaataaaataaacataaaacc

SEQ ID NO: 283119 - DNA, 292 bp, Homo sapiens
aatagcacttgacttggcaaattttcttagctccctgtttccccagagccccaagcttacatgtcagatgcccaccaaggcttcacagctcattacttcccttcctccctgtttccttagtgaaatctcaggaggatgcttaccaggaatcaggaaactggaaaaacaatggcctgctgggacagatctccaagccctagaggaccacaggtgaatgtcacctgtaagtctccgctcattctagccaatgtaattctacaaaaggccacatctaaactactgaaatgcatgc

SEQ ID NO: 283120 - DNA, 565 bp, Homo sapiens
tgccaggctaagaaaccaggatattttattttctgataaaaagaggatgcttttttggcaaatttctgcttcggagtgaagatgctgcacttgtttccttgttttgtgacatcattgcaatctcttgatttttttcatccctcggattccttagcatccttcaaaagtaatgttcctgcagtctcgcagaaggccgaaggatggagaatttctagtccaggccagggacactcagaagagagaaaaaaaaaagaacaaaaaaagacccaagcagcttcacagggcctcatctggtccaatttcttctcatgatgcattcattcactcataaatatcttttgagcacctactatgtgttgggtagatctagggataaaatcagggttaaaaatacagtcgctggtctcacagcaaaaaaggcacctgaggcccagagagggccactgacttgccaaaagtcacaagctaaaacttctgtggccgaaccgcgtctcgaacacaactggcggaggcccacggcgcctgcagcccagctgcagaatgctacaaagcaacgggggccggt

SEQ ID NO: 283121 - DNA, 447 bp, Homo sapiens
tgccaggctaagaaaccaggatattttattttctgataaaaagaggatgcttttttggcaaatttctgcttcggagtgaagatgctgcacttgtttccttgttttgtgacatcattgcaatctcttgatttttttcatccctcggattccttagcatccttcaaaagtaatgttcctgcagtctcgcagaaggccgaaggatggagaatttctagtccaggccagggacacttatgtgttgggtagatctagggataaaatcagggttaaaaatacagtcgctggtctcacagcaaaaaaggcacctgaggcccagagagggccactgacttgccaaaagtcacaagctaaaacttctgtggccgaaccgcgtctcgaacacaactggcggaggcccacggcgcctgcagcccagctgcagaatgctacaaagcaacgggggccggt

SEQ ID NO: 283122 - DNA, 541 bp, Homo sapiens
tgccaggctaagaaaccaggatattttattttctgataaaaagaggatgcttttttggcaaatttctgcttcggagtgaagatgctgcactagatgggaaggagaagaggagaaatggaaagaagaaaagcatccttcaaaagtaatgttcctgcagtctcgcagaaggccgaaggatggagaatttctagtccaggccagggacactcagaagagagaaaaaaaaaagaacaaaaaaagacccaagcagcttcacagggcctcatctggtccaatttcttctcatgatgcattcattcactcataaatatcttttgagcacctactatgtgttgggtagatctagggataaaatcagggttaaaaatacagtcgctggtctcacagcaaaaaaggcacctgaggcccagagagggccactgacttgccaaaagtcacaagctaaaacttctgtggccgaaccgcgtctcgaacacaactggcggaggcccacggcgcctgcagcccagctgcagaatgctacaaagcaacgggggccggt

SEQ ID NO: 283123 - DNA, 321 bp, Homo sapiens
gaggatgcttttttggcaaatttctgcttcggagtgaagatgctgcactagatgggaaggagaagaggagaaatggaaagaagaaaaggtgagttccaaggacagaaacactccctctttggactccccccaatttcatggactctctcccgcaaaaaaacacacaagaacttcctgccttgtttccttgttttgtgacatcattgcaatctcttgatttttttcatccctcggattccttagcatccttcaaaagtaatgttcctgcagtctcgcagaaggccgaaggatggagaatttctagtccaggccagggacact

SEQ ID NO: 283124 - DNA, 522 bp, Homo sapiens
ctctcagatctaactccagtccaatatcccctaagaagccttctctgaccactccagggcacaatgatctcaaggttcagcatctccagagatgagctttccaaatacctgatgaagatatgcatgtgagaaggaattaatgacaggcattaacactatattggccagaggactcattagctgattccgcaggatatgtggataccaaaattacctcagggccatttgctgtaatgaactgccgctggggagagacatcataaggtctgagatggtctgcagcaagcggtgaaaggagtcagtgatgccacaaaatgccacagaatatcatggagagaagtggtttggatgacattacacagaagccagttgaaagcctgaagaaatgacggttaaatgagttcaagaataaaatacatgagtttaaaaagtactcagaaataaagtacctccatggattaagacttcaaagaaagatactagaaaatcttttttaattaaaaaaaatgccttatagtttta

SEQ ID NO: 283125 - DNA, 352 bp, Homo sapiens
ctctcagatctaactccagtccaatatcccctaagaagccttctctgaccactccagggcacaatgatctcaaggttcagcatctccagagatgagctttccaaatacctgatgaagatatgcatgagtcagtgatgccacaaaatgccacagaatatcatggagagaagtggtttggatgacattacacagaagccagttgaaagcctgaagaaatgacggttaaatgagttcaagaataaaatacatgagtttaaaaagtactcagaaataaagtacctccatggattaagacttcaaagaaagatactagaaaatcttttttaattaaaaaaaatgccttatagtttta

SEQ ID NO: 283126 - DNA, 395 bp, Homo sapiens
ctctcagatctaactccagtccaatatcccctaagaagccttctctgaccactccagggcacaatgatctcaaggttcagcatctccagagatgagctttccaaatacctgatgaagatatgcatgtgagaaggaattaatgacaggcattaacactatattggccagaggactcattagctgattccgcaggagtcagtgatgccacaaaatgccacagaatatcatggagagaagtggtttggatgacattacacagaagccagttgaaagcctgaagaaatgacggttaaatgagttcaagaataaaatacatgagtttaaaaagtactcagaaataaaggcgcagcggccgatggaattttgtaagaagatatgtgtgtgcacgggggggt

SEQ ID NO: 283127 - DNA, 476 bp, Homo sapiens
aaaggtgagtcctgcctggactgggtttgctcggtttccttgcagccccacatgggagttcactctgtgggtgatgagttttccccaacctctgcctctccaaaagaacttctaatttccctttcccaaagatctgcaggatagtggttggctagtatttgtgagtggctcagaagggagttcatcatagtctttgtgttcaaagaatgttctaagaactagtacattaactagctttggggcctcagttgaacctcagcttccttaactgtaaaatggagctattttacctattgtgagagtctacaattatttggtgttacaccgtcttcactgcgtaactttactccacaaacaaaaaggaattggtgccaaaatagcactcagaacaggttctgcagcctgttaagcagttccttcaaatattagagcttcctgagttaagcaaagggtttgctttgaatcccctcaccttg

SEQ ID NO: 283128 - DNA, 587 bp, Homo sapiens
taggctgtggcttactcttggggcctccctgcaaactccatcttctgatttgcgctgggagtgactcctccttccatcctacagcctggggtgctgctgctgctactctggggaccgggaggaggcacacggccacagggacgtttgttcgtgattttgcaggaaagcacatggccctcgggagccaggtaaatgtgttcaagctggtcctttcccatttctcaccttgctccctctcccggtttccctgggaaatcattttcactgtagctggggctcactagcgattaggaactagctttccttctttgaaagcagcacatgaaggtgagcaggcccagagcctgtgccccagtgggctagaacacgtgcaagacagggcctcacaccgtcctttctcttgtatttgatccctttggtctgacgttttcaaggacaaggattcctctggattctaccctaaagatggatgccacaggctccaccaaagtgcagtccaaaagcagaatcttcagagaggaacgctaggagactttatctctcagcagtgcctctttccagagttcgctggacaggtaccgagctgt

SEQ ID NO: 283129 - DNA, 609 bp, Homo sapiens
taggctgtggcttactcttggggcctccctgcaaactccatcttctgatttgcgctgggagtgactcctccttccatcctacagcctggggtgctgctgctgctactctggggaccgggaggaggcacacggccacagggacgtttgttcgtgattttgcaggaaagcacatggccctcgggagccagcgttcctctctgaagattctgcttttggcctgcactttggtggagcctgtggcatccatctttagggtagaatccagaggaatccttgtccttgaaaacgtcagaccaaagggatcaaatacaagagaaaaatgttgccaaactcacaatggccatgatggcattgagaatttacattctctcaagcctaaagaaggtgtcaaatggcagtggatttcagctttgctgggctgtgccctggtttaagctttgcacactggcccagggaagtcccacactaaagcccacagatgcgaataaattactgacagtgcccaacctcccctgccaggtggcatggaggtccagatgctgacctggctgaaagagaatactgtgttggcggctcctgatgcagagttaaatgcttgttaaagaaaaa

SEQ ID NO: 283130 - DNA, 1074 bp, Homo sapiens
ggaagggggcgccaggcagcccctgacctcacttggaagaggagagaaagagagtcgaagacgccctgtcaagatgccactcacctaaacgccaggaacatctccccgactaaggacaggccgacccccagcaggaccagcgccacgagcttccccatggtctcggggtgcccagcggcgactgcgcggcgccgagagctctcgggggcgcggcgggcggttcctgcctcgcgtacggattggggcccgctcggccccgcccgcacacgcctcctacttacctgagcggcccgggtgccgcagcagggcgctgacgagtcccgccgagccccgccgcccgggttcaaggccgccttcacgcccacgattccttgttttttgggcagaggtcaaggctcaacggagagggagcccgggaccgagttgtggtgggagtttgctcctaacacccgcgaaatcctacctcaattcctcagatggcctgagggagaaaccggagggcccgggaatggcggggagctccagttcagagccggaactccggacttctgcaaggccagacgtgaggcgacactgaattgctcccgagacgcgggaagggcgaaggcaatcgaagcgaagagctttaactcatcttctccaggatttggggcacgggaacctgtctcctgaccttcgtgccttacctcggagtgtgctgcccagacggacttgtgaatagctgtgtctgtccccatagttaacgggagaaggaaacaccaggagaaaagaaggaaaagacaggaaacgggaagaggagcagaggcgaggaaggggaaggtcatttccttggcagggtaggccctctttcttctaggtcttgagttcctgccaggcaagaaatgctctttcccctctcctgatgaacaccaggttggagggggaggaactgaagatgcgggaagacttggggagttcgggcaaagtagcacattcaagcatgatctatttttatttacggacagaaagaaatattagttctgttaggttccaccgagtaaactatttgttgagagagcaagatttgccaatcct

SEQ ID NO: 283131 - DNA, 1261 bp, Homo sapiens
ggaagggggcgccaggcagcccctgacctcacttggaagaggagagaaagagagtcgaagacgccctgtcaagatgccactcacctaaacgccaggaacatctccccgactaaggacaggccgacccccagcaggaccagcgccacgagcttccccatggtctcggggtgcccagcggcgactgcgcggcgccgagagctctcgggggcgcggcgggcggttcctgcctcgcgtacggattggggcccgctcggccccgcccgcacacgcctcctacttacctgagcggcccgggtgccgcagcagggcgctgacgagtcccgccgagccccgccgcccgggttcaaggccgccttcacgcccacgattccttgttttttgggcagaggtcaaggctcaacggagagggagcccgggaccgagttgtggtgggagtttgctcctaacacccgcgaaatcctacctcaattcctcagatggcctgagggagaaaccggagggcccgggaatggcggggagctccagttcagagccggaactccggacttctgcaaggccagacgtgaggcgacactgaattgctcccgagacgcgggaagggcgaaggcaatcgaagcgaagagctttaactcatcttctccaggatttggggcacgggaacctgtctcctgaccttcgtgccttacctcggagtgtgctgcccagacggacttgtgaatagctgtgtctgtccccatagttaacgggagaaggaaacaccaggagaaaagaaggaaaagacaggaaacgggaagaggagcagaggcgaggaaggggaaggtcatttccttggcaggggtctcgctgtgttgcctaggctggagtacattggcacaatcatagctcactgcagtctggacctcccggactcaagggaccctccagcctcagcctcctgagtagctgggaccgcaggcctggcagctgtggcgactgaatctaagaagaaaggctgataatgctctggctggtttcataataggacttttcaaggcactgtcccatccattaactcatttgaaatgaaagatgaagaaaccgagccacacagaggttaaataacttgcccaagggtgcacaactactagtagtattgagtctatacgcttaagtattgtgctattccatttcttactgaatacaaagcaaaaaaacataaggatcagaggaggagtgtgagtgtcctcatactcacagcaaaaggaggtcagtgggtgtgtgt

SEQ ID NO: 283132 - DNA, 1828 bp, Homo sapiens
aattctgcggccgcaagatggcggaggtgggggagataatcgagggctgccgcctacccgtgctgcggcggaaccaggacaacgaagatgagtggcccctggccgagatcctgagcgtgaaggacatcagtggccggaagcttttctacgtccattacattgacttcaacaaacgtctggatgaatgggtgacgcatgagcggctggacctaaagaagatccagttccccaagaaagaggccaagacccccactaagaacggacttcctgggtcccgtcctggctctccagagagagaggtgaaacggaaggtggaggtggtttcaccagcaactccagtgcccagcgagacagccccggcctcggtttttccccagaatggagccgcccgtagggcagtggcagcccagccaggacggaagcgaaaatcgaattgtttgggcactgatgaggactcccaggacagctctgatggaataccgtcagcaccacgcatgactggcagcctggtgtctgatcgaagccacgacgacatcgtcacccggatgaagaacattgagtgcattgagctgggccggcaccgcctcaagccgtggtacttctccccgtacccacaggaactcaccacattgcctgtcctctacctgtgcgagttctgcctcaagtacggccgtagtctcaagtgtcttcagcgtcatttgaccaagtgtgacctacgacatcctccaggcaatgagatttaccgcaagggcaccatctccttctttgagattgatggacgtaagaacaagagttattcccagaacctgtgtcttttggccaagtgtttccttgaccataagacactgtactatgacacagaccctttcctcttctacgtcatgacagagtatgactgtaagggcttccacatcgtgggctacttctccaaggagaaagaatcaacggaagactacaatgtggcctgcatcctaaccctgcctccctaccagcgccggggctacggcaagctgctgatcgagttcagctatgaactctccaaagtggaagggaaaacagggacccctgagaagcccctctcagaccttggcctcctatcctatcgaagctactggtcccagaccatcctggagatcctgatggggctgaagtcggagagcggggagaggccacagatcaccatcaatgagattagtgaaatcaccagcatcaagaaggaggatgtcatctccactctgcagtacctcaatctcatcaactactacaagggccagtacatcctcacactgtcagaggacatcgtggatggccatgagcgggccatgctcaagcggctcctgcggatcgactccaagtgtctgcacttcactcccaaggactggagcaagagggggaagtggtgaccagacactgcccactgcagtgccaagacggcagcaggactggggctgatagcccaccccgcccccactgcagctcccacaaagcactctaagggagatggggctgaggacagctcaaaaaggagaggacaggcctggcaggggcccactggtgcccagcaccaaggcgagctccgggctcagaccaactccaaggtcagctggccacaggcccaggcctcctctgaagcagggaccagagggagccaggcagctgtgtacagtgagaagggatccggatgggggagctctgtacagagggctggtgattgtaaaaatttcttttgtaaagtagaagttgggggtggggtgggtgctggctgcaaaaatttctggcttctcttacccctattgcccccggcaataaattgtttctatatgccaga

SEQ ID NO: 283133 - DNA, 2124 bp, Homo sapiens
  misc_feature (17)..(17): n is a, c, g, or t
tcaggctggtacccccngggtgttatgggatatcgtcgaccacggcgctcgggggaagatggcggaggtggtgagtccggtgcccggggcggggcggagggagccaggggaggtgggtagagcccgaggccccccagtagccgaccctggcgtcgcgctgtctccccagggggagataatcgagggctgccgcctacccgtgctgcggcggaaccaggacaacgaagatgagtggcccctggccgagatcctgagcgtgaaggacatcagtggccggaagcttttctacgtccattacattgacttcaacaaacgtctggatgaatgggtgacgcatgagcggctggacctaaagaagatccagttccccaagaaagaggccaagacccccactaagaacggacttcctgggtcccgtcctggctctccagagagagaggtgccggcctcggcgcaggccagcgggaagaccttgccaatcccggtccagatcacactccgcttcaacctgcccaaggagcgggaggccattcccggtggcgagcctgaccagccgctctcctccagctcctgcctgcagcccaaccaccgctcaacgaaacggaaggtggaggtggtttcaccagcaactccagtgcccagcgagacagccccggcctcggtttttccccagaatggagccgcccgtagggcagtggcagcccagccaggacggaagcgaaaatcgaattgtttgggcactgatgaggactcccaggacagctctgatggaataccgtcagcaccacgcatgactggcagcctggtgtctgatcgaagccacgacgacatcgtcacccggatgaagaacattgagtgcattgagctgggccggcaccgcctcaagccgtggtacttctccccgtacccacaggaactcaccacattgcctgtcctctacctgtgcgagttctgcctcaagtacggccgtagtctcaagtgtcttcagcgtcatttgaccaagtgtgacctacgacatcctccaggcaatgagatttaccgcaagggcaccatctccttctttgagattgatggacgtaagaacaagagttattcccagaacctgtgtcttttggccaagtgtttccttgaccataagacactgtactatgacacagaccctttcctcttctacgtcatgacagagtatgactgtaagggcttccacatcgtgggctacttctccaaggagaaagaatcaacggaagactacaatgtggcctgcatcctaaccctgcctccctaccagcgccggggctacggcaagctgctgatcgagttcagctatgaactctccaaagtggaagggaaaacagggacccctgagaagcccctctcagaccttggcctcctatcctatcgaagctactggtcccagaccatcctggagatcctgatggggctgaagtcggagagcggggagaggccacagatcaccatcaatgagattagtgaaatcaccagcatcaagaaggaggatgtcatctccactctgcagtacctcaatctcatcaactactacaagggccagtacatcctcacactgtcagaggacatcgtggatggccatgagcgggccatgctcaagcggctcctgcggatcgactccaagtgtctgcacttcactcccaaggactggagcaagagggggaagtggtgaccagacactgcccactgcagtgccaagacggcagcaggactggggctgatagcccaccccgcccccactgcagctcccacaaagcactctaagggagatggggctgaggacagctcaaaaaggagaggacaggcctggcaggggcccactggtgcccagcaccaaggcgagctccgggctcagaccaactccaaggtcagctggccacaggcccaggcctcctctgaagcagggaccagagggagccaggcagctgtgtacagtgagaagggatccggatgggggagctctgtacagagggctggtgattgtaaaaatttcttttgtaaagtagaagttgggggtggggtgggtgctggctgcaaaaatttctggcttctcttacccctattgcccccggcaataaattgtttctatatgccaga

SEQ ID NO: 283134 - DNA, 2559 bp, Homo sapiens
agctcacgtgacggactcagtagaccgccactggctgtgcacgttatggggtttccacctagggctcggcctgaggcttgtaacactccgttttcccccgagtcacaggggcagtcttgcccctcgcagctgggtcgcggtgtctctcaaaggtccccctctacaggggcttcgtgaggcccgggcccacagggcgctcggtcccggaagtgacgtctcccagaggggccggaagtggcagtggagggagggaagatggcggaggtgggggagataatcgagggctgccgcctacccgtgctgcggcggaaccaggacaacgaagatgagtggcccctggccgagatcctgagcgtgaaggacatcagtggccggaagcttttctacgtccattacattgacttcaacaaacgtctggatgaatgggtgacgcatgagcggctggacctaaagaagatccagttccccaagaaagaggccaagacccccactaagaacggacttcctgggtcccgtcctggctctccagagagagaggtgaaacggaaggtggaggtggtttcaccagcaactccagtgcccagcgagacagccccggcctcggtttttccccagaatggagccgcccgtagggcagtggcagcccagccaggacggaagcgaaaatcgaattgtttgggcactgatgaggactcccaggacagctctgatggaataccgtcagcaccacgcatgactggcagcctggtgtctgatcgaagccacgacgacatcgtcacccggatgaagaacattgagtgcattgagctgggccggcaccgcctcaagccgtggtacttctccccgtacccacaggaactcaccacattgcctgtcctctacctgtgcgagttctgcctcaagtacggccgtagtctcaagtgtcttcagcgtcatttgaccaagtgtgacctacgacatcctccaggcaatgagatttaccgcaagggcaccatctccttctttgagattgatggacgtaagaacaagagttattcccagaacctgtgtcttttggccaagtgtttccttgaccataagacactgtactatgacacagaccctttcctcttctacgtcatgacagagtatgactgtaagggcttccacatcgtgggctacttctccaaggagaaagaatcaacggaagactacaatgtggcctgcatcctaaccctgcctccctaccagcgccggggctacggcaagctgctgatcgagttcagctatgaactctccaaagtggaagggaaaacagggacccctgagaagcccctctcagaccttggcctcctatcctatcgaagctactggtcccagaccatcctggagatcctgatggggctgaagtcggagagcggggagaggccacagatcaccatcaatgagattagtgaaatcaccagcatcaagaaggaggatgtcatctccactctgcagtacctcaatctcatcaactactacaagggccagtacatcctcacactgtcagaggacatcgtggatggccatgagcgggccatgctcaagcggctcctgcggatcgactccaagtgtctgcacttcactcccaaggactggagcaagagggggaagtggtgaccagacactgcccactgcagtgccaagacggcagcaggactggggctgatagcccaccccgcccccactgcagctcccacaaagcactctaagggagatggggctgaggacagctcaaaaaggagaggacaggcctggcaggggcccactggtgcccagcaccaaggcgagctccgggctcagaccaactccaaggtcagctggccacaggcccaggcctcctctgaagcagggaccagagggagccaggcagctgtgtacagtgagaagggatccggatgggggagctctgtacagagggctggtgattgtaaaaatttcttttgtaaagtagaagttgggggtggggtgggtgctggctgcaaaaatttctggcttctcttacccctattgcccccggcaataaattgtttctatatgccagaaaaaacaagatcaaacacacaaaaggggggagcccaggtcctaaaaggatatccccataaaaagggccccaaggtataaagggagaacccaaaggtttatcttggttcaccaagggtgtgtccccctaaaggttggagcggaatattaattacgccataggacaagaggacacggcagtttataacaaagcggtgcggataacgtggcaaaagacagtgataaacgtgggaggcaaacgatgggtgaaaaagaaggaaaccctattacttccatggaggatgtggacaccacataatgcttggggaaacaaacatggtaccctacaagatgatttttgaaaggcactcgatagcgtgacagatcattaaagacgtttaacagcgtgtctatagcagtgtgttaaacactacccggcactatgcatgatcggggatgagaaaaatgaggagcagaacgacgaaatcatgatttacgagaagcttttttatcccg

SEQ ID NO: 283135 - DNA, 2210 bp, Homo sapiens
agctcacgtgacggactcagtagaccgccactggctgtgcacgttatggggtttccacctagggctcggcctgaggcttgtaacactccgttttcccccgagtcacaggggcagtcttgcccctcgcagctgggtcgcggtgtctctcaaaggtccccctctacaggggcttcgtgaggcccgggcccacagggcgctcggtcccggaagtgacgtctcccagaggggccggaagtggcagtggagggagggaagatggcggaggtgggggagataatcgagggctgccgcctacccgtgctgcggcggaaccaggacaacgaagatgagtggcccctggccgagatcctgagcgtgaaggacatcagtggccggaagcttttctacgtccattacattgacttcaacaaacgtctggatgaatgggtgacgcatgagcggctggacctaaagaagatccagttccccaagaaagaggccaagacccccactaagaacggacttcctgggtcccgtcctggctctccagagagagaggtgaaacggaaggtggaggtggtttcaccagcaactccagtgcccagcgagacagccccggcctcggtttttccccagaatggagccgcccgtagggcagtggcagcccagccaggacggaagcgaaaatcgaattgtttgggcactgatgaggactcccaggacagctctgatggaataccgtcagcaccacgcatgactggcagcctggtgtctgatcgaagccacgacgacatcgtcacccggatgaagaacattgagtgcattgagctgggccggcaccgcctcaagccgtggtacttctccccgtacccacaggaactcaccacattgcctgtcctctacctgtgcgagttctgcctcaagtacggccgtagtctcaagtgtcttcagcgtcatttgaccaagtgtgacctacgacatcctccaggcaatgagatttaccgcaagggcaccatctccttctttgagattgatggacgtaagaacaagagttattcccagaacctgtgtcttttggccaagtgtttccttgaccataagacactgtactatgacacagaccctttcctcttctacgtcatgacagagtatgactgtaagggcttccacatcgtgggctacttctccaaggagaaagaatcaacggaagactacaatgtggcctgcatcctaaccctgcctccctaccagcgccggggctacggcaagctgctgatcgagttcagctatgaactctccaaagtggaagggaaaacagggacccctgagaagcccctctcagaccttggcctcctatcctatcgaagctactggtcccagaccatcctggagatcctgatggggctgaagtcggagagcggggagaggccacagatcaccatcaatgagattagtgaaatcaccagcatcaagaaggaggatgtcatctccactctgcagtacctcaatctcatcaactactacaagggccagtacatcctcacactgtcagaggacatcgtggatggccatgagcgggccatgctcaagcggctcctgcggatcgactccaagtgtctgcacttcactcccaaggactggagcaagagggggaagtggtgaccagacactgcccactgcagtgccaagacggcagcaggactggggctgatagcccaccccgcccccactgcagctcccacaaagcactctaagggagatggggctgaggacagctcaaaaaggagaggacaggcctggcaggggcccactggtgcccagcaccaaggcgagctccgggctcagaccaactccaaggtcagctggccacaggcccaggcctcctctgaagcagggaccagagggagccaggcagctgtgtacagtgagaagggatccggatgggggagctctgtacagagggctggtgattgtaaaaatttcttttgtaaagtagaagttgggggtggggtgggtgctggctgcaaaaatttctggcttctcttacccctattgcccccggcaataaattgtttctatatgccagagccatgcaaagttcttggtggggagggggaaagggcccatgctggcttaggggctctaaggcgcccagactcacaggtgctgtgaagagctcctttattggggtgatggaatcggttccaaagagctggtttactgctgtgaag

SEQ ID NO: 283136 - DNA, 2189 bp, Homo sapiens
agctcacgtgacggactcagtagaccgccactggctgtgcacgttatggggtttccacctagggctcggcctgaggcttgtaacactccgttttcccccgagtcacaggggcagtcttgcccctcgcagctgggtcgcggtgtctctcaaaggtccccctctacaggggcttcgtgaggcccgggcccacagggcgctcggtcccggaagtgacgtctcccagaggggccggaagtggcagtggagggagggaagatggcggaggtgggggagataatcgagggctgccgcctacccgtgctgcggcggaaccaggacaacgaagatgagtggcccctggccgagatcctgagcgtgaaggacatcagtggccggaagcttttctacgtccattacattgacttcaacaaacgtctggatgaatgggtgacgcatgagcggctggacctaaagaagatccagttccccaagaaagaggccaagacccccactaagaacggacttcctgggtcccgtcctggctctccagagagagaggtgaaacggaaggtggaggtggtttcaccagcaactccagtgcccagcgagacagccccggcctcggtttttccccagaatggagccgcccgtagggcagtggcagcccagccaggacggaagcgaaaatcgaattgtttgggcactgatgaggactcccaggacagctctgatggaataccgtcagcaccacgcatgactggcagcctggtgtctgatcgaagccacgacgacatcgtcacccggatgaagaacattgagtgcattgagctgggccggcaccgcctcaagccgtggtacttctccccgtacccacaggaactcaccacattgcctgtcctctacctgtgcgagttctgcctcaagtacggccgtagtctcaagtgtcttcagcgtcatttgaccaagtgtgacctacgacatcctccaggcaatgagatttaccgcaagggcaccatctccttctttgagattgatggacgtaagaacaagagttattcccagaacctgtgtcttttggccaagtgtttccttgaccataagacactgtactatgacacagaccctttcctcttctacgtcatgacagagtatgactgtaagggcttccacatcgtgggctacttctccaaggagaaagaatcaacggaagactacaatgtggcctgcatcctaaccctgcctccctaccagcgccggggctacggcaagctgctgatcgagttcagctatgaactctccaaagtggaagggaaaacagggacccctgagaagcccctctcagaccttggcctcctatcctatcgaagctactggtcccagaccatcctggagatcctgatggggctgaagtcggagagcggggagaggccacagatcaccatcaagtgagcctggcgctgtctacctgggggtacatggcatggcttgtctgttcctgggctttctctctcagggctcctggggacagataaaggtcctcagggaacctgacctgtgctctcccacagtgagattagtgaaatcaccagcatcaagaaggaggatgtcatctccactctgcagtacctcaatctcatcaactactacaagggccagtacatcctcacactgtcagaggacatcgtggatggccatgagcgggccatgctcaagcggctcctgcggatcgactccaagtgtctgcacttcactcccaaggactggagcaagagggggaagtggtgaccagacactgcccactgcagtgccaagacggcagcaggactggggctgatagcccaccccgcccccactgcagctcccacaaagcactctaagggagatggggctgaggacagctcaaaaaggagaggacaggcctggcaggggcccactggtgcccagcaccaaggcgagctccgggctcagaccaactccaaggtcagctggccacaggcccaggcctcctctgaagcagggaccagagggagccaggcagctgtgtacagtgagaagggatccggatgggggagctctgtacagagggctggtgattgtaaaaatttcttttgtaaagtagaagttgggggtggggtgggtgctggctgcaaaaatttctggcttctcttacccctattgcccccggcaataaattgtttctatatgccaga

SEQ ID NO: 283137 - DNA, 1851 bp, Homo sapiens
taggagagacctaagtgctggagcttagggatccggcctgggggtggagttcaggtcgtggaagggtggagtctcatagcctggcctgtctaaggcccctgtctatgctattctcatagccctggccgagatcctgagcgtgaaggacatcagtggccggaagcttttctacgtccattacattgacttcaacaaacgtctggatgaatgggtgacgcatgagcggctggacctaaagaagatccagttccccaagaaagaggccaagacccccactaagaacggacttcctgggtcccgtcctggctctccagagagagaggtgaaacggaaggtggaggtggtttcaccagcaactccagtgcccagcgagacagccccggcctcggtttttccccagaatggagccgcccgtagggcagtggcagcccagccaggacggaagcgaaaatcgaattgtttgggcactgatgaggactcccaggacagctctgatggaataccgtcagcaccacgcatgactggcagcctggtgtctgatcgaagccacgacgacatcgtcacccggatgaagaacattgagtgcattgagctgggccggcaccgcctcaagccgtggtacttctccccgtacccacaggaactcaccacattgcctgtcctctacctgtgcgagttctgcctcaagtacggccgtagtctcaagtgtcttcagcgtcatttgaccaagtgtgacctacgacatcctccaggcaatgagatttaccgcaagggcaccatctccttctttgagattgatggacgtaagaacaagagttattcccagaacctgtgtcttttggccaagtgtttccttgaccataagacactgtactatgacacagaccctttcctcttctacgtcatgacagagtatgactgtaagggcttccacatcgtgggctacttctccaaggagaaagaatcaacggaagactacaatgtggcctgcatcctaaccctgcctccctaccagcgccggggctacggcaagctgctgatcgagttcagctatgaactctccaaagtggaagggaaaacagggacccctgagaagcccctctcagaccttggcctcctatcctatcgaagctactggtcccagaccatcctggagatcctgatggggctgaagtcggagagcggggagaggccacagatcaccatcaatgagattagtgaaatcaccagcatcaagaaggaggatgtcatctccactctgcagtacctcaatctcatcaactactacaagggccagtacatcctcacactgtcagaggacatcgtggatggccatgagcgggccatgctcaagcggctcctgcggatcgactccaagtgtctgcacttcactcccaaggactggagcaagagggggaagtggtgaccagacactgcccactgcagtgccaagacggcagcaggactggggctgatagcccaccccgcccccactgcagctcccacaaagcactctaagggagatggggctgaggacagctcaaaaaggagaggacaggcctggcaggggcccactggtgcccagcaccaaggcgagctccgggctcagaccaactccaaggtcagctggccacaggcccaggcctcctctgaagcagggaccagagggagccaggcagctgtgtacagtgagaagggatccggatgggggagctctgtacagagggctggtgattgtaaaaatttcttttgtaaagtagaagttgggggtggggtgggtgctggctgcaaaaatttctggcttctcttacccctattgcccccggcaataaattgtttctatatgccaga

SEQ ID NO: 283138 - DNA, 2281 bp, Homo sapiens
agctcacgtgacggactcagtagaccgccactggctgtgcacgttatggggtttccacctagggctcggcctgaggcttgtaacactccgttttcccccgagtcacaggggcagtcttgcccctcgcagctgggtcgcggtgtctctcaaaggtccccctctacaggggcttcgtgaggcccgggcccacagggcgctcggtcccggaagtgacgtctcccagaggggccggaagtggcagtggagggagggaagatggcggaggtgggggagataatcgagggctgccgcctacccgtgctgcggcggaaccaggacaacgaagatgagtggcccctggccgagatcctgagcgtgaaggacatcagtggccggaagcttttctacgtccattacattgacttcaacaaacgtctggatgaatgggtgacgcatgagcggctggacctaaagaagatccagttccccaagaaagaggccaagacccccactaagaacggacttcctgggtcccgtcctggctctccagagagagaggtgaaacggaaggtggaggtggtttcaccagcaactccagtgcccagcgagacagccccggcctcggtttttccccagaatggagccgcccgtagggcagtggcagcccagccaggacggaagcgaaaatcgaattgtttgggcactgatgaggactcccaggacagctctgatggaataccgtcagcaccacgcatgactggcagcctggtgtctgatcgaagccacgacgacatcgtcacccggatgaagaacattgagtgcattgagctgggccggcaccgcctcaagccgtggtacttctccccgtacccacaggaactcaccacattgcctgtcctctacctgtgcgagttctgcctcaagtacggccgtagtctcaagtgtcttcagcgtcatttgaccaagtgtgacctacgacatcctccaggcaatgagatttaccgcaagggcaccatctccttctttgagattgatggacgtaagaacaagagttattcccagaacctgtgtcttttggccaagtgtttccttgaccataagacactgtactatgacacagaccctttcctcttctacgtcatgacagagtatgactgtaagggcttccacatcgtgggctacttctccaaggagaaagaatcaacggaagactacaatgtggcctgcatcctaaccctgcctccctaccagcgccggggctacggcaagctgctgatcgagttcagctatgaactctccaaagtggaagggaaaacagggacccctgagaagcccctctcagaccttggcctcctatcctatcgaagctactggtcccagaccatcctggagatcctgatggggctgaagtcggagagcggggagaggccacagatcaccatcaagtgagcctggcgctgtctacctgggggtacatggcatggcttgtctgttcctgggctttctctctcagggctcctggggacagataaaggtcctcagggaacctgacctgtgctctcccacagtgagattagtgaaatcaccagcatcaagaaggaggatgtcatctccactctgcagtacctcaatctcatcaactactacaaggtagggaggcaggcaggggagacaggtgtgtgggatgcagagtgcagtcctctgtgggctgaccacctgctgaacccatctcctctgcccagggccagtacatcctcacactgtcagaggacatcgtggatggccatgagcgggccatgctcaagcggctcctgcggatcgactccaagtgtctgcacttcactcccaaggactggagcaagagggggaagtggtgaccagacactgcccactgcagtgccaagacggcagcaggactggggctgatagcccaccccgcccccactgcagctcccacaaagcactctaagggagatggggctgaggacagctcaaaaaggagaggacaggcctggcaggggcccactggtgcccagcaccaaggcgagctccgggctcagaccaactccaaggtcagctggccacaggcccaggcctcctctgaagcagggaccagagggagccaggcagctgtgtacagtgagaagggatccggatgggggagctctgtacagagggctggtgattgtaaaaatttcttttgtaaagtagaagttgggggtggggtgggtgctggctgcaaaaatttctggcttctcttacccctattgcccccggcaataaattgtttctatatgccaga

SEQ ID NO: 283139 - DNA, 1926 bp, Homo sapiens
ctttgatgaaggggcgtggctcttagctgctccgagagccctggccgagatcctgagcgtgaaggacatcagtggccggaagcttttctacgtccattacattgacttcaacaaacgtctggatgaatgggtgacgcatgagcggctggacctaaagaagatccagttccccaagaaagaggccaagacccccactaagaacggacttcctgggtcccgtcctggctctccagagagagaggtgccggcctcggcgcaggccagcgggaagaccttgccaatcccggtccagatcacactccgcttcaacctgcccaaggagcgggaggccattcccggtggcgagcctgaccagccgctctcctccagctcctgcctgcagcccaaccaccgctcaacgaaacggaaggtggaggtggtttcaccagcaactccagtgcccagcgagacagccccggcctcggtttttccccagaatggagccgcccgtagggcagtggcagcccagccaggacggaagcgaaaatcgaattgtttgggcactgatgaggactcccaggacagctctgatggaataccgtcagcaccacgcatgactggcagcctggtgtctgatcgaagccacgacgacatcgtcacccggatgaagaacattgagtgcattgagctgggccggcaccgcctcaagccgtggtacttctccccgtacccacaggaactcaccacattgcctgtcctctacctgtgcgagttctgcctcaagtacggccgtagtctcaagtgtcttcagcgtcatttgaccaagtgtgacctacgacatcctccaggcaatgagatttaccgcaagggcaccatctccttctttgagattgatggacgtaagaacaagagttattcccagaacctgtgtcttttggccaagtgtttccttgaccataagacactgtactatgacacagaccctttcctcttctacgtcatgacagagtatgactgtaagggcttccacatcgtgggctacttctccaaggagaaagaatcaacggaagactacaatgtggcctgcatcctaaccctgcctccctaccagcgccggggctacggcaagctgctgatcgagttcagctatgaactctccaaagtggaagggaaaacagggacccctgagaagcccctctcagaccttggcctcctatcctatcgaagctactggtcccagaccatcctggagatcctgatggggctgaagtcggagagcggggagaggccacagatcaccatcaatgagattagtgaaatcaccagcatcaagaaggaggatgtcatctccactctgcagtacctcaatctcatcaactactacaagggccagtacatcctcacactgtcagaggacatcgtggatggccatgagcgggccatgctcaagcggctcctgcggatcgactccaagtgtctgcacttcactcccaaggactggagcaagagggggaagtggtgaccagacactgcccactgcagtgccaagacggcagcaggactggggctgatagcccaccccgcccccactgcagctcccacaaagcactctaagggagatggggctgaggacagctcaaaaaggagaggacaggcctggcaggggcccactggtgcccagcaccaaggcgagctccgggctcagaccaactccaaggtcagctggccacaggcccaggcctcctctgaagcagggaccagagggagccaggcagctgtgtacagtgagaagggatccggatgggggagctctgtacagagggctggtgattgtaaaaatttcttttgtaaagtagaagttgggggtggggtgggtgctggctgcaaaaatttctggcttctcttacccctattgcccccggcaataaattgtttctatatgccaga

SEQ ID NO: 283140 - DNA, 1691 bp, Homo sapiens
agctcacgtgacggactcagtagaccgccactggctgtgcacgttatggggtttccacctagggctcggcctgaggcttgtaacactccgttttcccccgagtcacaggggcagtcttgcccctcgcagctgggtcgcggtgtctctcaaaggtccccctctacaggggcttcgtgaggcccgggcccacagggcgctcggtcccggaagtgacgtctcccagaggggccggaagtggcagtggagggagggaagatggcggaggtgggggagataatcgagggctgccgcctacccgtgctgcggcggaaccaggactcccaggacagctctgatggaataccgtcagcaccacgcatgactggcagcctggtgtctgatcgaagccacgacgacatcgtcacccggatgaagaacattgagtgcattgagctgggccggcaccgcctcaagccgtggtacttctccccgtacccacaggaactcaccacattgcctgtcctctacctgtgcgagttctgcctcaagtacggccgtagtctcaagtgtcttcagcgtcatttgaccaagtgtgacctacgacatcctccaggcaatgagatttaccgcaagggcaccatctccttctttgagattgatggacgtaagaacaagagttattcccagaacctgtgtcttttggccaagtgtttccttgaccataagacactgtactatgacacagaccctttcctcttctacgtcatgacagagtatgactgtaagggcttccacatcgtgggctacttctccaaggagaaagaatcaacggaagactacaatgtggcctgcatcctaaccctgcctccctaccagcgccggggctacggcaagctgctgatcgagttcagctatgaactctccaaagtggaagggaaaacagggacccctgagaagcccctctcagaccttggcctcctatcctatcgaagctactggtcccagaccatcctggagatcctgatggggctgaagtcggagagcggggagaggccacagatcaccatcaatgagattagtgaaatcaccagcatcaagaaggaggatgtcatctccactctgcagtacctcaatctcatcaactactacaagggccagtacatcctcacactgtcagaggacatcgtggatggccatgagcgggccatgctcaagcggctcctgcggatcgactccaagtgtctgcacttcactcccaaggactggagcaagagggggaagtggtgaccagacactgcccactgcagtgccaagacggcagcaggactggggctgatagcccaccccgcccccactgcagctcccacaaagcactctaagggagatggggctgaggacagctcaaaaaggagaggacaggcctggcaggggcccactggtgcccagcaccaaggcgagctccgggctcagaccaactccaaggtcagctggccacaggcccaggcctcctctgaagcagggaccagagggagccaggcagctgtgtacagtgagaagggatccggatgggggagctctgtacagagggctggtgattgtaaaaatttcttttgtaaagtagaagttgggggtggggtgggtgctggctgcaaaaatttctggcttctcttacccctattgcccccggcaataaattgtttctatatgccaga

SEQ ID NO: 283141 - DNA, 1428 bp, Homo sapiens
  misc_feature (3)..(3): n is a, c, g, or t
tgntcacagtgggcccctgccaggcctgtcctctcctttgggcactgatgaggactcccaggacagctctgatggaataccgtcagcaccacgcatgactggcagcctggtgtctgatcgaagccacgacgacatcgtcacccggatgaagaacattgagtgcattgagctgggccggcaccgcctcaagccgtggtacttctccccgtacccacaggaactcaccacattgcctgtcctctacctgtgcgagttctgcctcaagtacggccgtagtctcaagtgtcttcagcgtcatttgaccaagtgtgacctacgacatcctccaggcaatgagatttaccgcaagggcaccatctccttctttgagattgatggacgtaagaacaagagttattcccagaacctgtgtcttttggccaagtgtttccttgaccataagacactgtactatgacacagaccctttcctcttctacgtcatgacagagtatgactgtaagggcttccacatcgtgggctacttctccaaggagaaagaatcaacggaagactacaatgtggcctgcatcctaaccctgcctccctaccagcgccggggctacggcaagctgctgatcgagttcagctatgaactctccaaagtggaagggaaaacagggacccctgagaagcccctctcagaccttggcctcctatcctatcgaagctactggtcccagaccatcctggagatcctgatggggctgaagtcggagagcggggagaggccacagatcaccatcaatgagattagtgaaatcaccagcatcaagaaggaggatgtcatctccactctgcagtacctcaatctcatcaactactacaagggccagtacatcctcacactgtcagaggacatcgtggatggccatgagcgggccatgctcaagcggctcctgcggatcgactccaagtgtctgcacttcactcccaaggactggagcaagagggggaagtggtgaccagacactgcccactgcagtgccaagacggcagcaggactggggctgatagcccaccccgcccccactgcagctcccacaaagcactctaagggagatggggctgaggacagctcaaaaaggagaggacaggcctggcaggggcccactggtgcccagcaccaaggcgagctccgggctcagaccaactccaaggtcagctggccacaggcccaggcctcctctgaagcagggaccagagggagccaggcagctgtgtacagtgagaagggatccggatgggggagctctgtacagagggctggtgattgtaaaaatttcttttgtaaagtagaagttgggggtggggtgggtgctggctgcaaaaatttctggcttctcttacccctattgcccccggcaataaattgtttctatatgccaga

SEQ ID NO: 283142 - DNA, 2302 bp, Homo sapiens
agctcacgtgacggactcagtagaccgccactggctgtgcacgttatggggtttccacctagggctcggcctgaggcttgtaacactccgttttcccccgagtcacaggggcagtcttgcccctcgcagctgggtcgcggtgtctctcaaaggtccccctctacaggggcttcgtgaggcccgggcccacagggcgctcggtcccggaagtgacgtctcccagaggggccggaagtggcagtggagggagggaagatggcggaggtgggggagataatcgagggctgccgcctacccgtgctgcggcggaaccaggacaacgaagatgagtggcccctggccgagatcctgagcgtgaaggacatcagtggccggaagcttttctacgtccattacattgacttcaacaaacgtctggatgaatgggtgacgcatgagcggctggacctaaagaagatccagttccccaagaaagaggccaagacccccactaagaacggacttcctgggtcccgtcctggctctccagagagagaggtgaaacggaaggtggaggtggtttcaccagcaactccagtgcccagcgagacagccccggcctcggtttttccccagaatggagccgcccgtagggcagtggcagcccagccaggacggaagcgaaaatcgaattgtttgggcactgatgaggactcccaggacagctctgatggaataccgtcagcaccacgcatgactggcagcctggtgtctgatcgaagccacgacgacatcgtcacccggatgaagaacattgagtgcattgagctgggccggcaccgcctcaagccgtggtacttctccccgtacccacaggaactcaccacattgcctgtcctctacctgtgcgagttctgcctcaagtacggccgtagtctcaagtgtcttcagcgtcatttgaccaagtgtgacctacgacatcctccaggcaatgagatttaccgcaagggcaccatctccttctttgagattgatggacgtaagaacaagagttattcccagaacctgtgtcttttggccaagtgtttccttgaccataagacactgtactatgacacagaccctttcctcttctacgtcatgacagagtatgactgtaagggcttccacatcgtgggctacttctccaaggagaaagaatcaacggaagactacaatgtggcctgcatcctaaccctgcctccctaccagcgccggggctacggcaagctgctgatcgagttcagctatgaactctccaaagtggaagggaaaacagggacccctgagaagcccctctcagaccttggcctcctatcctatcgaagctactggtcccagaccatcctggagatcctgatggggctgaagtcggagagcggggagaggccacagatcaccatcaatgagattagtgaaatcaccagcatcaagaaggaggatgtcatctccactctgcagtacctcaatctcatcaactactacaaggtagggaggcaggcaggggagacaggtgtgtgggatgcagagtgcagtcctctgtgggctgaccacctgctgaacccatctcctctgcccagggccagtacatcctcacactgtcagaggacatcgtggatggccatgagcgggccatgctcaagcggctcctgcggatcgactccaagtgtctgcacttcactcccaaggactggagcaagagggggaagtggtgaccagacactgcccactgcagtgccaagacggcagcaggactggggctgatagcccaccccgcccccactgcagctcccacaaagcactctaagggagatggggctgaggacagctcaaaaaggagaggacaggcctggcaggggcccactggtgcccagcaccaaggcgagctccgggctcagaccaactccaaggtcagctggccacaggcccaggcctcctctgaagcagggaccagagggagccaggcagctgtgtacagtgagaagggatccggatgggggagctctgtacagagggctggtgattgtaaaaatttcttttgtaaagtagaagttgggggtggggtgggtgctggctgcaaaaatttctggcttctcttacccctattgcccccggcaataaattgtttctatatgccagagccatgcaaagttcttggtggggagggggaaagggcccatgctggcttaggggctctaaggcgcccagactcacaggtgctgtgaagagctcctttattggggtgatggaatcggttccaaagagctggtttactgctgtgaag

SEQ ID NO: 283143 - DNA, 1843 bp, Homo sapiens
tttatggtccattcgagaaattttattggttaaatgatgcccagatggggtcacatcctcagaacttctcagcctggtagcacaagtggatgcttgaagaaactcagtcttggaactcagacagcaatggagacgggatgtgagtgggaccagcaaggggctaaggtccattatgagggtgaggaagggcttctagaagtaacaaacatcccaggtccctgactggggagaatgaagacactgaccaagagatgtgaagccactcagggctgtgcagggtctgaggatctcactggggacggcctcccagcggccagctatcagcacgagttggagggaaagagccatggtgggggtcagtcacgtggctcccaggaatggtctccccgacttaggaagcaccttggtgcaccttttctccttgcatcctcacaaccacccagtcaggccactcaagtcttacagcaggtgacactcccaaggtcccagctaggaggactttgagaattcaagcattctcaggtctggattagagacaggaatctgtctccacttccttacatggctagacacagagcccgggagggcaaaggaaaattggaggccccttcttcccatgagccattttctctgcatcccctgcccataagccttcactggcctctgatcaccctcatggttgactgcagctgctcctctcagtgccctcatgccctccactgtgctcagcgcacggaaagagtgaatactcagttcttcctgagggaactgaggcacagagaagtggagggcatagaactgccaagtggcagggccatgataggaactaggcagcctgccttggcaacctgtgtttttaaatgttgcttatgttcatctgtgacctcttactcaccctctcctgctccattgctttaggctatgaactctccaaagtggaagggaaaacagggacccctgagaagcccctctcagaccttggcctcctatcctatcgaagctactggtcccagaccatcctggagatcctgatggggctgaagtcggagagcggggagaggccacagatcaccatcaagtgagcctggcgctgtctacctgggggtacatggcatggcttgtctgttcctgggctttctctctcagggctcctggggacagataaaggtcctcagggaacctgacctgtgctctcccacagtgagattagtgaaatcaccagcatcaagaaggaggatgtcatctccactctgcagtacctcaatctcatcaactactacaagggccagtacatcctcacactgtcagaggacatcgtggatggccatgagcgggccatgctcaagcggctcctgcggatcgactccaagtgtctgcacttcactcccaaggactggagcaagagggggaagtggtgaccagacactgcccactgcagtgccaagacggcagcaggactggggctgatagcccaccccgcccccactgcagctcccacaaagcactctaagggagatggggctgaggacagctcaaaaaggagaggacaggcctggcaggggcccactggtgcccagcaccaaggcgagctccgggctcagaccaactccaaggtcagctggccacaggcccaggcctcctctgaagcagggaccagagggagccaggcagctgtgtacagtgagaagggatccggatgggggagctctgtacagagggctggtgattgtaaaaatttcttttgtaaagtagaagttgggggtggggtgggtgctggctgcaaaaatttctggcttctcttacccctattgcccccggcaataaattgtttctatatgccaga

SEQ ID NO: 283144 - DNA, 1733 bp, Homo sapiens
aattcggcactaggggaagatggcggaggtgggggagataatcgagggctgccgcctacccgtgctgcggcggaaccaggacaacgaagatgagtggcccctggccgagatcctgagcgtgaaggacatcagtggccggaagcttttctacgtccattacattgacttcaacaaacgtctggatgaatgggtgacgcatgagcggctggacctaaagaagatccagttccccaagaaagaggccaagacccccactaagaacggacttcctgggtcccgtcctggctctccagagagagaggtgaaacggaaggtggaggtggtttcaccagcaactccagtgcccagcgagacagccccggcctcggtttttccccagaatggagccgcccgtagggcagtggcagcccagccaggacggaagcgaaaatcgaattgtttgggcactgatgaggactcccaggacagctctgatggaataccgtcagcaccacgcatgactggcagcctggtgtctgatcgaagccacgacgacatcgtcacccggatgaagaacattgagtgcattgagctgggccggcaccgcctcaagccgtggtacttctccccgtacccacaggaactcaccacattgcctgtcctctacctgtgcgagttctgcctcaagtacggccgtagtctcaagtgtcttcagcgtcatttgaccaagtgtgacctacgacatcctccaggcaatgagatttaccgcaagggcaccatctccttctttgagattgatggacgtaagaacaagagtatgactgtaagggcttccacatcgtgggctacttctccaaggagaaagaatcaacggaagactacaatgtggcctgcatcctaaccctgcctccctaccagcgccggggctacggcaagctgctgatcgagttcagctatgaactctccaaagtggaagggaaaacagggacccctgagaagcccctctcagaccttggcctcctatcctatcgaagctactggtcccagaccatcctggagatcctgatggggctgaagtcggagagcggggagaggccacagatcaccatcaatgagattagtgaaatcaccagcatcaagaaggaggatgtcatctccactctgcagtacctcaatctcatcaactactacaagggccagtacatcctcacactgtcagaggacatcgtggatggccatgagcgggccatgctcaagcggctcctgcggatcgactccaagtgtctgcacttcactcccaaggactggagcaagagggggaagtggtgaccagacactgcccactgcagtgccaagacggcagcaggactggggctgatagcccaccccgcccccactgcagctcccacaaagcactctaagggagatggggctgaggacagctcaaaaaggagaggacaggcctggcaggggcccactggtgcccagcaccaaggcgagctccgggctcagaccaactccaaggtcagctggccacaggcccaggcctcctctgaagcagggaccagagggagccaggcagctgtgtacagtgagaagggatccggatgggggagctctgtacagagggctggtgattgtaaaaatttcttttgtaaagtagaagttgggggtggggtgggtgctggctgcaaaaatttctggcttctcttacccctattgcccccggcaataaattgtttctatatgccaga

SEQ ID NO: 283145 - DNA, 1284 bp, Homo sapiens
cttgcctgactgagcagggaggcactcagacaccatcacacatctggcacacaggcttttcaacactgaggagcagccctgcctaagctgcgggctggtggagtgggtcaggcccagccagggaagaacactcatcacctagcagcctggggcatagcacgaacagtgaagctcctggttgaccctgaaccactggccaggctcaaggcgggatacccagagtggtgacaagccttttctcttgcagagttattcccagaacctgtgtcttttggccaagtgtttccttgaccataagacactgtactatgacacagaccctttcctcttctacgtcatgacagagtatgactgtaagggcttccacatcgtgggctacttctccaaggagaaagaatcaacggaagactacaatgtggcctgcatcctaaccctgcctccctaccagcgccggggctacggcaagctgctgatcgagttcagctatgaactctccaaagtggaagggaaaacagggacccctgagaagcccctctcagaccttggcctcctatcctatcgaagctactggtcccagaccatcctggagatcctgatggggctgaagtcggagagcggggagaggccacagatcaccatcaatgagattagtgaaatcaccagcatcaagaaggaggatgtcatctccactctgcagtacctcaatctcatcaactactacaagggccagtacatcctcacactgtcagaggacatcgtggatggccatgagcgggccatgctcaagcggctcctgcggatcgactccaagtgtctgcacttcactcccaaggactggagcaagagggggaagtggtgaccagacactgcccactgcagtgccaagacggcagcaggactggggctgatagcccaccccgcccccactgcagctcccacaaagcactctaagggagatggggctgaggacagctcaaaaaggagaggacaggcctggcaggggcccactggtgcccagcaccaaggcgagctccgggctcagaccaactccaaggtcagctggccacaggcccaggcctcctctgaagcagggaccagagggagccaggcagctgtgtacagtgagaagggatccggatgggggagctctgtacagagggctggtgattgtaaaaatttcttttgtaaagtagaagttgggggtggggtgggtgctggctgcaaaaatttctggcttctcttacccctattgcccccggcaataaattgtttctatatgccaga

SEQ ID NO: 283146 - DNA, 1618 bp, Homo sapiens
tttatggtccattcgagaaattttattggttaaatgatgcccagatggggtcacatcctcagaacttctcagcctggtagcacaagtggatgcttgaagaaactcagtcttggaactcagacagcaatggagacgggatgtgagtgggaccagcaaggggctaaggtccattatgagggtgaggatctcactggggacggcctcccagcggccagctatcagcacgagttggagggaaagagccatggtgggggtcagtcacgtggctcccaggaatggtctccccgacttaggaagcaccttggtgcaccttttctccttgcatcctcacaaccacccagtcaggccactcaagtcttacagcaggtgacactcccaaggtcccagctaggaggactttgagaattcaagcattctcaggtctggattagagacaggaatctgtctccacttccttacatggctagacacagagcccgggagggcaaaggaaaattggaggccccttcttcccatgagccattttctctgcatcccctgcccataagccttcactggcctctgatcaccctcatggttgactgcagctgctcctctcagtgccctcatgccctccactgtgctcagcgcacggaaagagtgaatactcagttcttcctgagggaactgaggcacagagaagtggagggcatagaactgccaagtggcagggccatgataggaactaggcagcctgccttggcaacctgtgtttttaaatgttgcttatgttcatctgtgacctcttactcaccctctcctgctccattgctttaggctatgaactctccaaagtggaagggaaaacagggacccctgagaagcccctctcagaccttggcctcctatcctatcgaagctactggtcccagaccatcctggagatcctgatggggctgaagtcggagagcggggagaggccacagatcaccatcaatgagattagtgaaatcaccagcatcaagaaggaggatgtcatctccactctgcagtacctcaatctcatcaactactacaagggccagtacatcctcacactgtcagaggacatcgtggatggccatgagcgggccatgctcaagcggctcctgcggatcgactccaagtgtctgcacttcactcccaaggactggagcaagagggggaagtggtgaccagacactgcccactgcagtgccaagacggcagcaggactggggctgatagcccaccccgcccccactgcagctcccacaaagcactctaagggagatggggctgaggacagctcaaaaaggagaggacaggcctggcaggggcccactggtgcccagcaccaaggcgagctccgggctcagaccaactccaaggtcagctggccacaggcccaggcctcctctgaagcagggaccagagggagccaggcagctgtgtacagtgagaagggatccggatgggggagctctgtacagagggctggtgattgtaaaaatttcttttgtaaagtagaagttgggggtggggtgggtgctggctgcaaaaatttctggcttctcttacccctattgcccccggcaataaattgtttctatatgccaga

SEQ ID NO: 283147 - DNA, 1468 bp, Homo sapiens
tttatggtccattcgagaaattttattggttaaatgatgcccagatggggtcacatcctcagaacttctcagcctggtagcacaagtggatgcttgaagaaactcagttcacgtggctcccaggaatggtctccccgacttaggaagcaccttggtgcaccttttctccttgcatcctcacaaccacccagtcaggccactcaagtcttacagcaggtgacactcccaaggtcccagctaggaggactttgagaattcaagcattctcaggtctggattagagacaggaatctgtctccacttccttacatggctagacacagagcccgggagggcaaaggaaaattggaggccccttcttcccatgagccattttctctgcatcccctgcccataagccttcactggcctctgatcaccctcatggttgactgcagctgctcctctcagtgccctcatgccctccactgtgctcagcgcacggaaagagtgaatactcagttcttcctgagggaactgaggcacagagaagtggagggcatagaactgccaagtggcagggccatgataggaactaggcagcctgccttggcaacctgtgtttttaaatgttgcttatgttcatctgtgacctcttactcaccctctcctgctccattgctttaggctatgaactctccaaagtggaagggaaaacagggacccctgagaagcccctctcagaccttggcctcctatcctatcgaagctactggtcccagaccatcctggagatcctgatggggctgaagtcggagagcggggagaggccacagatcaccatcaatgagattagtgaaatcaccagcatcaagaaggaggatgtcatctccactctgcagtacctcaatctcatcaactactacaagggccagtacatcctcacactgtcagaggacatcgtggatggccatgagcgggccatgctcaagcggctcctgcggatcgactccaagtgtctgcacttcactcccaaggactggagcaagagggggaagtggtgaccagacactgcccactgcagtgccaagacggcagcaggactggggctgatagcccaccccgcccccactgcagctcccacaaagcactctaagggagatggggctgaggacagctcaaaaaggagaggacaggcctggcaggggcccactggtgcccagcaccaaggcgagctccgggctcagaccaactccaaggtcagctggccacaggcccaggcctcctctgaagcagggaccagagggagccaggcagctgtgtacagtgagaagggatccggatgggggagctctgtacagagggctggtgattgtaaaaatttcttttgtaaagtagaagttgggggtggggtgggtgctggctgcaaaaatttctggcttctcttacccctattgcccccggcaataaattgtttctatatgccaga

SEQ ID NO: 283148 - DNA, 1241 bp, Homo sapiens
agctcacgtgacggactcagtagaccgccactggctgtgcacgttatggggtttccacctagggctcggcctgaggcttgtaacactccgttttcccccgagtcacaggggcagtcttgcccctcgcagctgggtcgcggtgtctctcaaaggtccccctctacaggggcttcgtgaggcccgggcccacagggcgctcggtcccggaagtgacgtctcccagaggggccggaagtggcagtggagggagggaagatggcggaggtgggggagataatcgagggctgccgcctacccgtgctgcggcggaaccaggacaacgaagatgagtggcccctggccgagatcctgagcgtgaaggacatcagtggccggaagcttttctacgtccattacattgacttcaacaaacgtctggatgaatgggtgacgcatgagcggctggacctaaagaagatccagttccccaagaaagaggccaagacccccactaagaacggacttcctgggtcccgtcctggctctccagagagagaggtgaaacggaaggtggaggtggtttcaccagcaactccagtgcccagcgagacagccccggcctcggtttttccccagaatggagccgcccgtagggcagtggcagcccagccaggacggaagcgaaaatcgaattgtttgggcactgatgaggactcccaggacagctctgatggaataccgtcagcaccacgcatgactggcagcctggtgtctgatcgaagccacgacgacatcgtcacccggatgaagaacattgagtgcattgagctgggccggcaccgcctcaagccgtggtacttctccccgtacccacaggaactcaccacattgcctgtcctctacctgtgcgagttctgcctcaagtacggccgtagtctcaagtgtcttcagcgtcatttgaccaagtgtgacctacgacatcctccaggcaatgagatttaccgcaagggcaccatctccttctttgagattgatggacgtaagaacaagagttattcccagaacctgtgtcttttggccaagtgtttccttgaccataagacactgtactatgacacagaccctttcctcttctacgtcatgacagctctgatggaataccgtcagcaccacgcatgactggcagcctggtgtctgatcgaagccacgacgacatcgtcacccggatgaagaacattgagtgcattgagctgggccggcac

SEQ ID NO: 283149 - DNA, 1036 bp, Homo sapiens
tttatggtccattcgagaaattttattggttaaatgatgcccagatggggtcacatcctcagaacttctcagcctggtagcacaagtggatgcttgaagaaactcagtcttggaactcagacagcaatggagatggggctgaagtcggagagcggggagaggccacagatcaccatcaagtgagcctggcgctgtctacctgggggtacatggcatggcttgtctgttcctgggctttctctctcagggctcctggggacagataaaggtcctcagggaacctgacctgtgctctcccacagtgagattagtgaaatcaccagcatcaagaaggaggatgtcatctccactctgcagtacctcaatctcatcaactactacaaggtagggaggcaggcaggggagacaggtgtgtgggatgcagagtgcagtcctctgtgggctgaccacctgctgaacccatctcctctgcccagggccagtacatcctcacactgtcagaggacatcgtggatggccatgagcgggccatgctcaagcggctcctgcggatcgactccaagtgtctgcacttcactcccaaggactggagcaagagggggaagtggtgaccagacactgcccactgcagtgccaagacggcagcaggactggggctgatagcccaccccgcccccactgcagctcccacaaagcactctaagggagatggggctgaggacagctcaaaaaggagaggacaggcctggcaggggcccactggtgcccagcaccaaggcgagctccgggctcagaccaactccaaggtcagctggccacaggcccaggcctcctctgaagcagggaccagagggagccaggcagctgtgtacagtgagaagggatccggatgggggagctctgtacagagggctggtgattgtaaaaatttcttttgtaaagtagaagttgggggtggggtgggtgctggctgcaaaaatttctggcttctcttacccctattgcccccggcaataaattgtttctatatgccaga

SEQ ID NO: 283150 - DNA, 788 bp, Homo sapiens
tttatggtccattcgagaaattttattggttaaatgatgcccagatggggtcacatcctcagaacttctcagcctggtagcacaagaggatgtcatctccactctgcagtacctcaatctcatcaactactacaaggtagggaggcaggcaggggagacaggtgtgtgggatgcagagtgcagtcctctgtgggctgaccacctgctgaacccatctcctctgcccagggccagtacatcctcacactgtcagaggacatcgtggatggccatgagcgggccatgctcaagcggctcctgcggatcgactccaagtgtctgcacttcactcccaaggactggagcaagagggggaagtggtgaccagacactgcccactgcagtgccaagacggcagcaggactggggctgatagcccaccccgcccccactgcagctcccacaaagcactctaagggagatggggctgaggacagctcaaaaaggagaggacaggcctggcaggggcccactggtgcccagcaccaaggcgagctccgggctcagaccaactccaaggtcagctggccacaggcccaggcctcctctgaagcagggaccagagggagccaggcagctgtgtacagtgagaagggatccggatgggggagctctgtacagagggctggtgattgtaaaaatttcttttgtaaagtagaagttgggggtggggtgggtgctggctgcaaaaatttctggcttctcttacccctattgcccccggcaataaattgtttctatatgccaga

SEQ ID NO: 283151 - DNA, 1818 bp, Homo sapiens
agctcacgtgacggactcagtagaccgccactggctgtgcacgttatggggtttccacctagggctcggcctgaggcttgtaacactccgttttcccccgagtcacaggggcagtcttgcccctcgcagctgggtcgcggtgtctctcaaaggtccccctctacaggggcttcgtgaggcccgggcccacagggcgctcggtcccggaagtgacgtctcccagaggggccggaagtggcagtggagggagggaagatggcggaggtgggggagataatcgagggctgccgcctacccgtgctgcggcggaaccaggacaacgaagatgagtggcccctggccgagatcctgagcgtgaaggacatcagtggccggaagcttttctacgtccattacattgacttcaacaaacgtctggatgaatgggtgacgcatgagcggctggacctaaagaagatccagttccccaagaaagaggccaagacccccactaagaacggacttcctgggtcccgtcctggctctccagagagagaggtgccggcctcggcgcaggccagcgggaagaccttgccaatcccggtccagatcacactccgcttcaacctgcccaaggagcgggaggccattcccggtggcgagcctgaccagccgctctcctccagctcctgcctgcagcccaaccaccgctcaacgaaacggaaggtggaggtggtttcaccagcaactccagtgcccagcgagacagccccggcctcggtttttccccagaatggagccgcccgtagggcagtggcagcccagccaggacggaagcgaaaatcgaattgtttgggcactgatgaggactcccaggacagctctgatggaataccgtcagcaccacgcatgactggcagcctggtgtctgatcgaagccacgacgacatcgtcacccggatgaagaacattgagtgcattgagctgggccggcaccgcctcaagccgtggtacttctccccgtacccacaggaactcaccacattgcctgtcctctacctgtgcgagttctgcctcaagtacggccgtagtctcaagtgtcttcagcgtcatttggtatgaggggtccagggaggctgccttcccagcaccctccacgttgcccttgttcctgatcctcctctcttccccagaccaagtgtgacctacgacatcctccaggcaatgagatttaccgcaagggcaccatctccttctttgagattgatggacgtaagaacaaggttagtgcttgagaggcagtgaggcgctggggtgaatcaaatgacagcttcttcttgctcaggtaaacactgaccagtcaagccagcagatcagtccagcccatttttattgagttcctgctgtctggcaggtgctggtagccaggaatgagacagtctctgttctctgacagcttagtccatgggagagacagtcataccaatgacctctagctcccagtgtcctaagtgtcatgaaacagagggtaggttagcaggacccaaaggaggtggtcagcagagcttcatagagggttacctttcagccttggtggatgacaaagtggctgaggggatttcttgcagtggtgttctgaagagtaggcatggatgcacaaaggtggtctttgtgaaaggcagagatcattctggttgggaggcagaaaagggaggatgagggaaggctcgtacatgggacagagcttaggtgatgaagatgctgtgttaaccaccattttgtaattattaatgtggacctgggcatccaagtggcagtacccagcagcaggcggttaaa

SEQ ID NO: 283152 - DNA, 1285 bp, Homo sapiens
agctcacgtgacggactcagtagaccgccactggctgtgcacgttatggggtttccacctagggctcggcctgaggcttgtaacactccgttttcccccgagtcacaggggcagtcttgcccctcgcagctgggtcgcggtgtctctcaaaggtccccctctacaggggcttcgtgaggcccgggcccacagggcgctcggtcccggaagtgacgtctcccagaggggccggaagtggcagtggagggagggaagatggcggaggtgggggagataatcgagggctgccgcctacccgtgctgcggcggaaccaggacaacgaagatgagtggcccctggccgagatcctgagcgtgaaggacatcagtggccggaagcttttctacgtccattacattgacttcaacaaacgtctggatgaatgggtgacgcatgagcggctggacctaaagaagatccagttccccaagaaagaggccaagacccccactaagaacggacttcctgggtcccgtcctggctctccagagagagaggtgccggcctcggcgcaggccagcgggaagaccttgccaatcccggtccagatcacactccgcttcaacctgcccaaggagcgggaggccattcccggtggcgagcctgaccagccgctctcctccagctcctgcctgcagcccaaccaccgctcaacgaaacggaaggtggaggtggtttcaccagcaactccagtgcccagcgagacagccccggcctcggtttttccccagaatggagccgcccgtagggcagtggcagcccagccaggacggaagcgaaaatcgaattgtttgggcactgatgaggactcccaggacagctctgatggaataccgtcagcaccacgcatgactggcagcctggtgtctgatcgaagccacgacgacatcgtcacccggatgaagaacattgagtgcattgagctgggccggcaccgcctcaagccgtggtacttctccccgtacccactggtgcccagcaccaaggcgagctccgggctcagaccaactccaaggtcagctggccacaggcccaggcctcctctgaagcagggaccagagggagccaggcagctgtgtacagtgagaagggatccggatgggggagctctgtacagagggctggtgattgtaaaaatttcttttgtaaagtagaagttgggggtggggtgggtgctggctgcaaaaatttctggcttctcttacccctattgcccccggcaataaattgtttctatatgccaga

SEQ ID NO: 283153 - DNA, 806 bp, Homo sapiens
agctcacgtgacggactcagtagaccgccactggctgtgcacgttatggggtttccacctagggctcggcctgaggcttgtaacactccgttttcccccgagtcacaggggcagtcttgcccctcgcagctgggtcgcggtgtctctcaaaggtccccctctacaggggcttcgtgaggcccgggcccacagggcgctcggtcccggaagtgacgtctcccagaggggccggaagtggcagtggagggagggaagatggcggaggtgggggagataatcgagggctgccgcctacccgtgctgcggcggaaccaggacaacgaagatgagtggcccctggccgagatcctgagcgtgaaggacatcagtggccggaagcttttctacgtccattacattgacttcaacaaacgtctggatgaatgggtgacgcatgagcggctggacctaaagaagatccagttccccaagaaagaggccaagacccccactaagaacggacttcctgggtcccgtcctggctctccagagagagaggtgaaacggaaggtggaggtggtttcaccagcaactccagtgcccagcgagacagccccggcctcctctgaagcagggaccagagggagccaggcagctgtgtacagtgagaagggatccggatgggggagctctgtacagagggctggtgattgtaaaaatttcttttgtaaagtagaagttgggggtggggtgggtgctggctgcaaaaatttctggcttctcttacccctattgcccccggcaataaattgtttctatatgccaga

SEQ ID NO: 283154 - DNA, 571 bp, Homo sapiens
atcctttagggtttcaggttttttatctggaaattggggatcatggtacctcccccttagggttgctgttaggcttgaaggaaacctgtcaaagggctgtgagctgtggtgtcctgctgagctgtctcttacaacctggtattttccactggccctgggcaggactcccaggacagctctgatggaataccgtcagcaccacgcatgactggcagcctggtgtctgatcgaagccacgacgacatcgtcacccggatgaagaacattgagtgcattgagctgggccggcaccgcctcaagccgtggtacttctccccgtacccacaggaactcaccacattgcctgtcctctacctgtgcgagttctgcctcaagtacggccgtagtctcaagtgtcttcagcgtcatttggtatgaggggtccagggaggctgccttcccagcaccctccacgttgcccttgttcctgatcctcctctcttccccagaccaagtgtgacctacgacatcctccaggcaatgagatttaccgcaagggcaccatctccttctttgagattgatggacgtaa

SEQ ID NO: 283155 - DNA, 378 bp, Homo sapiens
ccctgtcctgagccagatcccttccctgacactcacctgtcccccttctccaggagaaagaatcaacggaagactacaatgtggcctgcatcctaaccctgcctccctaccagcgccggggctacggcaagctgctgatcgagttcagtgagtatgtgtgctgcggccagggggtagtggacccactatcggtgcctcacaggcagatgggccaggctactgtgattctcaaccctggctgtgcagcccagcctctaggggaaccagccagaaataacagtggcactctcccggggttctctccgttcaggctgactgccctgcttatctggggtaggttctcagccccccagtttgctccttggccagggttctaag

SEQ ID NO: 283156 - DNA, 2222 bp, Homo sapiens
agctcacgtgacggactcagtagaccgccactggctgtgcacgttatggggtttccacctagggctcggcctgaggcttgtaacactccgttttcccccgagtcacaggggcagtcttgcccctcgcagctgggtcgcggtgtctctcaaaggtccccctctacaggggcttcgtgaggcccgggcccacagggcgctcggtcccggaagtgacgtctcccagaggggccggaagtggcagtggagggagggaagatggcggaggtgggggagataatcgagggctgccgcctacccgtgctgcggcggaaccaggacaacgaagatgagtggcccctggccgagatcctgagcgtgaaggacatcagtggccggaagcttttctacgtccattacattgacttcaacaaacgtctggatgaatgggtgacgcatgagcggctggacctaaagaagatccagttccccaagaaagaggccaagacccccactaagaacggacttcctgggtcccgtcctggctctccagagagagaggtgccggcctcggcgcaggccagcgggaagaccttgccaatcccggtccagatcacactccgcttcaacctgcccaaggagcgggaggccattcccggtggcgagcctgaccagccgctctcctccagctcctgcctgcagcccaaccaccgctcaacgaaacggaaggtggaggtggtttcaccagcaactccagtgcccagcgagacagccccggcctcggtttttccccagaatggagccgcccgtagggcagtggcagcccagccaggacggaagcgaaaatcgaattgtttgggcactgatgaggactcccaggacagctctgatggaataccgtcagcaccacgcatgactggcagcctggtgtctgatcgaagccacgacgacatcgtcacccggatgaagaacattgagtgcattgagctgggccggcaccgcctcaagccgtggtacttctccccgtacccacaggaactcaccacattgcctgtcctctacctgtgcgagttctgcctcaagtacggccgtagtctcaagtgtcttcagcgtcatttgaccaagtgtgacctacgacatcctccaggcaatgagatttaccgcaagggcaccatctccttctttgagattgatggacgtaagaacaagagttattcccagaacctgtgtcttttggccaagtgtttccttgaccataagacactgtactatgacacagaccctttcctcttctacgtcatgacagagtatgactgtaagggcttccacatcgtgggctacttctccaaggagaaagaatcaacggaagactacaatgtggcctgcatcctaaccctgcctccctaccagcgccggggctacggcaagctgctgatcgagttcagctatgaactctccaaagtggaagggaaaacagggacccctgagaagcccctctcagaccttggcctcctatcctatcgaagctactggtcccagaccatcctggagatcctgatggggctgaagtcggagagcggggagaggccacagatcaccatcaatgagattagtgaaatcaccagcatcaagaaggaggatgtcatctccactctgcagtacctcaatctcatcaactactacaagggccagtacatcctcacactgtcagaggacatcgtggatggccatgagcgggccatgctcaagcggctcctgcggatcgactccaagtgtctgcacttcactcccaaggactggagcaagagggggaagtggtgaccagacactgcccactgcagtgccaagacggcagcaggactggggctgatagcccaccccgcccccactgcagctcccacaaagcactctaagggagatggggctgaggacagctcaaaaaggagaggacaggcctggcaggggcccactggtgcccagcaccaaggcgagctccgggctcagaccaactccaaggtcagctggccacaggcccaggcctcctctgaagcagggaccagagggagccaggcagctgtgtacagtgagaagggatccggatgggggagctctgtacagagggctggtgattgtaaaaatttcttttgtaaagtagaagttgggggtggggtgggtgctggctgcaaaaatttctggcttctcttacccctattgcccccggcaataaattgtttctatatgccaga

SEQ ID NO: 283157 - DNA, 2339 bp, Homo sapiens
agctcacgtgacggactcagtagaccgccactggctgtgcacgttatggggtttccacctagggctcggcctgaggcttgtaacactccgttttcccccgagtcacaggggcagtcttgcccctcgcagctgggtcgcggtgtctctcaaaggtccccctctacaggggcttcgtgaggcccgggcccacagggcgctcggtcccggaagtgacgtctcccagaggggccggaagtggcagtggagggagggaagatggcggaggtggggaagatggcggaggtggtgagtccggtgcccggggcggggcggagggagccaggggaggtgggtagagcccgaggccccccagtagccgaccctggcgtcgcgctgtctccccagggggagataatcgagggctgccgcctacccgtgctgcggcggaaccaggacaacgaagatgagtggcccctggccgagatcctgagcgtgaaggacatcagtggccggaagcttttctacgtccattacattgacttcaacaaacgtctggatgaatgggtgacgcatgagcggctggacctaaagaagatccagttccccaagaaagaggccaagacccccactaagaacggacttcctgggtcccgtcctggctctccagagagagaggtgccggcctcggcgcaggccagcgggaagaccttgccaatcccggtccagatcacactccgcttcaacctgcccaaggagcgggaggccattcccggtggcgagcctgaccagccgctctcctccagctcctgcctgcagcccaaccaccgctcaacgaaacggaaggtggaggtggtttcaccagcaactccagtgcccagcgagacagccccggcctcggtttttccccagaatggagccgcccgtagggcagtggcagcccagccaggacggaagcgaaaatcgaattgtttgggcactgatgaggactcccaggacagctctgatggaataccgtcagcaccacgcatgactggcagcctggtgtctgatcgaagccacgacgacatcgtcacccggatgaagaacattgagtgcattgagctgggccggcaccgcctcaagccgtggtacttctccccgtacccacaggaactcaccacattgcctgtcctctacctgtgcgagttctgcctcaagtacggccgtagtctcaagtgtcttcagcgtcatttgaccaagtgtgacctacgacatcctccaggcaatgagatttaccgcaagggcaccatctccttctttgagattgatggacgtaagaacaagagttattcccagaacctgtgtcttttggccaagtgtttccttgaccataagacactgtactatgacacagaccctttcctcttctacgtcatgacagagtatgactgtaagggcttccacatcgtgggctacttctccaaggagaaagaatcaacggaagactacaatgtggcctgcatcctaaccctgcctccctaccagcgccggggctacggcaagctgctgatcgagttcagctatgaactctccaaagtggaagggaaaacagggacccctgagaagcccctctcagaccttggcctcctatcctatcgaagctactggtcccagaccatcctggagatcctgatggggctgaagtcggagagcggggagaggccacagatcaccatcaatgagattagtgaaatcaccagcatcaagaaggaggatgtcatctccactctgcagtacctcaatctcatcaactactacaagggccagtacatcctcacactgtcagaggacatcgtggatggccatgagcgggccatgctcaagcggctcctgcggatcgactccaagtgtctgcacttcactcccaaggactggagcaagagggggaagtggtgaccagacactgcccactgcagtgccaagacggcagcaggactggggctgatagcccaccccgcccccactgcagctcccacaaagcactctaagggagatggggctgaggacagctcaaaaaggagaggacaggcctggcaggggcccactggtgcccagcaccaaggcgagctccgggctcagaccaactccaaggtcagctggccacaggcccaggcctcctctgaagcagggaccagagggagccaggcagctgtgtacagtgagaagggatccggatgggggagctctgtacagagggctggtgattgtaaaaatttcttttgtaaagtagaagttgggggtggggtgggtgctggctgcaaaaatttctggcttctcttacccctattgcccccggcaataaattgtttctatatgccaga

SEQ ID NO: 283158 - DNA, 2066 bp, Homo sapiens
agctcacgtgacggactcagtagaccgccactggctgtgcacgttatggggtttccacctagggctcggcctgaggcttgtaacactccgttttcccccgagtcacaggggcagtcttgcccctcgcagctgggtcgcggtgtctctcaaaggtccccctctacaggggcttcgtgaggcccgggcccacagggcgctcggtcccggaagtgacgtctcccagaggggccggaagtggcagtggagggagggaagatggcggaggtgggggagataatcgagggctgccgcctacccgtgctgcggcggaaccaggacaacgaagatgagtggcccctggccgagatcctgagcgtgaaggacatcagtggccggaagcttttctacgtccattacattgacttcaacaaacgtctggatgaatgggtgacgcatgagcggctggacctaaagaagatccagttccccaagaaagaggccaagacccccactaagaacggacttcctgggtcccgtcctggctctccagagagagaggtgaaacggaaggtggaggtggtttcaccagcaactccagtgcccagcgagacagccccggcctcggtttttccccagaatggagccgcccgtagggcagtggcagcccagccaggacggaagcgaaaatcgaattgtttgggcactgatgaggactcccaggacagctctgatggaataccgtcagcaccacgcatgactggcagcctggtgtctgatcgaagccacgacgacatcgtcacccggatgaagaacattgagtgcattgagctgggccggcaccgcctcaagccgtggtacttctccccgtacccacaggaactcaccacattgcctgtcctctacctgtgcgagttctgcctcaagtacggccgtagtctcaagtgtcttcagcgtcatttgaccaagtgtgacctacgacatcctccaggcaatgagatttaccgcaagggcaccatctccttctttgagattgatggacgtaagaacaagagttattcccagaacctgtgtcttttggccaagtgtttccttgaccataagacactgtactatgacacagaccctttcctcttctacgtcatgacagagtatgactgtaagggcttccacatcgtgggctacttctccaaggagaaagaatcaacggaagactacaatgtggcctgcatcctaaccctgcctccctaccagcgccggggctacggcaagctgctgatcgagttcagctatgaactctccaaagtggaagggaaaacagggacccctgagaagcccctctcagaccttggcctcctatcctatcgaagctactggtcccagaccatcctggagatcctgatggggctgaagtcggagagcggggagaggccacagatcaccatcaatgagattagtgaaatcaccagcatcaagaaggaggatgtcatctccactctgcagtacctcaatctcatcaactactacaagggccagtacatcctcacactgtcagaggacatcgtggatggccatgagcgggccatgctcaagcggctcctgcggatcgactccaagtgtctgcacttcactcccaaggactggagcaagagggggaagtggtgaccagacactgcccactgcagtgccaagacggcagcaggactggggctgatagcccaccccgcccccactgcagctcccacaaagcactctaagggagatggggctgaggacagctcaaaaaggagaggacaggcctggcaggggcccactggtgcccagcaccaaggcgagctccgggctcagaccaactccaaggtcagctggccacaggcccaggcctcctctgaagcagggaccagagggagccaggcagctgtgtacagtgagaagggatccggatgggggagctctgtacagagggctggtgattgtaaaaatttcttttgtaaagtagaagttgggggtggggtgggtgctggctgcaaaaatttctggcttctcttacccctattgcccccggcaataaattgtttctatatgccaga

SEQ ID NO: 283159 - DNA, 1946 bp, Homo sapiens
gcaggctggtacggccccaagtcgtattgagggaagatggcggaggtggtgagtccggtgcccggggcggggcggagggagccaggggaggtgggtagagcccgaggccccccagtagccgaccctggcgtcgcgctgtctccccagggggagataatcgagggctgccgcctacccgtgctgcggcggaaccaggacaacgaagatgagtggcccctggccgagatcctgagcgtgaaggacatcagtggccggaagcttttctacgtccattacattgacttcaacaaacgtctggatgaatgggtgacgcatgagcggctggacctaaagaagatccagttccccaagaaagaggccaagacccccactaagaacggacttcctgggtcccgtcctggctctccagagagagaggtgaaacggaaggtggaggtggtttcaccagcaactccagtgcccagcgagacagccccggcctcggtttttccccagaatggagccgcccgtagggcagtggcagcccagccaggacggaagcgaaaatcgaattgtttgggcactgatgaggactcccaggacagctctgatggaataccgtcagcaccacgcatgactggcagcctggtgtctgatcgaagccacgacgacatcgtcacccggatgaagaacattgagtgcattgagctgggccggcaccgcctcaagccgtggtacttctccccgtacccacaggaactcaccacattgcctgtcctctacctgtgcgagttctgcctcaagtacggccgtagtctcaagtgtcttcagcgtcatttgaccaagtgtgacctacgacatcctccaggcaatgagatttaccgcaagggcaccatctccttctttgagattgatggacgtaagaacaagagttattcccagaacctgtgtcttttggccaagtgtttccttgaccataagacactgtactatgacacagaccctttcctcttctacgtcatgacagagtatgactgtaagggcttccacatcgtgggctacttctccaaggagaaagaatcaacggaagactacaatgtggcctgcatcctaaccctgcctccctaccagcgccggggctacggcaagctgctgatcgagttcagctatgaactctccaaagtggaagggaaaacagggacccctgagaagcccctctcagaccttggcctcctatcctatcgaagctactggtcccagaccatcctggagatcctgatggggctgaagtcggagagcggggagaggccacagatcaccatcaatgagattagtgaaatcaccagcatcaagaaggaggatgtcatctccactctgcagtacctcaatctcatcaactactacaagggccagtacatcctcacactgtcagaggacatcgtggatggccatgagcgggccatgctcaagcggctcctgcggatcgactccaagtgtctgcacttcactcccaaggactggagcaagagggggaagtggtgaccagacactgcccactgcagtgccaagacggcagcaggactggggctgatagcccaccccgcccccactgcagctcccacaaagcactctaagggagatggggctgaggacagctcaaaaaggagaggacaggcctggcaggggcccactggtgcccagcaccaaggcgagctccgggctcagaccaactccaaggtcagctggccacaggcccaggcctcctctgaagcagggaccagagggagccaggcagctgtgtacagtgagaagggatccggatgggggagctctgtacagagggctggtgattgtaaaaatttcttttgtaaagtagaagttgggggtggggtgggtgctggctgcaaaaatttctggcttctcttacccctattgcccccggcaataaattgtttctatatgccaga

SEQ ID NO: 283160 - DNA, 1830 bp, Homo sapiens
aattcggcactaggggaagatggcggaggtgggggagataatcgagggctgccgcctacccgtgctgcggcggaaccaggacaacgaagatgagtggcccctggccgagatcctgagcgtgaaggacatcagtggccggaagcttttctacgtccattacattgacttcaacaaacgtctggatgaatgggtgacgcatgagcggctggacctaaagaagatccagttccccaagaaagaggccaagacccccactaagaacggacttcctgggtcccgtcctggctctccagagagagaggtgaaacggaaggtggaggtggtttcaccagcaactccagtgcccagcgagacagccccggcctcggtttttccccagaatggagccgcccgtagggcagtggcagcccagccaggacggaagcgaaaatcgaattgtttgggcactgatgaggactcccaggacagctctgatggaataccgtcagcaccacgcatgactggcagcctggtgtctgatcgaagccacgacgacatcgtcacccggatgaagaacattgagtgcattgagctgggccggcaccgcctcaagccgtggtacttctccccgtacccacaggaactcaccacattgcctgtcctctacctgtgcgagttctgcctcaagtacggccgtagtctcaagtgtcttcagcgtcatttgaccaagtgtgacctacgacatcctccaggcaatgagatttaccgcaagggcaccatctccttctttgagattgatggacgtaagaacaagagttattcccagaacctgtgtcttttggccaagtgtttccttgaccataagacactgtactatgacacagaccctttcctcttctacgtcatgacagagtatgactgtaagggcttccacatcgtgggctacttctccaaggagaaagaatcaacggaagactacaatgtggcctgcatcctaaccctgcctccctaccagcgccggggctacggcaagctgctgatcgagttcagctatgaactctccaaagtggaagggaaaacagggacccctgagaagcccctctcagaccttggcctcctatcctatcgaagctactggtcccagaccatcctggagatcctgatggggctgaagtcggagagcggggagaggccacagatcaccatcaatgagattagtgaaatcaccagcatcaagaaggaggatgtcatctccactctgcagtacctcaatctcatcaactactacaagggccagtacatcctcacactgtcagaggacatcgtggatggccatgagcgggccatgctcaagcggctcctgcggatcgactccaagtgtctgcacttcactcccaaggactggagcaagagggggaagtggtgaccagacactgcccactgcagtgccaagacggcagcaggactggggctgatagcccaccccgcccccactgcagctcccacaaagcactctaagggagatggggctgaggacagctcaaaaaggagaggacaggcctggcaggggcccactggtgcccagcaccaaggcgagctccgggctcagaccaactccaaggtcagctggccacaggcccaggcctcctctgaagcagggaccagagggagccaggcagctgtgtacagtgagaagggatccggatgggggagctctgtacagagggctggtgattgtaaaaatttcttttgtaaagtagaagttgggggtggggtgggtgctggctgcaaaaatttctggcttctcttacccctattgcccccggcaataaattgtttctatatgccaga

SEQ ID NO: 283161 - DNA, 2015 bp, Homo sapiens
agctcacgtgacggactcagtagaccgccactggctgtgcacgttatggggtttccacctagggctcggcctgaggcttgtaacactccgttttcccccgagtcacaggggcagtcttgcccctcgcagctgggtcgcggtgtctctcaaaggtccccctctacaggggcttcgtgaggcccgggcccacagggcgctcggtcccggaagtgacgtctcccagaggggccggaagtggcagtggagggagggaagatggcggaggtgggggagataatcgagggctgccgcctacccgtgctgcggcggaaccaggacaacgaagatgagtggcccctggccgagatcctgagcgtgaaggacatcagtggccggaagcttttctacgtccattacattgacttcaacaaacgtctggatgaatgggtgacgcatgagcggctggacctaaagaagatccagttccccaagaaagaggccaagacccccactaagaacggacttcctgggtcccgtcctggctctccagagagagaggtgaaacggaaggtggaggtggtttcaccagcaactccagtgcccagcgagacagccccggcctcggtttttccccagaatggagccgcccgtagggcagtggcagcccagccaggacggaagcgaaaatcgaattgtttgggcactgatgaggactcccaggacagctctgatggaataccgtcagcaccacgcatgactggcagcctggtgtctgatcgaagccacgacgacatcgtcacccggatgaagaacattgagtgcattgagctgggccggcaccgcctcaagccgtggtacttctccccgtacccacaggaactcaccacattgcctgtcctctacctgtgcgagttctgcctcaagtacggccgtagtctcaagtgtcttcagcgtcatttgaccaagtgtgacctacgacatcctccaggcaatgagatttaccgcaagggcaccatctccttctttgagattgatggacgtaagaacaagagttattcccagaacctgtgtcttttggccaagtgtttccttgaccataagacactgtactatgacacagaccctttcctcttctacgtcatgacagagtatgactgtaagggcttccacatcgtgggctacttctccaaggagaaagaatcaacggaagactacaatgtggcctgcatcctaaccctgcctccctaccagcgccggggctacggcaagctgctgatcgagttcagctatgaactctccaaagtggaagggaaaacagggacccctgagaagcccctctcagaccttggcctcctatcctatcgaagctactggtcccagaccatcctggagatcctgatggggctgaagtcggagagcggggagaggccacagatcaccatcaatgagattagtgaaatcaccagcatcaagaaggaggatgtcatctccactctgcagtacctcaatctcatcaactactacaagggccagtacatcctcacactgtcagaggacatcgtggatggccatgagcgggccatgctcaagcggctcctgcggatcgactccaagtgtctgcacttcactcccaaggactggagcaagagggggaagtggtgaccagacactgcccactgcagtgccaagacggcagcaggactggggctgatagcccaccccgcccccactgcagctcccacaaagcactctaagggagatggggctgaggacagctcaaaaaggagaggacaggcctggcaggggcccactggtgcccagcaccaaggcgagctccgggctcagaccaactccaaggtcagctggccacaggcccaggcctcctctgaagcagggaccagagggagccaggcagctgtgtacagtgagaagggatccggatgggggagctctgtacagagggctggtgattgtaaaaatttctggcttctcttacccctattgcccccggcaataaattgtttctatatgccaga

SEQ ID NO: 283162 - DNA, 2158 bp, Homo sapiens
agctcacgtgacggactcagtagaccgccactggctgtgcacgttatggggtttccacctagggctcggcctgaggcttgtaacactccgttttcccccgagtcacaggggcagtcttgcccctcgcagctgggtcgcggtgtctctcaaaggtccccctctacaggggcttcgtgaggcccgggcccacagggcgctcggtcccggaagtgacgtctcccagaggggccggaagtggcagtggagggagggaagatggcggaggtgggggagataatcgagggctgccgcctacccgtgctgcggcggaaccaggacaacgaagatgagtggcccctggccgagatcctgagcgtgaaggacatcagtggccggaagcttttctacgtccattacattgacttcaacaaacgtctggatgaatgggtgacgcatgagcggctggacctaaagaagatccagttccccaagaaagaggccaagacccccactaagaacggacttcctgggtcccgtcctggctctccagagagagaggtgaaacggaaggtggaggtggtttcaccagcaactccagtgcccagcgagacagccccggcctcggtttttccccagaatggagccgcccgtagggcagtggcagcccagccaggacggaagcgaaaatcgaattgtttgggcactgatgaggactcccaggacagctctgatggaataccgtcagcaccacgcatgactggcagcctggtgtctgatcgaagccacgacgacatcgtcacccggatgaagaacattgagtgcattgagctgggccggcaccgcctcaagccgtggtacttctccccgtacccacaggaactcaccacattgcctgtcctctacctgtgcgagttctgcctcaagtacggccgtagtctcaagtgtcttcagcgtcatttgaccaagtgtgacctacgacatcctccaggcaatgagatttaccgcaagggcaccatctccttctttgagattgatggacgtaagaacaagagttattcccagaacctgtgtcttttggccaagtgtttccttgaccataagacactgtactatgacacagaccctttcctcttctacgtcatgacagagtatgactgtaagggcttccacatcgtgggctacttctccaaggagaaagaatcaacggaagactacaatgtggcctgcatcctaaccctgcctccctaccagcgccggggctacggcaagctgctgatcgagttcagctatgaactctccaaagtggaagggaaaacagggacccctgagaagcccctctcagaccttggcctcctatcctatcgaagctactggtcccagaccatcctggagatcctgatggggctgaagtcggagagcggggagaggccacagatcaccatcaatgagattagtgaaatcaccagcatcaagaaggaggatgtcatctccactctgcagtacctcaatctcatcaactactacaaggtagggaggcaggcaggggagacaggtgtgtgggatgcagagtgcagtcctctgtgggctgaccacctgctgaacccatctcctctgcccagggccagtacatcctcacactgtcagaggacatcgtggatggccatgagcgggccatgctcaagcggctcctgcggatcgactccaagtgtctgcacttcactcccaaggactggagcaagagggggaagtggtgaccagacactgcccactgcagtgccaagacggcagcaggactggggctgatagcccaccccgcccccactgcagctcccacaaagcactctaagggagatggggctgaggacagctcaaaaaggagaggacaggcctggcaggggcccactggtgcccagcaccaaggcgagctccgggctcagaccaactccaaggtcagctggccacaggcccaggcctcctctgaagcagggaccagagggagccaggcagctgtgtacagtgagaagggatccggatgggggagctctgtacagagggctggtgattgtaaaaatttcttttgtaaagtagaagttgggggtggggtgggtgctggctgcaaaaatttctggcttctcttacccctattgcccccggcaataaattgtttctatatgccaga

SEQ ID NO: 283163 - DNA, 1790 bp, Homo sapiens
  misc_feature (21)..(21): n is a, c, g, or t
gctagtgagccccgggcttantcggacgagggcggaaccaggacatgaagatgagtggccctggccgagatcctgagcgtgaaggacatcagtggccggaagcttttctacgtccattacattgacttcaacaaacgtctggatgaatgggtgacgcatgagcggctggacctaaagaagatccagttccccaagaaagaggccaagacccccactaagaacggacttcctgggtcccgtcctggctctccagagagagaggtgaaacggaaggtggaggtggtttcaccagcaactccagtgcccagcgagacagccccggcctcggtttttccccagaatggagccgcccgtagggcagtggcagcccagccaggacggaagcgaaaatcgaattgtttgggcactgatgaggactcccaggacagctctgatggaataccgtcagcaccacgcatgactggcagcctggtgtctgatcgaagccacgacgacatcgtcacccggatgaagaacattgagtgcattgagctgggccggcaccgcctcaagccgtggtacttctccccgtacccacaggaactcaccacattgcctgtcctctacctgtgcgagttctgcctcaagtacggccgtagtctcaagtgtcttcagcgtcatttgaccaagtgtgacctacgacatcctccaggcaatgagatttaccgcaagggcaccatctccttctttgagattgatggacgtaagaacaagagttattcccagaacctgtgtcttttggccaagtgtttccttgaccataagacactgtactatgacacagaccctttcctcttctacgtcatgacagagtatgactgtaagggcttccacatcgtgggctacttctccaaggagaaagaatcaacggaagactacaatgtggcctgcatcctaaccctgcctccctaccagcgccggggctacggcaagctgctgatcgagttcagctatgaactctccaaagtggaagggaaaacagggacccctgagaagcccctctcagaccttggcctcctatcctatcgaagctactggtcccagaccatcctggagatcctgatggggctgaagtcggagagcggggagaggccacagatcaccatcaatgagattagtgaaatcaccagcatcaagaaggaggatgtcatctccactctgcagtacctcaatctcatcaactactacaagggccagtacatcctcacactgtcagaggacatcgtggatggccatgagcgggccatgctcaagcggctcctgcggatcgactccaagtgtctgcacttcactcccaaggactggagcaagagggggaagtggtgaccagacactgcccactgcagtgccaagacggcagcaggactggggctgatagcccaccccgcccccactgcagctcccacaaagcactctaagggagatggggctgaggacagctcaaaaaggagaggacaggcctggcaggggcccactggtgcccagcaccaaggcgagctccgggctcagaccaactccaaggtcagctggccacaggcccaggcctcctctgaagcagggaccagagggagccaggcagctgtgtacagtgagaagggatccggatgggggagctctgtacagagggctggtgattgtaaaaatttcttttgtaaagtagaagttgggggtggggtgggtgctggctgcaaaaatttctggcttctcttacccctattgcccccggcaataaattgtttctatatgccaga

SEQ ID NO: 283164 - DNA, 1762 bp, Homo sapiens
agctcacgtgacggactcagtagaccgccactggctgtgcacgttatggggtttccacctagggctcggcctgaggcttgtaacactccgttttcccccgagtcacaggggcagtcttgcccctcgcagctgggtcgcggtgtctctcaaaggtccccctctacaggggcttcgtgaggcccgggcccacagggcgctcggtcccggaagtgacgtctcccagaggggccggaagtggcagtggagggagggaagatggcggaggtgggggagataatcgagggctgccgcctacccgtgctgcggcggaaccaggacaacgaagatgagtggcccctggccgagatcctgagcgtgaaggacatcagtggccggaagcttttctacgtccattacattgacttcaacaaacgtctggatgaatgggtgacgcatgagcggctggacctaaagaagatccagttccccaagaaagaggccaagacccccactaagaacggacttcctgggtcccgtcctggctctccagagagagaggtgaaacggaaggtggaggtggtttcaccagcaactccagtgcccagcgagacagccccggcctcggtttttccccagaatggagccgcccgtagggcagtggcagcccagccaggacggaagcgaaaatcgaattgtttgggcactgatgaggactcccaggacagctctgatggaataccgtcagcaccacgcatgactggcagcctggtgtctgatcgaagccacgacgacatcgtcacccggatgaagaacattgagtgcattgagctgggccggcaccgcctcaagccgtggtacttctccccgtacccacaggaactcaccacattgcctgtcctctacctgtgcgagttctgcctcaagtacggccgtagtctcaagtgtcttcagcgtcatttgaccaagtgtgacctacgacatcctccaggcaatgagatttaccgcaagggcaccatctccttctttgagattgatggacgtaagaacaagagttattcccagaacctgtgtcttttggccaagtgtttccttgaccataagacactgtactatgacacagaccctttcctcttctacgtcatgacagagtatgactgtaagggcttccacatcgtgggctacttctccaaggagaaagaatcaacggaagactacaatgtggcctgcatcctaaccctgcctccctaccagcgccggggctacggcaagctgctgatcgagttcagctatgaactctccaaagtggaagggaaaacagggacccctgagaagcccctctcagaccttggcctcctatcctatcgaagctactggtcccagaccatcctggagatcctgatggggctgaagtcggagagcggggagaggccacagatcaccatcaatgagattagtgaaatcaccagcatcaagaaggaggatgtcatctccactctgcagtacctcaatctcatcaactactacaagggccagtacatcctcacactgtcagaggacatcgtggatggccatgagcgggccatgctcaagcggctcctgcggatcgactccaagtgtctgcacttcactcccaaggactggagcaagagggggaagtggtgaccagacactgcccactgcagtgccaagacggcagcaggactggggtgggtgctggctgcaaaaatttctggcttctcttacccctattgcccccggcaataaattgtttctatatgccaga

SEQ ID NO: 283165 - DNA, 1720 bp, Homo sapiens
tttatggtccattcgagaaattttattggttaaatgatgcccagatggggtcacatcctcagaacttctcagcctggtagcacaagtggatgcttgaagaaactcagtcttggaactcagacagcaatggagacgggatgtgagtgggaccagcaaggggctaaggtccattatgagggtgaggaagggcttctagaagtaacaaacatcccaggtccctgactggggagaatgaagacactgaccaagagatgtgaagccactcagggctgtgcagggtctgaggatctcactggggacggcctcccagcggccagctatcagcacgagttggagggaaagagccatggtgggggtcagtcacgtggctcccaggaatggtctccccgacttaggaagcaccttggtgcaccttttctccttgcatcctcacaaccacccagtcaggccactcaagtcttacagcaggtgacactcccaaggtcccagctaggaggactttgagaattcaagcattctcaggtctggattagagacaggaatctgtctccacttccttacatggctagacacagagcccgggagggcaaaggaaaattggaggccccttcttcccatgagccattttctctgcatcccctgcccataagccttcactggcctctgatcaccctcatggttgactgcagctgctcctctcagtgccctcatgccctccactgtgctcagcgcacggaaagagtgaatactcagttcttcctgagggaactgaggcacagagaagtggagggcatagaactgccaagtggcagggccatgataggaactaggcagcctgccttggcaacctgtgtttttaaatgttgcttatgttcatctgtgacctcttactcaccctctcctgctccattgctttaggctatgaactctccaaagtggaagggaaaacagggacccctgagaagcccctctcagaccttggcctcctatcctatcgaagctactggtcccagaccatcctggagatcctgatggggctgaagtcggagagcggggagaggccacagatcaccatcaatgagattagtgaaatcaccagcatcaagaaggaggatgtcatctccactctgcagtacctcaatctcatcaactactacaagggccagtacatcctcacactgtcagaggacatcgtggatggccatgagcgggccatgctcaagcggctcctgcggatcgactccaagtgtctgcacttcactcccaaggactggagcaagagggggaagtggtgaccagacactgcccactgcagtgccaagacggcagcaggactggggctgatagcccaccccgcccccactgcagctcccacaaagcactctaagggagatggggctgaggacagctcaaaaaggagaggacaggcctggcaggggcccactggtgcccagcaccaaggcgagctccgggctcagaccaactccaaggtcagctggccacaggcccaggcctcctctgaagcagggaccagagggagccaggcagctgtgtacagtgagaagggatccggatgggggagctctgtacagagggctggtgattgtaaaaatttcttttgtaaagtagaagttgggggtggggtgggtgctggctgcaaaaatttctggcttctcttacccctattgcccccggcaataaattgtttctatatgccaga

SEQ ID NO: 283166 - DNA, 1699 bp, Homo sapiens
caagtgtgacctacgacatcctccaggcaatgagatttaccgctgggccggcaccgcctcaagccgtggtacttctccccgtacccacaggaactcaccacatgcctgtcctctacctgtgcgagttctgcctcaagtacccctggccgagatcctgagcgtgaaggacatcagtggccggaagcttttctacgtccattacattgacttcaacaaacgtctggatgaatgggtgacgcatgagcggctggacctaaagaagatccagttccccaagaaagaggccaagacccccactaagaacggacttcctgggtcccgtcctggctctccagagagagaggtgaaacggaaggtggaggtggtttcaccagcaactccagtgcccagcgagacagccccggcctcggtttttccccagaatggagccgcccgtagggcagtggcagcccagccaggacggaagcgaaaatcgaattgtttgggcactgatgaggactcccaggacagctctgatggaataccgtcagcaccacgcatgactggcagcctggtgtctgatcgaagccacgacgacatcgtcacccggatgaagaacattgagtgcattgagctgggccggcaccatctccttctttgagattgatggacgtaagaacaagagttattcccagaacctgtgtcttttggccaagtgtttccttgaccataagacactgtactatgacacagaccctttcctcttctacgtcatgacagagtatgactgtaagggcttccacatcgtgggctacttctccaaggagaaagaatcaacggaagactacaatgtggcctgcatcctaaccctgcctccctaccagcgccggggctacggcaagctgctgatcgagttcagctatgaactctccaaagtggaagggaaaacagggacccctgagaagcccctctcagaccttggcctcctatcctatcgaagctactggtcccagaccatcctggagatcctgatggggctgaagtcggagagcggggagaggccacagatcaccatcaatgagattagtgaaatcaccagcatcaagaaggaggatgtcatctccactctgcagtacctcaatctcatcaactactacaagggccagtacatcctcacactgtcagaggacatcgtggatggccatgagcgggccatgctcaagcggctcctgcggatcgactccaagtgtctgcacttcactcccaaggactggagcaagagggggaagtggtgaccagacactgcccactgcagtgccaagacggcagcaggactggggctgatagcccaccccgcccccactgcagctcccacaaagcactctaagggagatggggctgaggacagctcaaaaaggagaggacaggcctggcaggggcccactggtgcccagcaccaaggcgagctccgggctcagaccaactccaaggtcagctggccacaggcccaggcctcctctgaagcagggaccagagggagccaggcagctgtgtacagtgagaagggatccggatgggggagctctgtacagagggctggtgattgtaaaaatttcttttgtaaagtagaagttgggggtggggtgggtgctggctgcaaaaatttctggcttctcttacccctattgcccccggcaataaattgtttctatatgccaga

SEQ ID NO: 283167 - DNA, 1439 bp, Homo sapiens
agctcacgtgacggactcagtagaccgccactggctgtgcacgttatggggtttccacctagggctcggcctgaggcttgtaacactccgttttcccccgagtcacaggggcagtcttgcccctcgcagctgggtcgcggtgtctctcaaaggtccccctctacaggggcttcgtgaggcccgggcccacagggcgctcggtcccggaagtgacgtctcccagaggggccggaagtggcagtggagggagggaagatggcggaggtgggggagataatcgagggctgccgcctacccgtgctgcggcggaaccaggacaacgaagatgagtggcccctggccgagatcctgagcgtgaaggacatcagtggccggaagcttttctacgtccattacattgacttcaacaaacgtctggatgaatgggtgacgcatgagcggctggacctaaagaagatccagttccccaagaaagaggccaagacccccactaagaacggacttcctgggtcccgtcctggctctccagagagagaggtgaaacggaaggtggaggtggtttcaccagcaactccagtgcccagcgagacagccccggcctcggtttttccccagaatggagccgcccgtagggcagtggcagcccagccaggacggaagcgaaaatcgaattgtttgggcactgatgaggactcccaggacagctctgatggaataccgtcagcaccacgcatgactggcagcctggtgtctgatcgaagccacgacgacatcgtcacccggatgaagaacattgagtgcattgagctgggccggcaccgcctcaagccgtggtacttctccccgtacccacaggaactcaccacattgcctgtcctctacctgtgcgagttctgcctcaagtacggccgtagtctcaagtgtcttcagcgtcatttgaccaagtgtgacctacgacatcctccaggcaatgagatttaccgcaagggcaccatctccttctttgagattgatggacgtaagaacaagagttattcccagaacctgtgtcttttggccaagtgtttccttgaccataagacactgtactatgacacagaccctttcctcttctacgtcatgacagagtatgactgtaagggcttccacatcgtgggctacttctccaaggagaaagaatcaacggaagactacaatgtggcctgcatcctaaccctgcctccctaccaggcctcctctgaagcagggaccagagggagccaggcagctgtgtacagtgagaagggatccggatgggggagctctgtacagagggctggtgattgtaaaaatttcttttgtaaagtagaagttgggggtggggtgggtgctggctgcaaaaatttctggcttctcttacccctattgcccccggcaataaattgtttctatatgccaga

SEQ ID NO: 283168 - DNA, 1296 bp, Homo sapiens
agctcacgtgacggactcagtagaccgccactggctgtgcacgttatggggtttccacctagggctcggcctgaggcttgtaacactccgttttcccccgagtcacaggggcagtcttgcccctcgcagctgggtcgcggtgtctctcaaaggtccccctctacaggggcttcgtgaggcccgggcccacagggcgctcggtcccggaagtgacgtctcccagaggggccggaagtggcagtggagggagggaagatggcggaggtgggggagataatcgagggctgccgcctacccgtgctgcggcggaaccaggacaacgaagatgagtggcccctggccgagatcctgagcgtgaaggacatcagtggccggaagcttttctacgtccattacattgacttcaacaaacgtctggatgaatgggtgacgcatgagcggctggacctaaagaagatccagttccccaagaaagaggccaagacccccactaagaacggacttcctgggtcccgtcctggctctccagagagagaggtgaaacggaaggtggaggtggtttcaccagcaactccagtgcccagcgagacagccccggcctcggtttttccccagaatggagccgcccgtagggcagtggcagcccagccaggacggaagcgaaaatcgaattgtttgggcactgatgaggactcccaggacagctctgatggaataccgtcagcaccacgcatgactggcagcctggtgtctgatcgaagccacgacgacatcgtcacccggatgaagaacattgagtgcattgagctgggccggcaccgcctcaagccgtggtacttctccccgtacccacaggaactcaccacattgcctgtcctctacctgtgcgagttctgcctcaagtacggccgtagtctcaagtgtcttcagcgtcatttgaccaagtgtgacctacgacatcctccaggcaatgagatttaccgcaagggcaccatctccttctttgagattgatggacgtaagaacaagagttattcccagaacctgtgtcttttggccaagtgtttccttgaccataagacactgtactatgacacagaccctttcctcttctacgtcatgacagagtatgactgtaagggcttccacatcgtgggctacttctccaaggagaaagaatcaacggaagactacaatgtggcctgcatcctaaccctgcctccctaccagcgccggggctacggcaagctgctgatcgagttcagtgagtatgtgtgctgcggccagggggtagtg

SEQ ID NO: 283169 - DNA, 1354 bp, Homo sapiens
  misc_feature (1155)..(1155): n is a, c, g, or t
agctcacgtgacggactcagtagaccgccactggctgtgcacgttatggggtttccacctagggctcggcctgaggcttgtaacactccgttttcccccgagtcacaggggcagtcttgcccctcgcagctgggtcgcggtgtctctcaaaggtccccctctacaggggcttcgtgaggcccgggcccacagggcgctcggtcccggaagtgacgtctcccagaggggccggaagtggcagtggagggagggaagatggcggaggtgggggagataatcgagggctgccgcctacccgtgctgcggcggaaccaggacaacgaagatgagtggcccctggccgagatcctgagcgtgaaggacatcagtggccggaagcttttctacgtccattacattgacttcaacaaacgtctggatgaatgggtgacgcatgagcggctggacctaaagaagatccagttccccaagaaagaggccaagacccccactaagaacggacttcctgggtcccgtcctggctctccagagagagaggtgccggcctcggcgcaggccagcgggaagaccttgccaatcccggtccagatcacactccgcttcaacctgcccaaggagcgggaggccattcccggtggcgagcctgaccagccgctctcctccagctcctgcctgcagcccaaccaccgctcaacgaaacggaaggtggaggtggtttcaccagcaactccagtgcccagcgagacagccccggcctcggtttttccccagaatggagccgcccgtagggcagtggcagcccagccaggacggaagcgaaaatcgaattgtttgggcactgatgaggactcccaggacagctctgatggaataccgtcagcaccacgcatgactggcagcctggtgtctgatcgaagccacgacgacatcgtcacccggatgaagaacattgagtgcattgagctgggccggcaccgcctcaagccgtggtacttctccccgtacccacaggaactcaccacattgcctgtcctctacctgtgcgagttctgcctcaagtacggccgtagtctcaagtgtcttcagcgtcatttgaccaagtgtgacctacgacatcctccaggcaatgagatttaccgcaagggcccatctctncttgggatgaggcgtagaaccagagtttcccagaactggtttgggcaggttcctgacctagcactgttaagaacaaacattcctttaagagaaaagaagcgggccccgggcttccgagaacaacggacacggggccccgcccaccggcaggcgttacacggaggcacaccccaaccacctgggcaagcccaccaccggg

SEQ ID NO: 283170 - DNA, 1471 bp, Homo sapiens
  misc_feature (1272)..(1272): n is a, c, g, or t
agctcacgtgacggactcagtagaccgccactggctgtgcacgttatggggtttccacctagggctcggcctgaggcttgtaacactccgttttcccccgagtcacaggggcagtcttgcccctcgcagctgggtcgcggtgtctctcaaaggtccccctctacaggggcttcgtgaggcccgggcccacagggcgctcggtcccggaagtgacgtctcccagaggggccggaagtggcagtggagggagggaagatggcggaggtggggaagatggcggaggtggtgagtccggtgcccggggcggggcggagggagccaggggaggtgggtagagcccgaggccccccagtagccgaccctggcgtcgcgctgtctccccagggggagataatcgagggctgccgcctacccgtgctgcggcggaaccaggacaacgaagatgagtggcccctggccgagatcctgagcgtgaaggacatcagtggccggaagcttttctacgtccattacattgacttcaacaaacgtctggatgaatgggtgacgcatgagcggctggacctaaagaagatccagttccccaagaaagaggccaagacccccactaagaacggacttcctgggtcccgtcctggctctccagagagagaggtgccggcctcggcgcaggccagcgggaagaccttgccaatcccggtccagatcacactccgcttcaacctgcccaaggagcgggaggccattcccggtggcgagcctgaccagccgctctcctccagctcctgcctgcagcccaaccaccgctcaacgaaacggaaggtggaggtggtttcaccagcaactccagtgcccagcgagacagccccggcctcggtttttccccagaatggagccgcccgtagggcagtggcagcccagccaggacggaagcgaaaatcgaattgtttgggcactgatgaggactcccaggacagctctgatggaataccgtcagcaccacgcatgactggcagcctggtgtctgatcgaagccacgacgacatcgtcacccggatgaagaacattgagtgcattgagctgggccggcaccgcctcaagccgtggtacttctccccgtacccacaggaactcaccacattgcctgtcctctacctgtgcgagttctgcctcaagtacggccgtagtctcaagtgtcttcagcgtcatttgaccaagtgtgacctacgacatcctccaggcaatgagatttaccgcaagggcccatctctncttgggatgaggcgtagaaccagagtttcccagaactggtttgggcaggttcctgacctagcactgttaagaacaaacattcctttaagagaaaagaagcgggccccgggcttccgagaacaacggacacggggccccgcccaccggcaggcgttacacggaggcacaccccaaccacctgggcaagcccaccaccggg

SEQ ID NO: 283171 - DNA, 2444 bp, Homo sapiens
  misc_feature (1926)..(1926): n is a, c, g, or t
  misc_feature (1931)..(1932): n is a, c, g, or t
  misc_feature (1937)..(1937): n is a, c, g, or t
  misc_feature (1942)..(1943): n is a, c, g, or t
  misc_feature (1946)..(1946): n is a, c, g, or t
  misc_feature (1957)..(1957): n is a, c, g, or t
  misc_feature (1962)..(1962): n is a, c, g, or t
  misc_feature (1974)..(1974): n is a, c, g, or t
  misc_feature (1995)..(1995): n is a, c, g, or t
  misc_feature (2025)..(2025): n is a, c, g, or t
  misc_feature (2030)..(2030): n is a, c, g, or t
  misc_feature (2080)..(2080): n is a, c, g, or t
  misc_feature (2104)..(2104): n is a, c, g, or t
  misc_feature (2112)..(2112): n is a, c, g, or t
  misc_feature (2160)..(2160): n is a, c, g, or t
  misc_feature (2168)..(2168): n is a, c, g, or t
  misc_feature (2170)..(2170): n is a, c, g, or t
  misc_feature (2180)..(2181): n is a, c, g, or t
  misc_feature (2185)..(2188): n is a, c, g, or t
  misc_feature (2203)..(2203): n is a, c, g, or t
  misc_feature (2264)..(2264): n is a, c, g, or t
  misc_feature (2266)..(2266): n is a, c, g, or t
  misc_feature (2268)..(2270): n is a, c, g, or t
  misc_feature (2289)..(2289): n is a, c, g, or t
  misc_feature (2310)..(2310): n is a, c, g, or t
  misc_feature (2313)..(2313): n is a, c, g, or t
  misc_feature (2317)..(2319): n is a, c, g, or t
  misc_feature (2322)..(2322): n is a, c, g, or t
  misc_feature (2325)..(2325): n is a, c, g, or t
  misc_feature (2431)..(2431): n is a, c, g, or t
gaaaattgtactgtgaggaccttgacagcttcacaggcgggctttttcttttgcctccctatatgcgctagaatatctatttttctcttttacaaactgactatataaaaccacctcttctggcattgcagaaagcaattgactttctcagagccacccggcaggctatcggggcatcctcgaaaaggccagggacaggggcgcaggtgcaccaagagatctggcgaggggtacgcttcctcgagacttggggctctttctctctgcgctctccagacactgaactctgagctgcaaggacaagaacgccaccaccttccctactaaggctctgccacaagcgcatcccagtgaggtgtatccagctgcagccgcctccggagcttcggagcgctcagacctccctccctcgcgcatctccagcctaagggttgtcccacctcgccataacacggggctctcgcgcgggcatcgaggattctcagcttttggcgtcccagtcctgcctctgctcctgcctggtggtgtccccacgcccaggtcctgcggacccgaccacggctgaaacgcgcggctttgccgtctgcgctccagccttcgcctggcagagcgcgcagcccacctagcgtcttctggctctaggggtgcagagggcgcatcccgcctcttcctccgcccccgggccccgctgtcctcccccacctgctgaccagcctactcctgcgtgagctgccagccttttgccttctgtgcgtaaagcatgtcaggctctgggcgaaaagacttcgatgtgaagcacattctgcgactccgctggaaactcttcagccacccgtctccttccaccggcggcccggcggggggaggctgcctgcaacaggacggcagtggcagctttgagcactggggacccagccagagtcgcctgctcaaaagccaagagagaagcggtgtgagcactttctggaagaagccttcctcctcttcctcttcatcgtcctccccgtcctcttcctcctcttccttcaatccgctgaatggcaccctgcttccagttgccacgaggctgcagcaaggggctcctgggcagggcactcagcagccagccaggactctcttctacgtggagtcactagaggaggaggtggtgccaggcatggactttcctggaccacacgaaaaagggctggttctgcaagagctcaaagtggagccagacaactctagccaggcaacaggtgaaggatgtggacacaggctgtcatcaaccggccattcaatgacacctcaaagtgatttggactccagtagctctgaagaattctatcaagctgttcatcatgctgagcaaaccttcagaaagatggaaagttatttgaagcagcagcaactttgtgatgttatcctgattgttgggaaccgaaagatacctgcacataggcttgttctgagttcagtctccgactattttgcggccatgtttacaagtgatgtttgtgaagccaagcaagaggagatcaaaatggaaggcatagaccccaatgctctctgggaccttgtccaatttgcatatacaggctgcttggaattaaaagaggacaccattgagaaccttcttgctgcagcgtgccttcttcagcttccacaggtggtggaagtgtgctgccacttcctcatgaagcttttgcatccatctaactgtttaggaattcgagccttcgcagatgctcaaggatgcattgagttaatgaaggtggcccacagctacacaatggaaaacataatggaagttatcagaaatcaagagtttttactccttccagctgaggagctccataaactactggccagtgatgatgtcaatgttcctgatgaagaaaccatcttccatgcattgatgatgcattcgggctcctcgcacctacnccaannaacanaaaannacnaccaacagaanaccangcaaaccagaancaaaaaacaaaatttcaagcnaaatgcaaagaatcaagtaaaaaaagccancaaanatcaaaatagtaaaaaagtataggccaagaagaagaaagacaagaaaagnagagaaaaaatgtgaagaaaaaanaaaagtcnaaaaggctagaaaaatcaaaaatgcaacaaaaaaggctaaaaatcagnaaaaaaancnagaacgggannaagnnnnaaggtcctgccctancctctcccaagagcaccagcagcaggtcttgggagccattgagagggccaagcaggtaaangntnnngagctgaactctatcatcngacagcagctccaagcccaanagntgtnnnagntgnaggccctggccctgcccttgacccactacccgtggggctgcagccgccttcgctgccggcggtcagcgcaggcaccggcctcctctcgctgtccgcgctgggttcncaggcccacctca

SEQ ID NO: 283172 - DNA, 4125 bp, Homo sapiens
gaaaattgtactgtgaggaccttgacagcttcacaggcgggctttttcttttgcctccctatatgcgctagaatatctatttttctcttttacaaactgactatataaaaccacctcttctggcattgcagaaagcaattgactttctcagagccacccggcaggctatcggggcatcctcgaaaaggccagggacaggggcgcaggtgcaccaagagatctggcgaggggtacgcttcctcgagacttggggctctttctctctgcgctctccagacactgaactctgagctgcaaggacaagaacgccaccaccttccctactaaggctctgccacaagcgcatcccagtgaggtgtatccagctgcagccgcctccggagcttcggagcgctcagacctccctccctcgcgcatctccagcctaagggttgtcccacctcgccataacacggggctctcgcgcgggcatcgaggattctcagcttttggcgtcccagtcctgcctctgctcctgcctggtggtgtccccacgcccaggtcctgcggacccgaccacggctgaaacgcgcggctttgccgtctgcgctccagccttcgcctggcagagcgcgcagcccacctagcgtcttctggctctaggggtgcagagggcgcatcccgcctcttcctccgcccccgggccccgctgtcctcccccacctgctgaccagcctactcctgcgtgagctgccagccttttgccttctgtgcgtaaagcatgtcaggctctgggcgaaaagacttcgatgtgaagcacattctgcgactccgctggaaactcttcagccacccgtctccttccaccggcggcccggcggggggaggctgcctgcaacaggacggcagtggcagctttgagcactggggacccagccagagtcgcctgctcaaaagccaagagagaagcggtgtgagcactttctggaagaagccttcctcctcttcctcttcatcgtcctccccgtcctcttcctcctcttccttcaatccgctgaatggcaccctgcttccagttgccacgaggctgcagcaaggggctcctgggcagggcactcagcagccagccaggactctcttctacgtggagtcactagaggaggaggtggtgccaggcatggactttcctggaccacacgaaaaagggctggttctgcaagagctcaaagtggagccagacaactctagccaggcaacaggtgaaggatgtggacacaggctgtcatcaaccggccattcaatgacacctcaaagtgatttggactccagtagctctgaagaattctatcaagctgttcatcatgctgagcaaaccttcagaaagatggaaagttatttgaagcagcagcaactttgtgatgttatcctgattgttgggaaccgaaagatacctgcacataggcttgttctgagttcagtctccgactattttgcggccatgtttacaagtgatgtttgtgaagccaagcaagaggagatcaaaatggaaggcatagaccccaatgctctctgggaccttgtccaatttgcatatacaggctgcttggaattaaaagaggacaccattgagaaccttcttgctgcagcgtgccttcttcagcttccacaggtggtggaagtgtgctgccacttcctcatgaagcttttgcatccatctaactgtttaggaattcgagccttcgcagatgctcaaggatgcattgagttaatgaaggtggcccacagctacacaatggaaaacataatggaagttatcagaaatcaagagtttttactccttccagctgaggagctccataaactactggccagtgatgatgtcaatgttcctgatgaagaaaccatcttccatgcattgatgatgtgggtcaagtatgacatgcagagtagatgcaatgacctgagcatgcttcttgcctttataagactgccactgcttccaccacagatattggctgacctagaaaatcatgcattatttaagaatgatctggaatgtcaaaagctgattctagaagcaatgaaataccatctattgccagaaagaagaactttaatgcaaagtccgagaactaaacccagaaaatctacagtcggaactttgtatgctgtaggaggaatggataacaacaaaggagctacaactatagagaaatatgatctgagaacaaatctgtggatccaggcagggatgatgaatggcagaaggctgcagtttggtgtggctgttattgatgacaaactctttgtaattggaggtcgagatggcttaaagacattgaacactgttgaatgttacaatcccaaaaccaagacatggactgtcttaccaccaatgtcaacacacagacatggtctaggtgtaacagtacttgaaggccctatttatgctgtgggaggccatgatggctggagctatctgaatacagtggaaaggtgggatccacagagtcaacaatggacatttgtagccagtatgtcaattgctcggagcacagttggtgtagcagcattgaatggcaagttgtattcagttggaggtcgtgatggaagttcctgtttgagttcaatggaatattatgatcctcatacaaataagtggaacatgtgtgctcccatgtgtaagaggagagggggtgtcggagtggccacatgtgacggttttctttatgcagtaggaggtcatgatgctcctgcttcaaatcactgttcccggctactggattatgtagaaagatatgatcccaaaacagacacttggaccatggtggctcctttgagtatgcccagagatgctgttggggtctgtctccttggtgacagattatatgctgttggtggctatgatggacagacatacctcaacactatggaatcctatgacccacaaactaatgagtggacacagatggcttccttgaatattgggagagcaggtgcctgtgtggtagtcatcaagcaaccttgacttattgatattttacttggaaagattttacttgctggagtggttatttttatattgaatggcaagaatgagaacttccagagatgaaaactcttcaagaacaaggatctctgtagcgttacctactgatgttgaaagagttagtagatcaaacagaatagtaggaaacaagaaaacattaaacttatacaggaaaaatgtctggccatatgttagttagttcgggaatggttattggtaatttgttttgtattatagcatacaataactagagttaccaaaggcttgttttttcttgagcagttgaaaggagagaccaatatttgtgacatggatagtttcatgaccacaactcattcaatcattttatagtctatggcaatatccaagagattgccaagagtagaagacagaatatttcatctgacagtatctgattggtttactgtttttctaatcatatgtggtcataacgggaagcagaattatgctttattcaaacaaacctgcttctgcctcattttcctaagctatgagaacaattagagaaacagattcatgcttgtatcttgcattcagaaaacaaactgtcctactaatcaaagctgcatatctcatcagagataatggttgaattttattgcaaccatattggcaatctgaaactggcaaacacaaaggattgttttcactaggcttaccattttgctttgcttttttaacacactgagccaaagatgcagtgtaattattgggcttttgccttatgttgagttcagtgtaagcatggaagctagtgattctgaatgatatatatatccattgcatgttgaactcctttagaattttgttcttaaacaaacttagaatttcaaaagaaaaacatatgatccattaagttggagtgtttatgattattgctagaaagaaggcagacttcatattctcatcgcccatttttcaaacttgttacattgatctgtacattattttaagccacatgtttgtaattgtttaaaacaaagtggaaacattacacaatgtccttaataaataggcccatgtaaattttaattacaattaataaatgatcaaaaaatttgcatttaaaaaaaaaa

SEQ ID NO: 283173 - DNA, 445 bp, Homo sapiens
gtacaatatcagttatgaaaaatcaagaatttctaatctcccaaggacaaacgcaaaagttgtcaagtatttgttaaaacagcttctacaaagtggaagataatagagctggatgcttatgaatcacacacaggtccccgctggaacccaggggctgaatgggggtctgatctcaactcacctgtacagattctgccaagacaaacagtgagcctgtcacggcccctgtcacagccaggcatatgcaacttgacaacagattacatcagtgaatccacacctgtcaaagttctcagatggccagatcgcactggctaccgtgggtagtcacagtgttgtgacagacacattctaaaggagtgctggaaggccatgggagaaggtacgcatggctagcactatagggcaccgctgcttcctaccaaatcccccggaagggattggg

SEQ ID NO: 283174 - DNA, 1350 bp, Homo sapiens
cagcggcggcgcggcgggcggagccgggaggcggggaagcagtggccgtgtgagcgtgaggagctgccgccaccgcctgctcctcgtcgtcctcgtcctccggggccccggcgacgtgggccgcgcacggccctggaaaagacgtcgcctccccttcatccgcctctctctcaccgcgccgctcccgcctcctcgtcctgcgctgcgggctcaggcggaacccggaacggccgtcctcttcccccgccctccgccgcctcctccttctcctcctcctcctcctcctcctccttctcggcttcctcctcagccccgggccggagcggggtgtcggcggcggccggttcgggcggcgactcgcgcttctttgggcggcggcgcttggccatgtcgtgtcggggaaggtaatgagccgcagagccccggggtctcggctgagcagcggcggcggcggcggcggcaccaagtatccgcggagctggaatgactggcaacccagaactgatagtgcatcagccgacccagataatttaaaatattcttcatccagagatagaggtggttcttcctcttatggactgcaaccttcaaattcagctgtggtgtctcggcaaaggcacgatgataccagagtccacgctgacatacagaatgacgaaaaggagagatcgatgtcttattctgatgagtctcgactgtcgaatcttcttcggaggatcacccgggaagacgacagagaccgaagattggctactgtaaagcagttgaaagaatttattcagcaaccagaaaataagctggtactagttaaacaattggataatatcttggctgctgtacatgacgtgcttaatgaaagtagcaaattgcttcaggagttgagacaggagggagcttgctgtcttggccttctttgtgcttctctgagctatgaggctgagaagatcttcaagtggatttttagcaaatttagctcatctgcaaaagatgaagttaaactcctctacttatgtgccacctacaaagcactagagactgtaggagaaaagaaagccttttcatctgtaatgcagcttgtaatgaccagcctgcagtctattcttgaaaatgtggatacaccagaattgctttgtaaatgtgttaagtgcattcttttggtggctcgatgttaccctcatattttcagcactaattttagggatacagttgatatattagttggatggcatatagatcatactcagaaaccttcgctcacgcagcaggtatctgggtggttgcagagtttggagccattttgggtagctgatcttgcattttctactactcttcttggtcagtttctggaag

SEQ ID NO: 283175 - DNA, 1332 bp, Homo sapiens
cagcggcggcgcggcgggcggagccgggaggcggggaagcagtggccgtgtgagcgtgaggagctgccgccaccgcctgctcctcgtcgtcctcgtcctccggggccccggcgacgtgggccgcgcacggccctggaaaagacgtcgcctccccttcatccgcctctctctcaccgcgccgctcccgcctcctcgtcctgcgctgcgggctcaggcggaacccggaacggccgtcctcttcccccgccctccgccgcctcctcctcctcctccttctcggcttcctcctcagccccgggccggagcggggtgtcggcggcggccggttcgggcggcgactcgcgcttctttgggcggcggcgcttggccatgtcgtgtcggggaaggtaatgagccgcagagccccggggtctcggctgagcagcggcggcggcggcggcggcaccaagtatccgcggagctggaatgactggcaacccagaactgatagtgcatcagccgacccagataatttaaaatattcttcatccagagatagaggtggttcttcctcttatggactgcaaccttcaaattcagctgtggtgtctcggcaaaggcacgatgataccagagtccacgctgacatacagaatgacgaaaaggagagatcgatgtcttattctgatgagtctcgactgtcgaatcttcttcggaggatcacccgggaagacgacagagaccgaagattggctactgtaaagcagttgaaagaatttattcagcaaccagaaaataagctggtactagttaaacaattggataatatcttggctgctgtacatgacgtgcttaatgaaagtagcaaattgcttcaggagttgagacaggagggagcttgctgtcttggccttctttgtgcttctctgagctatgaggctgagaagatcttcaagtggatttttagcaaatttagctcatctgcaaaagatgaagttaaactcctctacttatgtgccacctacaaagcactagagactgtaggagaaaagaaagccttttcatctgtaatgcagcttgtaatgaccagcctgcagtctattcttgaaaatgtggatacaccagaattgctttgtaaatgtgttaagtgcattcttttggtggctcgatgttaccctcatattttcagcactaattttagggatacagttgatatattagttggatggcatatagatcatactcagaaaccttcgctcacgcagcaggtatctgggtggttgcagagtttggagccattttgggtagctgatcttgcattttctactactcttcttggtcagtttctggaag

SEQ ID NO: 283176 - DNA, 1059 bp, Homo sapiens
ttaacagtcatgggtcggtgtcccgtaggctggtaatgactggcaagccatgaactgatagtgcatcagccgacccagataatttaaaatattcttcatccagagatagaggtggttcttcctcttatggactgcaaccttcaaattcagctgtggtgtctcggcaaaggcacgatgataccagagtccacgctgacatacagaatgacgaaaagggtggctacagtgtcaatggaggatctggggaaaatacttatggtcggaagtcgttggggcaagagctgagggttaacaatgtgaccagccctgagttcaccagtgttcagcatggcagtcgtgctttagccaccaaagacatgaggaaatcacaggagagatcgatgtcttattctgatgagtctcgactgtcgaatcttcttcggaggatcacccgggaagacgacagagaccgaagattggctactgtaaagcagttgaaagaatttattcagcaaccagaaaataagctggtactagttaaacaattggataatatcttggctgctgtacatgacgtgcttaatgaaagtagcaaattgcttcaggagttgagacaggagggagcttgctgtcttggccttctttgtgcttctctgagctatgaggctgagaagatcttcaagtggatttttagcaaatttagctcatctgcaaaagatgaagttaaactcctctacttatgtgccacctacaaagcactagagactgtaggagaaaagaaagccttttcatctgtaatgcagcttgtaatgaccagcctgcagtctattcttgaaaatgtggatacaccagaattgctttgtaaatgtgttaagtgcattcttttggtggctcgatgttaccctcatattttcagcactaattttagggatacagttgatatattagttggatggcatatagatcatactcagaaaccttcgctcacgcagcaggtatctgggtggttgcagagtttggagccattttgggtagctgatcttgcattttctactactcttcttggtcagtttctggaag

SEQ ID NO: 283177 - DNA, 382 bp, Homo sapiens
gctcatctgcaaaagatgaagttaaactcctctacttatgtgccacctacaaagcactagagactgtaggagaaaagaaagccttttcatctgtaatgcaggtaagaatgaagggggaaaaatgcatgatgtacttgggaagaaaattgtcccttaacacatgtccttggaggggagcttgaagaagggaaacatagaataggggttatctactgataggaaatatgttttaaaaattcctctttctcagtttgagtaaaggatacactgttcaaggatcagtgctacatacatatatgcatatatgtggagaaagagggagagatttcttctaagaaattggcttacacgccaggtgcggtggctcacgcctgtaatccca

SEQ ID NO: 283178 - DNA, 1466 bp, Homo sapiens
cagcggcggcgcggcgggcggagccgggaggcggggaagcagtggccgtgtgagcgtgaggagctgccgccaccgcctgctcctcgtcgtcctcgtcctccggggccccggcgacgtgggccgcgcacggccctggaaaagacgtcgcctccccttcatccgcctctctctcaccgcgccgctcccgcctcctcgtcctgcgctgcgggctcaggcggaacccggaacggccgtcctcttcccccgccctccgccgcctcctcctcctcctccttctcggcttcctcctcagccccgggccggagcggggtgtcggcggcggccggttcgggcggcggcgcttggccatgtcgtgtcggggaaggtaatgagccgcagagccccggggtctcggctgagcagcggcggcggcggcggcggcaccaagtatccgcggagctggaatgactggcaacccagaactgatagtgcatcagccgacccagataatttaaaatattcttcatccagagatagaggtggttcttcctcttatggactgcaaccttcaaattcagctgtggtgtctcggcaaaggcacgatgataccagagtccacgctgacatacagaatgacgaaaagggtggctacagtgtcaatggaggatctggggaaaatacttatggtcggaagtcgttggggcaagagctgagggttaacaatgtgaccagccctgagttcaccagtgttcagcatggcagtcgtgctttagccaccaaagacatgaggaaatcacaggagagatcgatgtcttattctgatgagtctcgactgtcgaatcttcttcggaggatcacccgggaagacgacagagaccgaagattggctactgtaaagcagttgaaagaatttattcagcaaccagaaaataagctggtactagttaaacaattggataatatcttggctgctgtacatgacgtgcttaatgaaagtagcaaattgcttcaggagttgagacaggagggagcttgctgtcttggccttctttgtgcttctctgagctatgaggctgagaagatcttcaagtggatttttagcaaatttagctcatctgcaaaagatgaagttaaactcctctacttatgtgccacctacaaagcactagagactgtaggagaaaagaaagccttttcatctgtaatgcagcttgtaatgaccagcctgcagtctattcttgaaaatgtggatacaccagaattgctttgtaaatgtgttaagtgcattcttttggtggctcgatgttaccctcatattttcagcactaattttagggatacagttgatatattagttggatggcatatagatcatactcagaaaccttcgctcacgcagcaggtatctgggtggttgcagagtttggagccattttgggtagctgatcttgcattttctactactcttcttggtcagtttctggaag

SEQ ID NO: 283179 - DNA, 1228 bp, Homo sapiens
agagatggggacggaggccacagagcaggtttcctggggccattactctggggatgaagaggacgcatactcggctgagccactgccggagctttgctacaaggccgatgtccaggccttcagccgggccttccaacccagtgtctccctgaccgtggctgcgctgggtctggccggcaatggcctggtcctggccacccacctggcagcccgacgcgcagcgcgctcgcccacctctgcccacctgctccagctggccctggccgacctcttgctggccctgactctgcccttcgcggcagcaggggctcttcagggctggagtctgggaagtgccacctgccgcaccatctctggcctctactcggcctccttccacgccggcttcctcttcctggcctgtatcagcgccgaccgctacgtggccatcgcgcgagcgctcccagccgggccgcggccctccactcccggccgcgcacacttggtctccgtcatcgtgtggctgctgtcactgctcctggcgctgcctgcgctgctcttcagccaggatgggcagcgggaaggccaacgacgctgtcgcctcatcttccccgagggcctcacgcagacggtgaagggggcgagcgccgtggcgcaggtggccctgggcttcgcgctgccgctgggcgtcatggtagcctgctacgcgcttctgggccgcacgctgctggccgccagggggcccgagcgccggcgtgcgctgcgcgtcgtggtggctctggtggcggccttcgtggtgctgcagctgccctacagcctcgccctgctgctggatactgccgatctactggctgcgcgcgagcggagctgccctgccagcaaacgcaaggatgtcgcactgctggtgaccagcggcttggccctcgcccgctgtggcctcaatcccgttctctacgccttcctgggcctgcgcttccgccaggacctgcggaggctgctacggggtgggagctgcccctcagggcctcaaccccgccgcggctgcccccgccggccccgcctttcttcctgctcagctcccacggagacccacagtctctcctgggacaactagggctgcgaatctagaggagggggcaggctgagggtcgtgggaaaggggagtaggtgggggaacactgagaaagaggcagggacctaaagggactacctctgtgccttgccacattaaattgataacatggaaatg

SEQ ID NO: 283180 - DNA, 1302 bp, Homo sapiens
agcctggcgaatcgcggcgcagtaaggagactgtagtaggaggaggcgcccagggagcgtgcatacaggggacccaccagctcctcgtcgcagccgtctagggtttcctggggccattactctggggatgaagaggacgcatactcggctgagccactgccggagctttgctacaaggccgatgtccaggccttcagccgggccttccaacccagtgtctccctgaccgtggctgcgctgggtctggccggcaatggcctggtcctggccacccacctggcagcccgacgcgcagcgcgctcgcccacctctgcccacctgctccagctggccctggccgacctcttgctggccctgactctgcccttcgcggcagcaggggctcttcagggctggagtctgggaagtgccacctgccgcaccatctctggcctctactcggcctccttccacgccggcttcctcttcctggcctgtatcagcgccgaccgctacgtggccatcgcgcgagcgctcccagccgggccgcggccctccactcccggccgcgcacacttggtctccgtcatcgtgtggctgctgtcactgctcctggcgctgcctgcgctgctcttcagccaggatgggcagcgggaaggccaacgacgctgtcgcctcatcttccccgagggcctcacgcagacggtgaagggggcgagcgccgtggcgcaggtggccctgggcttcgcgctgccgctgggcgtcatggtagcctgctacgcgcttctgggccgcacgctgctggccgccagggggcccgagcgccggcgtgcgctgcgcgtcgtggtggctctggtggcggccttcgtggtgctgcagctgccctacagcctcgccctgctgctggatactgccgatctactggctgcgcgcgagcggagctgccctgccagcaaacgcaaggatgtcgcactgctggtgaccagcggcttggccctcgcccgctgtggcctcaatcccgttctctacgccttcctgggcctgcgcttccgccaggacctgcggaggctgctacggggtgggagctgcccctcagggcctcaaccccgccgcggctgcccccgccggccccgcctttcttcctgctcagctcccacggagacccacagtctctcctgggacaactagggctgcgaatctagaggagggggcaggctgagggtcgtgggaaaggggagtaggtgggggaacactgagaaagaggcagggacctaaagggactacctctgtgccttgccacattaaattgataacatggaaatg

SEQ ID NO: 283181 - DNA, 951 bp, Homo sapiens
cgtggtcgacggcccgggctggtctgtgccttgactacgtaacatcttgtcctcacagcccagagcatgttccagatcccagagtttgagccgagtgagcaggaagactccagctctgcagagaggggcctgggccccagccccgcaggggacgggccctcaggctccggcaagcatcatcgccaggccccaggcctcctgtgggacgccagtcaccagcaggagcagccaaccagcagcagccatcatggaggcgctggggctgtggagatccggagtcgccacagctcctaccccgcggggacggaggacgacgaagggatgggggaggagcccagcccctttcggggccgctcgcgctcggcgccccccaacctctgggcagcacagcgctatggccgcgagctccggaggatgagtgacgagtttgtggactcctttaagaagggacttcctcgcccgaagagcgcgggcacagcaacgcagatgcggcaaagctccagctggacgcgagtcttccagtcctggtgggatcggaacttgggcaggggaagctccgccccctcccagtgaccttcgctccacatcccgaaactccacccgttcccactgccctgggcagccatcttgaatatgggcggaagtacttccctcaggcctatgcaaaaagaggatccgtgctgtctcctttggagggagggctgacccagattcccttccggtgcgtgtgaagccacggaaggcttggtcccatcggaagttttgggttttccgcccacagccgccggaagtggctccgtggccccgccctcaggctccgggctttcccccaggcgcctgcgctaagtcgcgagccaggtttaaccgttgcgtcaccgggacccgagcccccgcgatgccctgggggccgtgctcactaccaaatgttaataaagcccgcgtctgtgccgc

SEQ ID NO: 283182 - DNA, 1630 bp, Homo sapiens
gagaaaaaaagcctgtcgcccaggctggagtgcagtggcgtgatctcggctcactgcgacctctccctcccgggttcaaacgattcttctgcctcagcctcccgagtaactgggactataggcacgtgccactatgcccagctaatttttgtgttttgagtagagacagggtttcaccatgttggccaggatggtctcgatctcctgaccttgtgatgtaactagtatttcttatgcccttattttgtgctaggcacagggcctcacccattattggcactcggtaaggattcgtgggattaatgagaagttaacctaaatcttcaccaaaggcccctgagcttcccctcgattcacatacaagggactggggctctgagaggtgggctgtgatgcgcccctggaagacccacgagtgggcctgcagagctgatggggagggttcaggcagggcaggggcttagaggagctgagattaacgtcgcccccctacccactgaccctctgcaggcgctggggctgtggagatccggagtcgccacagctcctaccccgcggggacggaggacgacgaagggatgggggaggagcccagcccctttcggggccgctcgcgctcggcgccccccaacctctgggcagcacagcgctatggccgcgagctccggaggatgagtgacgagtttgtggactcctttaagaagggacttcctcgcccgaagagcgcgggcacagcaacgcagatgcggcaaagctccagctggacgcgagtcttccagtcctggtgggatcggaacttgggcaggggaagctccgccccctcccagtgaccttcgctccacatcccgaaactccacccgttcccactgccctgggcagccatcttgaatatgggcggaagtacttccctcaggcctatgcaaaaagaggatccgtgctgtctcctttggagggagggctgacccagattcccttccggtgcgtgtgaagccacggaaggcttggtcccatcggaagttttgggttttccgcccacagccgccggaagtggctccgtggccccgccctcaggctccgggctttcccccaggcgcctgcgctaagtcgcgagccaggtttaaccgttgcgtcaccgggacccgagcccccgcgatgccctgggggccgtgctcactaccaaatgttaataaagcccgcgtctgtgccgcaaaaaaaaaacaacacaaaaaaccccatcataccaaaaacaaaaacaccaacaccaaacacacaaaacagggggggggggccgaaaaaatcccccggggggggccacattttgcgtcccccactatctgtgcacaagagggccccccaagagaggacgcgctaaacaacacgcacgcgcgccggccgcggaacacaccgcgcgaggggggggaacacgccgacgcaggggagaccccgggaagagaacgaacccccacgcggcggcggggggggacaccatgtgggctgcagaccactccacaacagagaaataagacgccccgcgggagcaacaacaagccgcgcggggaacgcggcgcgtcacacgcgccgcatagtagcgcgcgacaacaacgtcgctcgcacgtatgcgaaaaatgcc

SEQ ID NO: 283183 - DNA, 776 bp, Homo sapiens
ccatacagaagcaccagccagagctgggcatagacggagaagaagagcagggcatacagggtggtgtaggcagctgtcagccccagggtcacagcaggtggcagcgcaggcaccagcccggcagcaggcaccaggccagacaggttactctccatgtcagggagggaggccatcgctcccggccctttgattctcgaattgcggtctcatcttctgggtgctaggtctccagctctggcctttccatttagggccctaggcatcctctcttcccgtctccggcacggagttcctgggatctaaccagttcccattcctgggggcccatgcgtcctcgcgagcgtccctgaccgcccggcgtggagcctcctgggagttgtggccttcattatctcccccccgatctcacttagaggaaggctcacggaagtggagagcctggctcgagctgccatggtaatctaactcatgtaacccttttctccctccaccagaagggacttcctcgcccgaagagcgcgggcacagcaacgcagatgcggcaaagctccagctggacgcgagtcttccagtcctggtgggatcggaacttgggcaggggaagctccgccccctcccagtgaccttcgctccacatcccgaaactccacccgttcccactgccctgggcagccatcttgaatatgggcggaagtacttccctcaggcctatgcaggactcagcatcaccatcccgtggtgctgtccgcagctaccgggctcggcaggcgtgcgcg

SEQ ID NO: 283184 - DNA, 1412 bp, Homo sapiens
tgactgaactaagtggcttttttattagagaaagccagaattacaaaagacttaagagttggcattggggcccttcttcttgccaaaggtgggcacaacgttgacaaagcgccggttgtactgcatccgccgcttagcccgacctgtcttcttcttcttcttctcctgtttggccaccttaggagtctgacctctcacttttccagcccggggtgctggagggaggcggcaggcccgggtcaggggcctcgagatcgggcttggggtgagacctgtgcgccgtcaccacgggcggggcggggcctgggtccaccggggttctgaggggagactgaggtcctgagccgacagcctcagctccctgccaggccagacccggcagacagatgagggcccaggaggcctggcgggcctgggggcgctacggtgggagaggaagccaggggtacctgcctctgccttccagggccaccgttggccccagctgtgccttgactacgtaacatcttgtcctcacagcccagagcatgttccagatcccagagtttgagccgagtgagcaggaagactccagctctgcagagaggggcctgggccccagccccgcaggggacgggccctcaggctccggcaagcatcatcgccaggccccaggcctcctgtgggacgccagtcaccagcaggagcagccaaccagcagcagccatcatggaggcgctggggctgtggagatccggagtcgccacagctcctaccccgcggggacggaggacgacgaagggatgggggaggagcccagcccctttcggggccgctcgcgctcggcgccccccaacctctgggcagcacagcgctatggccgcgagctccggaggatgagtgacgagtttgtggactcctttaagaagggacttcctcgcccgaagagcgcgggcacagcaacgcagatgcggcaaagctccagctggacgcgagtcttccagtcctggtgggatcggaacttgggcaggggaagctccgccccctcccagtgaccttcgctccacatcccgaaactccacccgttcccactgccctgggcagccatcttgaatatgggcggaagtacttccctcaggcctatgcaaaaagaggatccgtgctgtctcctttggagggagggctgacccagattcccttccggtgcgtgtgaagccacggaaggcttggtcccatcggaagttttgggttttccgcccacagccgccggaagtggctccgtggccccgccctcaggctccgggctttcccccaggcgcctgcgctaagtcgcgagccaggtttaaccgttgcgtcaccgggacccgagcccccgcgatgccctgggggccgtgctcactaccaaatgttaataaagcccgcgtctgtgccgc

SEQ ID NO: 283185 - DNA, 1208 bp, Homo sapiens
gagaaaaaaagcctgtcgcccaggctggagtgcagtggcgtgatctcggctcactgcgacctctccctcccgggttcaaacgattcttctgcctcagcctcccgagtaactgggactataggcacgtgccactatgcccagctaatttttgtgttttgagtagagacagggtttcaccatgttggccaggatggtctcgatctcctgaccttgtgatgtaactagtatttcttatgcccttattttgtgctaggcacagggcctcacccattattggcactcggtaaggattcgtgggattaatgagaagttaacctaaatcttcaccaaaggcccctgagcttcccctcgattcacatacaagggactggggctctgagaggtgggctgtgatgcgcccctggaagacccacgagtgggcctgcagagctgatggggagggttcaggcagggcaggggcttagaggagctgagattaacgtcgcccccctacccactgaccctctgcaggcgctggggctgtggagatccggagtcgccacagctcctaccccgcggggacggaggacgacgaagggatgggggaggagcccagcccctttcggggccgctcgcgctcggcgccccccaacctctgggcagcacagcgctatggccgcgagctccggaggatgagtgacgagtttgtggactcctttaagaagggacttcctcgcccgaagagcgcgggcacagcaacgcagatgcggcaaagctccagctggacgcgagtcttccagtcctggtgggatcggaacttgggcaggggaagctccgccccctcccagtgaccttcgctccacatcccgaaactccacccgttcccactgccctgggcagccatcttgaatatgggcggaagtacttccctcaggcctatgcaaaaagaggatccgtgctgtctcctttggagggagggctgacccagattcccttccggtgcgtgtgaagccacggaaggcttggtcccatcggaagttttgggttttccgcccacagccgccggaagtggctccgtggccccgccctcaggctccgggctttcccccaggcgcctgcgctaagtcgcgagccaggtttaaccgttgcgtcaccgggacccgagcccccgcgatgccctgggggccgtgctcactaccaaatgttaataaagcccgcgtctgtgccgc

SEQ ID NO: 283186 - DNA, 1283 bp, Homo sapiens
tgactgaactaagtggcttttttattagagaaagccagaattacaaaagacttaagagttggcattggggcccttcttcttgccaaaggtgggcacaacgttgacaaagcgccggttgtactgcatccgccgcttagcccgacctgtcttcttcttcttcttctcctgtttggccaccttaggagtctgacctctcacttttccagcccggggtgctggagggaggcggcaggcccgggtcaggggcctcgagatcgggcttgggcccagagcatgttccagatcccagagtttgagccgagtgagcaggaagactccagctctgcagagaggggcctgggccccagccccgcaggggacgggccctcaggctccggcaagcatcatcgccaggccccaggcctcctgtgggacgccagtcaccagcaggagcagccaaccagcagcagccatcatggaggcgctggggctgtggagatccggagtcgccacagctcctaccccgcggggacggaggacgacgaagggatgggggaggagcccagcccctttcggggccgctcgcgctcggcgccccccaacctctgggcagcacagcgctatggccgcgagctccggaggatgagtgacgagtttgtggactcctttaagaagggacttcctcgcccgaagagcgcgggcacagcaacgcagatgcggcaaagctccagctggacgcgagtcttccagtcctggtgggatcggaacttgggcaggggaagctccgccccctcccagtgaccttcgctccacatcccgaaactccacccgttcccactgccctgggcagccatcttgaatatgggcggaagtacttccctcaggcctatgcaaaaagaggatccgtgctgtctcctttggagggagggctgacccagattcccttccggtgcgtgtgaagccacggaaggcttggtcccatcggaagttttgggttttccgcccacagccgccggaagtggctccgtggccccgccctcaggctccgggctttcccccaggcgcctgcgctaagtcgcgagccaggtttaaccgttgcgtcaccgggacccgagcccccgcgatgccctgggggccgtgctcactaccaaatgttaataaagcccgcgtctgtgccgcaaaaaaaaaacaattaacaaacaaaaaagcgcggtaaatacccagggaaacactttgaggacatatataaacacgcgcccaacacgaaggtcgactggggaccaaccaaatatattgtgatacaa

SEQ ID NO: 283187 - DNA, 1001 bp, Homo sapiens
ccatacagaagcaccagccagagctgggcatagacggagaagaagagcagggcatacagggtggtgtaggcagctgtcagccccagggtcacagcaggtggcagcgcaggcaccagcccggcagcaggcaccaggccagacaggttactctccatgtcagggagggaggccatcgctcccggccctttgattctcgaattgcggtctcatcttctgggtgctaggtctccagctctggcctttccatttagggccctaggcatcctctcttcccgtctccggcacggagttcctgggatctaaccagttcccattcctgggggcccatgcgtcctcgcgagcgtccctgaccgcccggcgtggagcctcctgggagttgtggccttcattatctcccccccgatctcacttagaggaaggctcacggaagtggagagcctggctcgagctgccatggtaatctaactcatgtaacccttttctccctccaccagaagggacttcctcgcccgaagagcgcgggcacagcaacgcagatgcggcaaagctccagctggacgcgagtcttccagtcctggtgggatcggaacttgggcaggggaagctccgccccctcccagtgaccttcgctccacatcccgaaactccacccgttcccactgccctgggcagccatcttgaatatgggcggaagtacttccctcaggcctatgcaaaaagaggatccgtgctgtctcctttggagggagggctgacccagattcccttccggtgcgtgtgaagccacggaaggcttggtcccatcggaagttttgggttttccgcccacagccgccggaagtggctccgtggccccgccctcaggctccgggctttcccccaggcgcctgcgctaagtcgcgagccaggtttaaccgttgcgtcaccgggacccgagcccccgcgatgccctgggggccgtgctcactaccaaatgttaataaagcccgcgtctgtgccgc

SEQ ID NO: 283188 - DNA, 1439 bp, Homo sapiens
tgactgaactaagtggcttttttattagagaaagccagaattacaaaagacttaagagttggcattggggcccttcttcttgccaaaggtgggcacaacgttgacaaagcgccggttgtactgcatccgccgcttagcccgacctgtcttcttcttcttcttctcctgtttggccaccttaggagtctgacctctcacttttccagcccggggtgctggagggaggcggcaggcccgggtcaggggcctcgagatcgggcttgggcccagagcatgttccagatcccagagtttgagccgagtgagcaggaagactccagctctgcagagaggggcctgggccccagccccgcaggggacgggccctcaggctccggcaagcatcatcgccaggccccaggcctcctgtgggacgccagtcaccagcaggagcagccaaccagcagcagccatcatggaggcgctggggctgtggagatccggagtcgccacagctcctaccccgcggggacggaggacgacgaagggatgggggaggagcccagcccctttcggggccgctcgcgctcggcgccccccaacctctgggcagcacagcgctatggccgcgagctccggaggatgagtgacgagtttgtggactcctttaagaagggacttcctcgcccgaagagcgcgggcacagcaacgcagatgcggcaaagctccagctggacgcgagtcttccagtcctggtgggatcggaacttgggcaggggaagctccgccccctcccagtgaccttcgctccacatcccgaaactccacccgttcccactgccctgggcagccatcttgaatatgggcggaagtacttccctcaggcctatgcaaaaagaggatccgtgctgtctcctttggagggagggctgacccagattcccttccggtgcgtgtgaagccacggaaggcttggtcccatcggaagtttcggcagtggcatccggggccggggtcgcggccgtggacggggccggggccgaggccgcggagctcgcggaggcaaggccgaggataaggagtggatgcccgtcaccaagttgggccgcttggtcaaggacatgaagatcaagtccctggaggagatctatctcttctccctgcccattaaggaatcagagatcattgatttcttcctgggggcctctctcaaggatgaggtttcgaagattatgccagtgcagaagcagacccgtgccggccagcgcaccaggttcaaggcatttgttgctatcggggactacaatggccacgtcggtctgggtgttaagtgctccaaggaggtggccaccgccatccgtggggccatcatcctggccaagctctccatcgtccccgtgcgcagaggctactgggggaacaagatcggcaagccccacactgtcccttgcaaggtgaca

SEQ ID NO: 283189 - DNA, 1693 bp, Homo sapiens
tgactgaactaagtggcttttttattagagaaagccagaattacaaaagacttaagagttggcattggggcccttcttcttgccaaaggtgggcacaacgttgacaaagcgccggttgtactgcatccgccgcttagcccgacctgtcttcttcttcttcttctcctgtttggccaccttaggagtctgacctctcacttttccagcccggggtgctggagggaggcggcaggcccgggtcaggggcctcgagatcgggcttggggtgagacctgtgcgccgtcaccacgggcggggcggggcctgggtccaccggggttctgaggggagactgaggtcctgagccgacagcctcagctccctgccaggccagacccggcagacagatgagggcccaggaggcctggcgggcctgggggcgctacggtgggagaggaagccaggggtacctgcctctgccttccagggccaccgttggccccagctgtgccttgactacgtaacatcttgtcctcacagcccagagcatgttccagatcccagagtttgagccgagtgagcaggaagactccagctctgcagagaggggcctgggccccagccccgcaggggacgggccctcaggctccggcaagcatcatcgccaggccccaggcctcctgtgggacgccagtcaccagcaggagcagccaaccagcagcagccatcatggaggcgctggggctgtggagatccggagtcgccacagctcctaccccgcggggacggaggacgacgaagggatgggggaggagcccagcccctttcggggccgctcgcgctcggcgccccccaacctctgggcagcacagcgctatggccgcgagctccggaggatgagtgacgagtttgtggactcctttaagaagggacttcctcgcccgaagagcgcgggcacagcaacgcagatgcggcaaagctccagctggacgcgagtcttccagtcctggtgggatcggaacttgggcaggggaagctccgccccctcccagtgaccttcgctccacatcccgaaactccacccgttcccactgccctgggcagccatcttgaatatgggcggaagtacttccctcaggcctatgcaaaaagaggatccgtgctgtctcctttggagggagggctgacccagattcccttccggtgcgtgtgaagccacggaaggcttggtcccatcggaagtttcggcagtggcatccggggccggggtcgcggccgtggacggggccggggccgaggccgcggagctcgcggaggcaaggccgaggataaggagtggatgcccgtcaccaagttgggccgcttggtcaaggacatgaagatcaagtccctggaggagatctatctcttctccctgcccattaaggaatcagagatcattgatttcttcctgggggcctctctcaaggatgaggtttcgaagattatgccagtgcagaagcagacccgtgccggccagcgcaccaggttcaaggcatttgttgctatcggggactacaatggccacgtcggtctgggtgttaagtgctccaaggaggtggccaccgccatccgtggggccatcatcctggccaagctctccatcgtccccgtgcgcagaggctactgggggaacaagatcggcaagccccacactgtcccttgcaaggtgaca

SEQ ID NO: 283190 - DNA, 447 bp, Homo sapiens
ctgcccacgaagtgggaacgggtggagtttcgggatgtggagcgaaggtcactgggagggggcggagcttcccctgcccaagttccgatcccaccaggactggaagactcgcgtccagccatcttgaatatgggcggaagtacttccctcaggcctatgcaaaaagaggatccgtgctgtctcctttggagggagggctgacccagattcccttccggtgcgtgtgaagccacggaaggcttggtcccatcggaagttttgggttttccgcccacagccgccggaagtggctccgtggccccgccctcaggctccgggctttcccccaggcgcctgcgctaagtcgcgagccaggtttaaccgttgcgtcaccgggacccgagcccccgcgatgccctgggggccgtgctcactaccaaatgttaataaagcccgcgtctgtgccgc

SEQ ID NO: 283191 - DNA, 973 bp, Homo sapiens
tgactgaactaagtggcttttttattagagaaagccagaattacaaaagacttaagagttggcattggggcccttcttcttgccaaaggtgggcacaacgttgacaaagcgccggttgtactgcatccgccgcttagcccgacctgtcttcttcttcttcttctcctgtttggccaccttaggagtctgacctctcacttttccagcccggggtgctggagggaggcggcaggcccgggtcaggggcctcgagatcgggcttggggtgagacctgtgcgccgtcaccacgggcggggcggggcctgggtccaccggggttctgaggggagactgaggtcctgagccgacagcctcagctccctgccaggccagacccggcagacagatgagggcccaggaggcctggcgggcctgggggcgctacggtgggagaggaagccaggggtacctgcctctgccttccagggccaccgttggccccagctgtgccttgactacgtaacatcttgtcctcacagcccagagcatgttccagatcccagagtttgagccgagtgagcaggaagactccagctctgcagagaggggcctgggccccagccccgcaggggacgggccctcaggctccggcaagcatcatcgccaggccccaggcctcctgtgggacgccagtcaccagcaggagcagccaaccagcagcagccatcatggaggcgctggggctgtggagatccggagtcgccacagctcctaccccgcggggacggaggacgacgaagggatgggggaggagcccagcccctttcggggccgctcgcgctcggcgccccccaacgctccgggctttcccccaggcgcctgcgctaagtcgcgagccaggtttaaccgttgcgtcaccgggacccgagcccccgcgatgccctgggggccgtgctcactaccaaatgttaataaagcccgcgtctgtgccgc

SEQ ID NO: 283192 - DNA, 1158 bp, Homo sapiens
tgactgaactaagtggcttttttattagagaaagccagaattacaaaagacttaagagttggcattggggcccttcttcttgccaaaggtgggcacaacgttgacaaagcgccggttgtactgcatccgccgcttagcccgacctgtcttcttcttcttcttctcctgtttggccaccttaggagtctgacctctcacttttccagcccggggtgctggagggaggcggcaggcccgggtcaggggcctcgagatcgggcttgggcccagagcatgttccagatcccagagtttgagccgagtgagcaggaagactccagctctgcagagaggggcctgggccccagccccgcaggggacgggccctcaggctccggcaagcatcatcgccaggccccaggcctcctgtgggacgccagtcaccagcaggagcagccaaccagcagcagccatcatggaggcgctggggctgtggagatccggagtcgccacagctcctaccccgcggggacggaggacgacgaagggatgggggaggagcccagcccctttcggggccgctcgcgctcggcgccccccaacctctgggcagcacagcgctatggccgcgagctccggaggatgagtgacgagtttgtggactcctttaagaagggacttcctcgcccgaagagcgcgggcacagcaacgcagatgcggcaaagctccagctggacgcgagtcttccagtcctggtgggatcggaacttgggcaggggaagctccgccccctcccagtgaccttcgctccacatcccgaaactccacccgttcccactgccctgggcagccatcttgaatatgggcggaagtacttccctcaggcctatgcaaaaagaggatccgtgctgtctcctttggagggagggctgacccagattcccttccggtgcgtgtgaagccacggaaggcttggtcccatcggaagttttgggttttccgcccacagccgccggaagtggctccgtggccccgccctcaggctccgggctttcccccaggcgcctgcgctaagtcgcgagccaggtttaaccgttgcgtcaccgggacccgagcccccgcgatgccctgggggccgtgctcactaccaaatgttaataaagcccgcgtctgtgccgc

SEQ ID NO: 283193 - DNA, 1580 bp, Homo sapiens
tgactgaactaagtggcttttttattagagaaagccagaattacaaaagacttaagagttggcattggggcccttcttcttgccaaaggtgggcacaacgttgacaaagcgccggttgtactgcatccgccgcttagcccgacctgtcttcttcttcttcttctcctgtttggccaccttaggagtctgacctctcacttttccagcccggggtgctggagggaggcggcaggcccgggtcaggggcctcgagatcgggcttgggcccagagcatgttccagatcccagagtttgagccgagtgagcaggaagactccagctctgcagagaggggcctgggccccagccccgcaggggacgggccctcaggctccggcaagcatcatcgccaggccccaggcctcctgtgggacgccagtcaccagcaggagcagccaaccagcagcagccatcatggaggcgctggggctgtggagatccggagtcgccacagctcctaccccgcggggacggaggacgacgaagggatgggggaggagcccagcccctttcggggccgctcgcgctcggcgccccccaacctctgggcagcacagcgctatggccgcgagctccggaggatgagtgacgagtttgtggactcctttaagaagggacttcctcgcccgaagagcgcgggcacagcaacgcagatgcggcaaagctccagctggacgcgagtcttccagtcctggtgggatcggaacttgggcaggggaagctccgccccctcccagtgaccttcgctccacatcccgaaactccacccgttcccactgccctgggcagccatcttgaatatgggcggaagtacttccctcaggcctatgcaaaaagaggatccgtgctgtctcctttggagggagggctgacccagattcccttccggtgcgtgtgaagccacggaaggcttggtcccatcggaagttttgggttttccgcccacagccgccggaagtggctccgtggccccgccctcaggctccgggctttcccccaggcgcctgcgctaagtcgcgagccaggtttaaccgttgcgtcaccgggacccgagcccccgcgatgccctgggggccgtgctcactaccaaatgttaataaagcccgcgtctgtgccgcaaaaaaaaaacaacacaaaaaaccccatcataccaaaaacaaaaacaccaacaccaaacacacaaaacagggggggggggccgaaaaaatcccccggggggggccacattttgcgtcccccactatctgtgcacaagagggccccccaagagaggacgcgctaaacaacacgcacgcgcgccggccgcggaacacaccgcgcgaggggggggaacacgccgacgcaggggagaccccgggaagagaacgaacccccacgcggcggcggggggggacaccatgtgggctgcagaccactccacaacagagaaataagacgccccgcgggagcaacaacaagccgcgcggggaacgcggcgcgtcacacgcgccgcatagtagcgcgcgacaacaacgtcgctcgcacgtatgcgaaaaatgcc

SEQ ID NO: 283194 - DNA, 838 bp, Homo sapiens
gaggacacaggctaagagagtcgaaggctggctagacaaggggagagacacagagctccgctgatcatcactggactctggattccaccaaacctttggaaccttccagcctcaggcctccacagcttcacagaaactgggcgctggggctgtggagatccggagtcgccacagctcctaccccgcggggacggaggacgacgaagggatgggggaggagcccagcccctttcggggccgctcgcgctcggcgccccccaacctctgggcagcacagcgctatggccgcgagctccggaggatgagtgacgagtttgtggactcctttaagaagggacttcctcgcccgaagagcgcgggcacagcaacgcagatgcggcaaagctccagctggacgcgagtcttccagtcctggtgggatcggaacttgggcaggggaagctccgccccctcccagtgaccttcgctccacatcccgaaactccacccgttcccactgccctgggcagccatcttgaatatgggcggaagtacttccctcaggcctatgcaaaaagaggatccgtgctgtctcctttggagggagggctgacccagattcccttccggtgcgtgtgaagccacggaaggcttggtcccatcggaagttttgggttttccgcccacagccgccggaagtggctccgtggccccgccctcaggctccgggctttcccccaggcgcctgcgctaagtcgcgagccaggtttaaccgttgcgtcaccgggacccgagcccccgcgatgccctgggggccgtgctcactaccaaatgttaataaagcccgcgtctgtgccgc

SEQ ID NO: 283195 - DNA, 740 bp, Homo sapiens
gctgactcagaagcccaacacgcagagaatgtaaagctagaggcgctggggctgtggagatccggagtcgccacagctcctaccccgcggggacggaggacgacgaagggatgggggaggagcccagcccctttcggggccgctcgcgctcggcgccccccaacctctgggcagcacagcgctatggccgcgagctccggaggatgagtgacgagtttgtggactcctttaagaagggacttcctcgcccgaagagcgcgggcacagcaacgcagatgcggcaaagctccagctggacgcgagtcttccagtcctggtgggatcggaacttgggcaggggaagctccgccccctcccagtgaccttcgctccacatcccgaaactccacccgttcccactgccctgggcagccatcttgaatatgggcggaagtacttccctcaggcctatgcaaaaagaggatccgtgctgtctcctttggagggagggctgacccagattcccttccggtgcgtgtgaagccacggaaggcttggtcccatcggaagttttgggttttccgcccacagccgccggaagtggctccgtggccccgccctcaggctccgggctttcccccaggcgcctgcgctaagtcgcgagccaggtttaaccgttgcgtcaccgggacccgagcccccgcgatgccctgggggccgtgctcactaccaaatgttaataaagcccgcgtctgtgccgc

SEQ ID NO: 283196 - DNA, 1094 bp, Homo sapiens
cgcatggtgtgtgtgtgtgtgtgtctcacagggcatgctgggatctgtagtctagatcccactccaggccaaagctcctgggttccccgaattcttggaagaccaggcatgctggtatttgtgctccttgctggcacctgtgcgctctgtcgcccaggctggagtgcagtggtgcgatcacggctcactgcagcctggaactcctggcctcaaaggatcctcccgcttcaacctcccaaagtgctgggattacaggcgctcaccatcgctcccggccctttgattctcgaattgcggtctcatcttctgggtgctaggtctccagctctggcctttccatttagggccctaggcatcctctcttcccgtctccggcacggagttcctgggatctaaccagttcccattcctgggggcccatgcgtcctcgcgagcgtccctgaccgcccggcgtggagcctcctgggagttgtggccttcattatctcccccccgatctcacttagaggaaggctcacggaagtggagagcctggctcgagctgccatggtaatctaactcatgtaacccttttctccctccaccagaagggacttcctcgcccgaagagcgcgggcacagcaacgcagatgcggcaaagctccagctggacgcgagtcttccagtcctggtgggatcggaacttgggcaggggaagctccgccccctcccagtgaccttcgctccacatcccgaaactccacccgttcccactgccctgggcagccatcttgaatatgggcggaagtacttccctcaggcctatgcaaaaagaggatccgtgctgtctcctttggagggagggctgacccagattcccttccggtgcgtgtgaagccacggaaggcttggtcccatcggaagttttgggttttccgcccacagccgccggaagtggctccgtggccccgccctcaggctccgggctttcccccaggcgcctgcgctaagtcgcgagccaggtttaaccgttgcgtcaccgggacccgagcccccgcgatgccctgggggccgtgctcactaccaaatgttaataaagcccgcgtctgtgccgc

SEQ ID NO: 283197 - DNA, 1214 bp, Homo sapiens
tgactgaactaagtggcttttttattagagaaagccagaattacaaaagacttaagagttggcattggggcccttcttcttgccaaaggtgggcacaacgttgacaaagcgccggttgtactgcatccgccgcttagcccgacctgtcttcttcttcttcttctcctgtttggccaccttaggagtctgacctctcacttttccagcccggggtgctggagggaggcggcaggcccgggtcaggggcctcgagatcgggcttggggtgagacctgtgcgccgtcaccacgggcggggcggggcctgggtccaccggggttctgaggggagactgaggtcctgagccgacagcctcagctccctgccaggccagacccggcagacagatgagggcccaggaggcctggcgggcctgggggcgctacggtgggagaggaagccaggggtacctgcctctgccttccagggccaccgttggccccagctgtgccttgactacgtaacatcttgtcctcacagcccagagcatgttccagatcccagagtttgagccgagtgagcaggaagactccagctctgcagagaggggcctgggccccagccccgcaggggacgggccctcaggctccggcaagcatcatcgccaggccccaggcctcctgtgggacgccagtcaccagcaggagcagccaaccagcagcagccatcatggaggcgctggggctgtggagatccggagtcgccacagctcctaccccgcggggacggaggacgacgaagggatgggggaggagcccagcccctttcggggccgctcgcgctcggcgccccccaacctctgggcagcacagcgctatggccgcgagctccggaggatgagtgacgagtttgtggactcctttaagaagggacttcctcgcccgaagagcgcgggcacagcaacgcagatgcggcaaagctccagctggacgcgagtcttccagtcctggtgggatcggaacttgggcaggggaagctccgccccctcccagtgaccttcgctccacatcccgaaactcattgaggttcgttatactgcccaggctggtctcaaactcatgacctcaagcaatcctcccaccttggcctcccaaattgctgggattacaggtgtatttacagtggttccttagcctaagatctatgcttaactgtgataacattttatatactat

SEQ ID NO: 283198 - DNA, 459 bp, Homo sapiens
tagtacctacatattccggaactacatacctcctggtgggatcggaacttgggcaggggaagctccgccccctcccagtgaccttcgctccacatcccgaaactccacccgttcccactgccctgggcagccatcttgaatatgggcggaagtacttccctcaggcctatgcaaaaagaggatccgtgctgtctcctttggagggagggctgacccagattcccttccggtgcgtgtgaagccacggaaggcttggtcccatcggaagttttgggttttccgcccacagccgccggaagtggctccgtggccccgccctcaggctccgggctttcccccaggcgcctgcgctaagtcgcgagccaggtttaaccgttgcgtcaccgggacccgagcccccgcgatgccctgggggccgtgctcactaccaaatgttaataaagcccgcgtctgtgccgc

SEQ ID NO: 283199 - DNA, 1046 bp, Homo sapiens
tgactgaactaagtggcttttttattagagaaagccagaattacaaaagacttaagagttggcattggggcccttcttcttgccaaaggtgggcacaacgttgacaaagcgccggttgtactgcatccgccgcttagcccgacctgtcttcttcttcttcttctcctgtttggccaccttaggagtctgacctctcacttttccagcccggggtgctggagggaggcggcaggcccgggtcaggggcctcgagatcgggcttggggtgagacctgtgcgccgtcaccacgggcggggcggggcctgggtccaccggggttctgaggggagactgaggtcctgagccgacagcctcagctccctgccaggccagacccggcagacagatgagggcccaggaggcctggcgggcctgggggcgctacggtgggagaggaagccaggggtacctgcctctgccttccagggccaccgttggccccagctgtgccttgactacgtaacatcttgtcctcacagcccagagcatgttccagatcccagagtttgagccgagtgagcaggaagactccagctctgcagagaggggcctgggccccagccccgcaggggacgggccctcaggctccggcaagcatcatcgccaggccccaggcctcctgtgggacgccagtcaccagcaggagcagccaaccagcagcagccatcatggaggcgctggggctgtggagatccggagtcgccacagctcctaccccgcggggacggaggacgacgaagggatgggggaggagcccagcccctttcggggccgctcgcgctcggcgccccccaacctctgggcagcacagcgctatggccgcgagctccggaggatgagtgacgagtttgtggactcctttaaggtgagcgccagtccccagcgtgccaggacctgaagtaccaggccgccccccgccggtctgtccctgccttgtcccaaggcacgcccggatctggagtcccacgacccctccccaaagccgtcctgttccttcctagctcca

SEQ ID NO: 283200 - DNA, 943 bp, Homo sapiens
tcacaagccctctttcctggactaggaggaagaactcaatgcctctcagctccaggccttactaagcattgccctggagcctggccatattcaacaagttcgatgaggacacctctggaaccatgaactcctacgagctgaggctggcactgaatgcagcaggcttccacctgaacaaccagctgacccagaccctcaccagccgctaccgggatagccgtctgcgtgtggacttcgagcggttcgtgtcctgtgtggcccacctcacctgcatcttctgccactgcagccagcacctggatgggggtgagggggtcatctgcctgacccacagacagtggatggaggtggccaccttctcctaggatctccggatgggcgcacctgctgctcagggcagggttgctgagcaagaccacctccctaggccttgcctggcatgggtgccactctctctggcatccacctgtctggggctagtctctggccctcactgctcacggccgggtgaccactctggcctgcgtactcctcactcagaaacaagaacagcgacagcccctctcgagcagatgacacgagctagtccacgttgacagcttaagacagtgctagctctgccctggctctcctagaaggtggaggacagacacaggagaaataaaaaaagatgatgctgcaggaatccttcttaaaaatattacatgttttattatcctgtccccagagggtggtttatccagaaaccaagaaaaaaaatcaatcagaataaactcaaaaaaaaaaggtagggggagcaaaaccatcaaccaccaggcagccaggccatcagcccacctccacctctggagggtccccagagacccacgcccgacgcagacccggaggagcatcagcaaggggcccgggcagagaatcggctatgtcttcattatgagagcag

SEQ ID NO: 283201 - DNA, 642 bp, Homo sapiens
gcccagggctccacggtccctacctagaccccacgcgattcctcacctgagaccccgtcccacacagccccagctggggcaaacagccccctccccacttcccatctgtaatttgcagggagatcgacgacgtgatcagcgcagacctgcagtctctccagggcccctacctgcccctggagctggggttggagcagctgtttcaggagctggctggagaggaggaagaactcaatgcctctcagctccaggccttactaagcattgccctggagcctggtgagttggctgggataggggcaggaggaggggtcttagccaggggtcctgcaaccagagccggtgccaccctatgtctatgaacccaccgcgctgctgggagttgggctcaggaagccagggctcagcctggcagcatctccctgcaggggatcttgtgtgggccccgtgacctgggccacggctgctcgcaagctccccttccgctgaaaggcaaggctgccttgagcacagactgggcaccccctgcctggatttgaatcccagctctgctaggcgcagcagtcactggctccctgtgcctcggcttctataatatgggactgacaacatcacctgcttaagggagtcacatccacccag

SEQ ID NO: 283202 - DNA, 376 bp, Homo sapiens
ggccaacacttataccccgtgaatcaattcttcttcagcatgccagttgctggagacagcaccatttacatacaggcatctatagcagttatcttccaggatggaagcaagagttttgtaatcataaaaaacaggacagagaaacaaggagttctgaaaagaagagaaggcggttatagaggtgttggggataacgttatacacagcatgggcaaagcctggccttacaccacttccagcagctctggggctacctcctggagtggcaggtgaggtgggagactgggcctcttcccagaaagagagaaacctttactaacagagacataggcaccctgtgggctatcaggtccccagggaacgagggggtactgga

SEQ ID NO: 283203 - DNA, 1279 bp, Homo sapiens
gcccagggctccacggtccctacctagaccccacgcgattcctcacctgagaccccgtcccacacagccccagctggggcaaacagccccctccccacttcccatctgtaatttgcagggagatcgacgacgtgatcagcgcagacctgcagtctctccagggcccctacctgcccctggagctggggttggagcagctgtttcaggagctggctggagaggaggaagaactcaatgcctctcagctccaggccttactaagcattgccctggagcctgccagggcccatacctccacccccagagagatcgggctcaggacctgtgagcagctgctgcagtgtttcgggacacagcatgggcaaagcctggccttacaccacttccagcagctctggggctacctcctggagtggcaggccatattcaacaagttcgatgaggacacctctggaaccatgaactcctacgagctgaggctggcactgaatgcagcaggcttccacctgaacaaccagctgacccagaccctcaccagccgctaccgggatagccgtctgcgtgtggacttcgagcggttcgtgtcctgtgtggcccacctcacctgcatcttctgccactgcagccagcacctggatgggggtgagggggtcatctgcctgacccacagacagtggatggaggtggccaccttctcctaggatctccggatgggcgcacctgctgctcagggcagggttgctgagcaagaccacctccctaggccttgcctggcatgggtgccactctctctggcatccacctgtctggggctagtctctggccctcactgctcacggccgggtgaccactctggcctgcgtactcctcactcagaaacaagaacagcgacagcccctctcgagcagatgacacgagctagtccacgttgacagcttaagacagtgctagctctgccctggctctcctagaaggtggaggacagacacaggagaaataaaaaaagatgatgctgcaggaatccttcttaaaaatattacatgttttattatcctgtccccagagggtggtttatccagaaaccaagaaaaaaaatcaatcagaataaactcaaaaaaaaaaggtagggggagcaaaaccatcaaccaccaggcagccaggccatcagcccacctccacctctggagggtccccagagacccacgcccgacgcagacccggaggagcatcagcaaggggcccgggcagagaatcggctatgtcttcattatgagagcag

SEQ ID NO: 283204 - DNA, 1210 bp, Homo sapiens
gcccagggctccacggtccctacctagaccccacgcgattcctcacctgagaccccgtcccacacagccccagctggggcaaacagccccctccccacttcccatctgtaatttgcagggagatcgacgacgtgatcagcgcagacctgcagtctctccagggcccctacctgcccctggagctggggttggagcagctgtttcaggagctggctggagaggaggaagaactcaatgcctctcagctccaggccttactaagcattgccctggagcctgccagggcccatacctccacccccagagagatcgggctcaggacctgtgagcagctgctgcagtgtttcggggccatattcaacaagttcgatgaggacacctctggaaccatgaactcctacgagctgaggctggcactgaatgcagcaggcttccacctgaacaaccagctgacccagaccctcaccagccgctaccgggatagccgtctgcgtgtggacttcgagcggttcgtgtcctgtgtggcccacctcacctgcatcttctgccactgcagccagcacctggatgggggtgagggggtcatctgcctgacccacagacagtggatggaggtggccaccttctcctaggatctccggatgggcgcacctgctgctcagggcagggttgctgagcaagaccacctccctaggccttgcctggcatgggtgccactctctctggcatccacctgtctggggctagtctctggccctcactgctcacggccgggtgaccactctggcctgcgtactcctcactcagaaacaagaacagcgacagcccctctcgagcagatgacacgagctagtccacgttgacagcttaagacagtgctagctctgccctggctctcctagaaggtggaggacagacacaggagaaataaaaaaagatgatgctgcaggaatccttcttaaaaatattacatgttttattatcctgtccccagagggtggtttatccagaaaccaagaaaaaaaatcaatcagaataaactcaaaaaaaaaaggtagggggagcaaaaccatcaaccaccaggcagccaggccatcagcccacctccacctctggagggtccccagagacccacgcccgacgcagacccggaggagcatcagcaaggggcccgggcagagaatcggctatgtcttcattatgagagcag

SEQ ID NO: 283205 - DNA, 937 bp, Homo sapiens
ctgtcttgcctgggaggccccattggcagccctcttcagggcatggagggcagccctgactcatccttcctgcccaggccatattcaacaagttcgatgaggacacctctggaaccatgaactcctacgagctgaggctggcactgaatgcagcaggcttccacctgaacaaccagctgacccagaccctcaccagccgctaccgggatagccgtctgcgtgtggacttcgagcggttcgtgtcctgtgtggcccacctcacctgcatcttctgccactgcagccagcacctggatgggggtgagggggtcatctgcctgacccacagacagtggatggaggtggccaccttctcctaggatctccggatgggcgcacctgctgctcagggcagggttgctgagcaagaccacctccctaggccttgcctggcatgggtgccactctctctggcatccacctgtctggggctagtctctggccctcactgctcacggccgggtgaccactctggcctgcgtactcctcactcagaaacaagaacagcgacagcccctctcgagcagatgacacgagctagtccacgttgacagcttaagacagtgctagctctgccctggctctcctagaaggtggaggacagacacaggagaaataaaaaaagatgatgctgcaggaatccttcttaaaaatattacatgttttattatcctgtccccagagggtggtttatccagaaaccaagaaaaaaaatcaatcagaataaactcaaaaaaaaaaggtagggggagcaaaaccatcaaccaccaggcagccaggccatcagcccacctccacctctggagggtccccagagacccacgcccgacgcagacccggaggagcatcagcaaggggcccgggcagagaatcggctatgtcttcattatgagagcag

SEQ ID NO: 283206 - DNA, 293 bp, Homo sapiens
ctgtcttgcctgggaggccccattggcagccctcttcagggcatggagggcagccctgactcatccttcctgcccaggccatattcaacaagttcgatgaggacacctctggaaccatgaactcctacgagctgaggctggcactgaatgcagcaggcttccacctgaacaaccagctgacccagaccctcaccagccgctaccgggatagccgtctgcgtgtggacttcgagcggttcgtgtcctgtgtggcccacctcacctgcatcttctgtgagtaccaccccggcatg

SEQ ID NO: 283207 - DNA, 1081 bp, Homo sapiens
gcccagggctccacggtccctacctagaccccacgcgattcctcacctgagaccccgtcccacacagccccagctggggcaaacagccccctccccacttcccatctgtaatttgcagggagatcgacgacgtgatcagcgcagacctgcagtctctccagggcccctacctgcccctggagctggggttggagcagctgtttcaggagctggctggagaggccatattcaacaagttcgatgaggacacctctggaaccatgaactcctacgagctgaggctggcactgaatgcagcaggcttccacctgaacaaccagctgacccagaccctcaccagccgctaccgggatagccgtctgcgtgtggacttcgagcggttcgtgtcctgtgtggcccacctcacctgcatcttctgccactgcagccagcacctggatgggggtgagggggtcatctgcctgacccacagacagtggatggaggtggccaccttctcctaggatctccggatgggcgcacctgctgctcagggcagggttgctgagcaagaccacctccctaggccttgcctggcatgggtgccactctctctggcatccacctgtctggggctagtctctggccctcactgctcacggccgggtgaccactctggcctgcgtactcctcactcagaaacaagaacagcgacagcccctctcgagcagatgacacgagctagtccacgttgacagcttaagacagtgctagctctgccctggctctcctagaaggtggaggacagacacaggagaaataaaaaaagatgatgctgcaggaatccttcttaaaaatattacatgttttattatcctgtccccagagggtggtttatccagaaaccaagaaaaaaaatcaatcagaataaactcaaaaaaaaaaggtagggggagcaaaaccatcaaccaccaggcagccaggccatcagcccacctccacctctggagggtccccagagacccacgcccgacgcagacccggaggagcatcagcaaggggcccgggcagagaatcggctatgtcttcattatgagagcag

SEQ ID NO: 283208 - DNA, 1144 bp, Homo sapiens
atatgggattgactatattttttgctgcacagaaatatcctccagtgcccactggcaaggagaaagccccacaggatttaaggagtaacagtacccacacatcgagtcacgtgtcagacgctgtcctgagcgttctgtcttcacacaccctatggggtcggggctgtcttagtccgtttgatggatgaggaaacaggcccagaggattgaagggatcagcctgtactcaccctgccgggatggggcagagttggggtgtgacaccctgtggcattcatgtcctccctgaggaggtggggtggggatgcaatgccaaggtgggttccctgtgggccactgggctcagaagcagcctccccctaggcttccacctgaacaaccagctgacccagaccctcaccagccgctaccgggatagccgtctgcgtgtggacttcgagcggttcgtgtcctgtgtggcccacctcacctgcatcttctgccactgcagccagcacctggatgggggtgagggggtcatctgcctgacccacagacagtggatggaggtggccaccttctcctaggatctccggatgggcgcacctgctgctcagggcagggttgctgagcaagaccacctccctaggccttgcctggcatgggtgccactctctctggcatccacctgtctggggctagtctctggccctcactgctcacggccgggtgaccactctggcctgcgtactcctcactcagaaacaagaacagcgacagcccctctcgagcagatgacacgagctagtccacgttgacagcttaagacagtgctagctctgccctggctctcctagaaggtggaggacagacacaggagaaataaaaaaagatgatgctgcaggaatccttcttaaaaatattacatgttttattatcctgtccccagagggtggtttatccagaaaccaagaaaaaaaatcaatcagaataaactcaaaaaaaaaaggtagggggagcaaaaccatcaaccaccaggcagccaggccatcagcccacctccacctctggagggtccccagagacccacgcccgacgcagacccggaggagcatcagcaaggggcccgggcagagaatcggctatgtcttcattatgagagcag

SEQ ID NO: 283209 - DNA, 395 bp, Homo sapiens
aaaggcatataaaaattcttgtgccctcctttctctctcatttgtcttctgttagattttgaagatgtaactgagtttctggaagaggtcattgaagccttgatattggatgaggaagttagaacatttccagaagtcatgattccagtgtttgatattttattgggccgaataaaagatctagagctctgtcagatccttttgtatgcatatctggatattcttctctatttcactaggcaaaaagatatggcaaaggtaggtctgaaagatgatatgtattcagttgagctagatgtgtaatacatgatgcttccctatcctgaagacactataatactacctataaaataagaaaaagatagcttggttgttgtatcaacttaactgttttg

SEQ ID NO: 283210 - DNA, 795 bp, Homo sapiens
ggagtgaagatgatagtacccctcaaactctacacttgagcaccaagtagagaaaaattagtgaaaaattagtactgtcatcttggagcctgtgtgtaggacctacctcataatttggcccagtgcaaagagaaatgcaaacccccttgttcaaaagtttgaagacagcaagagtggagcaatcagtcaaaatcaatggtggtggtggggacaaatgaacaagtcccactcccaagaagccagcctgcctgtgtgtgtgggagaaagaacctcatctcagaatcccaagacttgttgctagggtgcgtgatgctctaaaaggtccaagaagagcatagaggagctctctaaggagagcttcttgagcgaaagtgtgcatgttatggtgccatccctaactttagagatgatggtcataggatgagcagggccctcccctggccaggatgggatccgtcaggaagactgtttatatccttaggttgaggattattcatcccctttgacggatgagaaaactgagacttcaagaggttcaatgctgagagtcacactgctagtgaatggtggaatgcgagcccccctatccaagaatctctagaggcaagcattgcctggaggtgagtcatctgcttggatggctattgaagctctgaagaaagtggccacttctggggctggtgttaacacctttaaaggaacatggcagctgcaggtttgtgactgatggagaggcactgataacaccttcttatccaaaaccttctccctcatcaaactggcacttctgcctga

SEQ ID NO: 283211 - DNA, 2592 bp, Homo sapiens
gcgatcccttgctgcgggcccggagatcaaacgtggcccgcccccggcagggcacagcgcgctgggcaaccgcgatccggcgccggactggaggggtcgatgcgcggcgcgctggggcgcacaggggacggagcccgggtcttgctccccattggccgccacctcggcgggaggggccgcctccggctcgtggcacctggcgtctcccctccgcggggaaatcggcggctacccggcaccggcgcctggaggtaaaggtacccgggggtggggaaggcccctggccgcggcagagctccctgccaccggccctgtcctgcttgccgccccagcgcctgcgacgcttggatgcccccagctccggccgcgccaaccagaaactttgcccctcgaagtcccccgcctgcctgaccgcaccgtgaggcgccaagtcggccgcgcgccccccggggccccggaaccccgcgagtcattgcctggccgccccgtacccccgcccccgcggcgcccggtagccaggatgcgctacgcggacccctcggccaaccgggatttgttggggagccgaactttgctcttcatcttcatctgcgcctttgccttggtgaccttgctgcaacagatcctgtatggcaggaactacattaagaggtactttgaattttatgaggggccttttgaatataactccacaagatgcctggagctgaggcacgaaatattggaagtgaaggtgctgtccatggtgaagcagtcagagctgttcgacaggtggaagagcctccagatgtgcaaatgggcgatgaacatctctgaggccaaccagttcaagtctactctgtccaggtgctgcaacgcccctgcctttctcttcaccacccagaagaacactcccctggggacaaagctcaagtatgaggtggacaccagtggcatctaccacatcaaccaggagatcttccgcatgtttcccaaggacatgccctactaccggtcccagtttaagaagtgtgctgtagtgggcaacggaggcatcttgaagaacagccgctgcgggagggagatcaacagcgccgacttcgtcttccggtgcaacctgccccccatctcagagaagtacaccatggatgtgggggtgaagacggatgtggtcactgtgaaccccagcatcatcacagagaggttccacaagctggagaagtggcggcggccgttctatcgcgtgctgcaggtgtacgagaacgcgtcggtgctgctgcctgccttctacaacacgcgcaacaccgacgtgtccatccgcgtcaagtacgtgctggacgacttcgaatcgccgcaagctgtctactacttccatccgcagtacctggtcaacgtgtcgcgctactggctcagcctgggggtgcgcgccaagcgcatcagcaccggcctcattctggtcactgcggcgctggagctctgtgaggaggtgcacctctttggcttctgggccttccccatgaacccctcgggcctgtacatcactcaccactactatgacaacgtcaagccgcgtcccggcggccacgccatgccctctgagatcttcaacttcctgcacttgcacagccgaggcatcctccgcgtgcacacgggcacctgcagctgctgctgatggctgccagccaggctgcccggcaagcggcaccccctctcctgctgtccctcctggtggaactgggagccccgaaccccccgaaccgggcagcgtggggtcctggcgttcaggctgtctctccctccattgttcagctctgtacttggatcctggggtagggaggcagggttaggaaccggggcagagtcagctctgtgctgagcctcctggcctggcccccaccggtgcatccgcccagtgcgtccacctgccctggctagcatgctgctgggccacaccccaagatcaggggccctggggacggcaagtgaataaagcacatttccacccaattttgtcatccgagagagagcacaaactgcaggcccttgttgcagctgaaggaagaccctacagagaatggaattgagagtggagacaggacacttcacaggacacttgagcacagtcaagattttattcacacttttggttcctgtgttttatatcgaagacttagctatgaattgctatctaaatctcagagcttagaagccaacccagtgactagaccttccagtgaagaaagtgatctcaagaggtccagggacttaacagccaagccacaccacccgacaggttcttctgtgacaccgagagatctaacccaaggcctgggttatgtcttagtcgagacatcatcatctgagaagcaccacatcctttcagacacatcctcggacacacatgcggtcttggtgcccccaggttcaatcctgcgttagctcttttgatgagaaggaaataaaccaaaccagccacttgcactatggcttccaagccaatgttattgactcaataagtgcttagcaattggcttcctcttttgtcttcctattttcagctccatttaaaccaggagttatttataaagacctcttcctctcatgtaaaagaaa

SEQ ID NO: 283212 - DNA, 2110 bp, Homo sapiens
ggagtgaagatgatagtacccctcaaactctacacttgagcaccaagtagagaaaaattagtgaaaaattagtactgtcatcttggagcctgtgtgtaggacctacctcataatttggcccagtgcaaagagaaatgcaaacccccttgttcaaaagtttgaagacagcaagagtggagcaatcagtcaaaatcaatggtggtggtggggacaaatgaacaagtcccactcccaagaagccagcctgcctgtgtgtgtgggagaaagaacctcatctcagaatcccaagacttgttgctaggtactttgaattttatgaggggccttttgaatataactccacaagatgcctggagctgaggcacgaaatattggaagtgaaggtgctgtccatggtgaagcagtcagagctgttcgacaggtggaagagcctccagatgtgcaaatgggcgatgaacatctctgaggccaaccagttcaagtctactctgtccaggtgctgcaacgcccctgcctttctcttcaccacccagaagaacactcccctggggacaaagctcaagtatgaggtggacaccagtggcatctaccacatcaaccaggagatcttccgcatgtttcccaaggacatgccctactaccggtcccagtttaagaagtgtgctgtagtgggcaacggaggcatcttgaagaacagccgctgcgggagggagatcaacagcgccgacttcgtcttccggtgcaacctgccccccatctcagagaagtacaccatggatgtgggggtgaagacggatgtggtcactgtgaaccccagcatcatcacagagaggttccacaagctggagaagtggcggcggccgttctatcgcgtgctgcaggtgtacgagaacgcgtcggtgctgctgcctgccttctacaacacgcgcaacaccgacgtgtccatccgcgtcaagtacgtgctggacgacttcgaatcgccgcaagctgtctactacttccatccgcagtacctggtcaacgtgtcgcgctactggctcagcctgggggtgcgcgccaagcgcatcagcaccggcctcattctggtcactgcggcgctggagctctgtgaggaggtgcacctctttggcttctgggccttccccatgaacccctcgggcctgtacatcactcaccactactatgacaacgtcaagccgcgtcccggcggccacgccatgccctctgagatcttcaacttcctgcacttgcacagccgaggcatcctccgcgtgcacacgggcacctgcagctgctgctgatggctgccagccaggctgcccggcaagcggcaccccctctcctgctgtccctcctggtggaactgggagccccgaaccccccgaaccgggcagcgtggggtcctggcgttcaggctgtctctccctccattgttcagctctgtacttggatcctggggtagggaggcagggttaggaaccggggcagagtcagctctgtgctgagcctcctggcctggcccccaccggtgcatccgcccagtgcgtccacctgccctggctagcatgctgctgggccacaccccaagatcaggggccctggggacggcaagtgaataaagcacatttccacccaattttgtcatccgagagagagcacaaactgcaggcccttgttgcagctgaaggaagaccctacagagaatggaattgagagtggagacaggacacttcacaggacacttgagcacagtcaagattttattcacacttttggttcctgtgttttatatcgaagacttagctatgaattgctatctaaatctcagagcttagaagccaacccagtgactagaccttccagtgaagaaagtgatctcaagaggtccagggacttaacagccaagccacaccacccgacaggttcttctgtgacaccgagagatctaacccaaggcctgggttatgtcttagtcgagacatcatcatctgagaagcaccacatcctttcagacacatcctcggacacacatgcggtcttggtgcccccaggttcaatcctgcgttagctcttttgatgagaaggaaataaaccaaaccagccacttgca

SEQ ID NO: 283213 - DNA, 2460 bp, Homo sapiens
gcgatcccttgctgcgggcccggagatcaaacgtggcccgcccccggcagggcacagcgcgctgggcaaccgcgatccggcgccggactggaggggtcgatgcgcggcgcgctggggcgcacaggggacggagcccgggtcttgctccccattggccgccacctcggcgggaggggccgcctccggctcgtggcacctggcgtctcccctccgcggggaaatcggcggctacccggcaccggcgcctggaggtaaaggtacccgggggtggggaaggcccctggccgcggcagagctccctgccaccggccctgtcctgcttgccgccccagcgcctgcgacgcttggatgcccccagctccggccgcgccaaccagaaactttgcccctcgaagtcccccgcctgcctgaccgcaccgtgaggcgccaagtcggccgcgcgccccccggggccccggaaccccgcgagtcattgcctggccgccccgtacccccgcccccgcggcgcccggtagccaggatgcgctacgcggacccctcggccaaccgggatttgttggggagccgaactttgctcttcatcttcatctgcgcctttgccttggtgaccttgctgcaacagatcctgtatggcaggaactacattaagaggtactttgaattttatgaggggccttttgaatataactccacaagatgcctggagctgaggcacgaaatattggaagtgaaggtgctgtccatggtgaagcagtcagagctgttcgacaggtggaagagcctccagatgtgcaaatgggcgatgaacatctctgaggccaaccagttcaagtctactctgtccaggtgctgcaacgcccctgcctttctcttcaccacccagaagaacactcccctggggacaaagctcaagtatgaggtggacaccagtggcatctaccacatcaaccaggagatcttccgcatgtttcccaaggacatgccctactaccggtcccagtttaagaagtgtgctgtagtgggcaacggaggcatcttgaagaacagccgctgcgggagggagatcaacagcgccgacttcgtcttccggtgcaacctgccccccatctcagagaagtacaccatggatgtgggggtgaagacggatgtggtcactgtgaaccccagcatcatcacagagaggttccacaagctggagaagtggcggcggccgttctatcgcgtgctgcaggtgtacgagaacgcgtcggtgctgctgcctgccttctacaacacgcgcaacaccgacgtgtccatccgcgtcaagtacgtgctggacgacttcgaatcgccgcaagctgtctactacttccatccgcagtacctggtcaacgtgtcgcgctactggctcagcctgggggtgcgcgccaagcgcatcagcaccggcctcattctggtcactgcggcgctggagctctgtgaggaggtgcacctctttggcttctgggccttccccatgaacccctcgggcctgtacatcactcaccactactatgacaacgtcaagccgcgtcccggcggccacgccatgccctctgagatcttcaacttcctgcacttgcacagccgaggcatcctccgcgtgcacacgggcacctgcagctgctgctgatggctgccagccaggctgcccggcaagcggcaccccctctcctgctgtccctcctggtggaactgggagccccgaaccccccgaaccgggcagcgtggggtcctggcgttcaggctgtctctccctccattgttcagctctgtacttggatcctggggtagggaggcagggttaggaaccggggcagagtcagctctgtgctgagcctcctggcctggcccccaccggtgcatccgcccagtgcgtccacctgccctggctagcatgctgctgggccacaccccaagatcaggggccctggggacggcaagtgaataaagcacatttccacccaattttgtcatccgagagagagcacaaactgcaggcccttgttgcagctgaaggaagaccctacagagaatggaattgagagtggagacaggacacttcacaggacacttgagcacagtcaagattttattcacacttttggttcctgtgttttatatcgaagacttagctatgaattgctatctaaatctcagagcttagaagccaacccagtgactagaccttccagtgaagaaagtgatctcaagaggtccagggacttaacagccaagccacaccacccgacaggttcttctgtgacaccgagagatctaacccaaggcctgggttatgtcttagtcgagacatcatcatctgagaagcaccacatcctttcagacacatcctcggacacacatgcggtcttggtgcccccaggttcaatcctgcgttagctcttttgatgagaaggaaataaaccaaaccagccacttgca

SEQ ID NO: 283214 - DNA, 2047 bp, Homo sapiens
  misc_feature (1754)..(1754): n is a, c, g, or t
agcggagagcgccgatggctggggacccgaggtccgcgccacccacccgcaacctccttccccgagcctttgggaacgggttgttggccagacaagtcccagaaactgcctgctttgaagcatgaataagtgcgaaaagactcttagcaatgaattttcaaaatgaattatacagagtccagcccattgagagaatcaactgccataggttttacacctgagttagaaagtatcatacctgtgccttccaataagaccacttgtgaaaactggagagagatacatcatctggtttttcatgtagcaaatatttgttttgcagttgggttggttattccaactactcttcaccttcatatgatatttcttaggggaatgttaactctaggatgtaccctttatatcgtctgggccactctctaccgatgtgccttggatataatgatctggaactctgtgttcttgggtgtcaacattttgcatctgtcgtatcttttatacaagaagagaccggtaaagattgaaaaggaactcagtggcatgtaccggcgattgtttgaaccactccgtgtgcctccagatttgttcagaagactaactggacagttttgcatgatccaaaccttgaaaaagggccaaacttatgctgcagaggataaaacctcagttgatgaccgtctgagtattctcttgaagggaaaaatgaaggtctcctatcgaggacattttctgcataacatttacccctgtgcctttatagattctcctgaatttagatcaactcagatgcacaaaggtgaaaaattccaggtcaccattattgcagatgataactgcagatttttatgctggtcaagagaaagattaacatactttctggaatcagaacctttcttgtatgaaatctttaggtatcttattggaaaagacatcacaaataagctctactcattgaatgatcccaccttaaatgataaaaaagccaaaaagctggaacatcagctcagcctctgcacacagatctccatgttggaaatgaggaacagtatagccagctccagtgacagtgacgacggcttgcaccagtttcttcggggtacctccagcatgtcctctcttcatgtgtcatccccacaccagcgagcctctgccaagatgaaaccgatagaagaaggagcagaagatgatgatgacgtttttgaaccggcatctccaaatacattgaaagtccatcagctgccttgatcagagagagaattcaggttaccaagacggaaggtgtcttgaagagatcctgaaaaataccagcactttttcatggcttttaggttattctgctttagtgcatccagactggtagagtcggagggaggaagtgaggaagggtcaaggatggaagagttctttcacttaccctttttattagtcagcttttaaagtaattgttttactgagccttctgactatgccttgttctcttttgagatatatattttcacagtcttttctagatatattattgttttaacttaacaaatcttagcaatctctcaatgccttttcacttatttttttccaagttatgattctttttcctcacagtcttttttgttccatagcaatgaggttgtccatttgataattttaacaaacaatgtaagtttaaaattgaggctaaggtaacatgaaaaagcagggaatctcaaactttattccatatatacacacacacacacacacacacacacacacanacatacagaggctgtttccatagggacagagcaccgcagtgtgagagaggattgggctgggactgagaagggcgttcctgctgtggtgaggcagccctcagggtctctcctggcacacagctgccagcgtgatgggggatcccttcagaatagcagcaaaacccacgatactgaggagtaactcaaaccaaacttgtgggtctcacagagaggatatcgtcttgcccatgtaaagattccttttagatggtttctggtgtttactaatgttgttaataggtgtatttttcgga

SEQ ID NO: 283215 - DNA, 2106 bp, Homo sapiens
  misc_feature (1813)..(1813): n is a, c, g, or t
cgccgtcgcgatgcctattttagtcaaagcggctgcgggcttggggacccggcccgggcagcggagcttccggacccgccgacccgccgaggagcgcgcgtcgggctcccgtcgagcagctgagcccgtgtgccccgcgtcccgcgccccgaagctgccgctccgaactttggtcggcgctgcccaggctccccgccagggaccagccgggaattttcaaaatgaattatacagagtccagcccattgagagaatcaactgccataggttttacacctgagttagaaagtatcatacctgtgccttccaataagaccacttgtgaaaactggagagagatacatcatctggtttttcatgtagcaaatatttgttttgcagttgggttggttattccaactactcttcaccttcatatgatatttcttaggggaatgttaactctaggatgtaccctttatatcgtctgggccactctctaccgatgtgccttggatataatgatctggaactctgtgttcttgggtgtcaacattttgcatctgtcgtatcttttatacaagaagagaccggtaaagattgaaaaggaactcagtggcatgtaccggcgattgtttgaaccactccgtgtgcctccagatttgttcagaagactaactggacagttttgcatgatccaaaccttgaaaaagggccaaacttatgctgcagaggataaaacctcagttgatgaccgtctgagtattctcttgaagggaaaaatgaaggtctcctatcgaggacattttctgcataacatttacccctgtgcctttatagattctcctgaatttagatcaactcagatgcacaaaggtgaaaaattccaggtcaccattattgcagatgataactgcagatttttatgctggtcaagagaaagattaacatactttctggaatcagaacctttcttgtatgaaatctttaggtatcttattggaaaagacatcacaaataagctctactcattgaatgatcccaccttaaatgataaaaaagccaaaaagctggaacatcagctcagcctctgcacacagatctccatgttggaaatgaggaacagtatagccagctccagtgacagtgacgacggcttgcaccagtttcttcggggtacctccagcatgtcctctcttcatgtgtcatccccacaccagcgagcctctgccaagatgaaaccgatagaagaaggagcagaagatgatgatgacgtttttgaaccggcatctccaaatacattgaaagtccatcagctgccttgatcagagagagaattcaggttaccaagacggaaggtgtcttgaagagatcctgaaaaataccagcactttttcatggcttttaggttattctgctttagtgcatccagactggtagagtcggagggaggaagtgaggaagggtcaaggatggaagagttctttcacttaccctttttattagtcagcttttaaagtaattgttttactgagccttctgactatgccttgttctcttttgagatatatattttcacagtcttttctagatatattattgttttaacttaacaaatcttagcaatctctcaatgccttttcacttatttttttccaagttatgattctttttcctcacagtcttttttgttccatagcaatgaggttgtccatttgataattttaacaaacaatgtaagtttaaaattgaggctaaggtaacatgaaaaagcagggaatctcaaactttattccatatatacacacacacacacacacacacacacacacanacatacagaggctgtttccatagggacagagcaccgcagtgtgagagaggattgggctgggactgagaagggcgttcctgctgtggtgaggcagccctcagggtctctcctggcacacagctgccagcgtgatgggggatcccttcagaatagcagcaaaacccacgatactgaggagtaactcaaaccaaacttgtgggtctcacagagaggatatcgtcttgcccatgtaaagattccttttagatggtttctggtgtttactaatgttgttaataggtgtatttttcgga

SEQ ID NO: 283216 - DNA, 1686 bp, Homo sapiens
  misc_feature (4)..(4): n is a, c, g, or t
  misc_feature (6)..(6): n is a, c, g, or t
  misc_feature (18)..(18): n is a, c, g, or t
  misc_feature (20)..(22): n is a, c, g, or t
aagntngcggccgccgcncnnntcaggcagccccagcgtccccgggccctcggccccaccgagtgccggctcccgcgctctgcggcggcaagccccttggaattttcaaaatgaattatacagagtccagcccattgagagaatcaactgccataggttttacacctgagttagaaagtatcatacctgtgccttccaataagaccacttgtgaaaactggagagagatacatcatctggtttttcatgtagcaaatatttgttttgcagttgggttggttattccaactactcttcaccttcatatgatatttcttaggggaatgttaactctaggatgtaccctttatatcgtctgggccactctctaccgatgtgccttggatataatgatctggaactctgtgttcttgggtgtcaacattttgcatctgtcgtatcttttatacaagaagagaccggtaaagattgaaaaggaactcagtggcatgtaccggcgattgtttgaaccactccgtgtgcctccagatttgttcagaagactaactggacagttttgcatgatccaaaccttgaaaaagggccaaacttatgctgcagaggataaaacctcagttgatgaccgtctgagtattctcttgaagggaaaaatgaaggtctcctatcgaggacattttctgcataacatttacccctgtgcctttatagattctcctgaatttagatcaactcagatgcacaaaggtgaaaaattccaggtcaccattattgcagatgataactgcagatttttatgctggtcaagagaaagattaacatactttctggaatcagaacctttcttgtatgaaatctttaggtatcttattggaaaagacatcacaaataagctctactcattgaatgatcccaccttaaatgataaaaaagccaaaaagctggaacatcagctcagcctctgcacacagatctccatgttggaaatgaggaacagtatagccagctccagtgacagtgacgacggcttgcaccagtttcttcggggtacctccagcatgtcctctcttcatgtgtcatccccacaccagcgagcctctgccaagatgaaaccgatagaagaaggagcagaagatgatgatgacgtttttgaaccggcatctccaaatacattgaaagtccatcagctgccttgatcagagagagaattcaggttaccaagacggaaggtgtcttgaagagatcctgaaaaataccagcactttttcatggcttttaggttattctgctttagtgcatccagactggtagagtcggagggaggaagtgaggaagggtcaaggatggaagagttctttcacttaccctttttattagtcagcttttaaagtaattgttttactgagccttctgactatgccttgttctcttttgagatatatattttcacagtcttttctagatatattattgttttaacttaacaaatcttagcaatctctcaatgccttttcacttatttttttccaagttatgattctttttcctcacagtcttttttgttccatagcaatgaggttgtccatttgataattttaacaaacaatgtaagtttaaaattgaggctaaggtaacatgaaaaagcagggaatctcaaactttatcctcgtgccgcctcgtgccgaattc

SEQ ID NO: 283217 - DNA, 1995 bp, Homo sapiens
  misc_feature (4)..(4): n is a, c, g, or t
  misc_feature (6)..(6): n is a, c, g, or t
  misc_feature (18)..(18): n is a, c, g, or t
  misc_feature (20)..(22): n is a, c, g, or t
  misc_feature (1702)..(1702): n is a, c, g, or t
aagntngcggccgccgcncnnntcaggcagccccagcgtccccgggccctcggccccaccgagtgccggctcccgcgctctgcggcggcaagccccttggaattttcaaaatgaattatacagagtccagcccattgagagaatcaactgccataggttttacacctgagttagaaagtatcatacctgtgccttccaataagaccacttgtgaaaactggagagagatacatcatctggtttttcatgtagcaaatatttgttttgcagttgggttggttattccaactactcttcaccttcatatgatatttcttaggggaatgttaactctaggatgtaccctttatatcgtctgggccactctctaccgatgtgccttggatataatgatctggaactctgtgttcttgggtgtcaacattttgcatctgtcgtatcttttatacaagaagagaccggtaaagattgaaaaggaactcagtggcatgtaccggcgattgtttgaaccactccgtgtgcctccagatttgttcagaagactaactggacagttttgcatgatccaaaccttgaaaaagggccaaacttatgctgcagaggataaaacctcagttgatgaccgtctgagtattctcttgaagggaaaaatgaaggtctcctatcgaggacattttctgcataacatttacccctgtgcctttatagattctcctgaatttagatcaactcagatgcacaaaggtgaaaaattccaggtcaccattattgcagatgataactgcagatttttatgctggtcaagagaaagattaacatactttctggaatcagaacctttcttgtatgaaatctttaggtatcttattggaaaagacatcacaaataagctctactcattgaatgatcccaccttaaatgataaaaaagccaaaaagctggaacatcagctcagcctctgcacacagatctccatgttggaaatgaggaacagtatagccagctccagtgacagtgacgacggcttgcaccagtttcttcggggtacctccagcatgtcctctcttcatgtgtcatccccacaccagcgagcctctgccaagatgaaaccgatagaagaaggagcagaagatgatgatgacgtttttgaaccggcatctccaaatacattgaaagtccatcagctgccttgatcagagagagaattcaggttaccaagacggaaggtgtcttgaagagatcctgaaaaataccagcactttttcatggcttttaggttattctgctttagtgcatccagactggtagagtcggagggaggaagtgaggaagggtcaaggatggaagagttctttcacttaccctttttattagtcagcttttaaagtaattgttttactgagccttctgactatgccttgttctcttttgagatatatattttcacagtcttttctagatatattattgttttaacttaacaaatcttagcaatctctcaatgccttttcacttatttttttccaagttatgattctttttcctcacagtcttttttgttccatagcaatgaggttgtccatttgataattttaacaaacaatgtaagtttaaaattgaggctaaggtaacatgaaaaagcagggaatctcaaactttattccatatatacacacacacacacacacacacacacacacanacatacagaggctgtttccatagggacagagcaccgcagtgtgagagaggattgggctgggactgagaagggcgttcctgctgtggtgaggcagccctcagggtctctcctggcacacagctgccagcgtgatgggggatcccttcagaatagcagcaaaacccacgatactgaggagtaactcaaaccaaacttgtgggtctcacagagaggatatcgtcttgcccatgtaaagattccttttagatggtttctggtgtttactaatgttgttaataggtgtatttttcgga

SEQ ID NO: 283218 - DNA, 940 bp, Homo sapiens
cccaagaccacgagggtgttctgtccattgtgaaggccctggactatgagagctgtgaacactacgaactcaaagtgtcggtgcagaatgaggccccgctgcaggcggctgcccttagggctgagcggggccaggccaaggtccgcgtgcatgtgcaggacaccaacgagccccccgtgttccaggagaacccacttcggaccagcctagcagagggggcacccccaggcactctggtggccaccttctctgcccgggaccctgacacagagcagctgcagaggctcagctactccaaggactacgacccggaagactggctgcaagtggacgcagccactggccggatccagacccagcacgtgctcagcccggcgtcccccttcctcaagggcggctggtacagagccatcgtcctggcccaggatgacgcctcccagccccgcaccgccaccggcaccctgtccatcgagatcctggaggtgaacgaccatgcacctgtgctggccccgccgccgccgggcagcctgtgcagcgagccacaccaaggcccaggcctcctcctgggcgccacggatgaggacctgcccccccacggggcccccttccacttccagctgagccccaggctcccagagctcggccggaactggagcctcagccaggtcaacgtgagccacgcgcgcctgcggccgcgacaccaggtccccgaaggcctgcaccgcctcagcctgctgctccgggactcggggcagccgccccagcagcgcgagcagcctctgaacgtgaccgtgcgtgggagaagggttgctgcgggccaggctgtgggggggaagcccaccgggccgggcttggggcaagccccgtggtggtggcgcctggcccgcggtgaaatcggagggtgggccagataaatccacaaagggggggggaggaacag

SEQ ID NO: 283219 - DNA, 1106 bp, Homo sapiens
  misc_feature (1090)..(1090): n is a, c, g, or t
  misc_feature (1093)..(1093): n is a, c, g, or t
ggctcaaagtccaggccttcacaatggacagaacaccctcgttggtcttggggtccgtgcggaatgaggccccgctgcaggcggctgcccttagggctgagcggggccaggccaaggtccgcgtgcatgtgcaggacaccaacgagccccccgtgttccaggagaacccacttcggaccagcctagcagagggggcacccccaggcactctggtggccaccttctctgcccgggaccctgacacagagcagctgcagaggctcagctactccaaggactacgacccggaagactggctgcaagtggacgcagccactggccggatccagacccagcacgtgctcagcccggcgtcccccttcctcaagggcggctggtacagagccatcgtcctggcccaggatgacgcctcccagccccgcaccgccaccggcaccctgtccatcgagatcctggaggtgaacgaccatgcacctgtgctggccccgccgccgccgggcagcctgtgcagcgagccacaccaaggcccaggcctcctcctgggcgccacggatgaggacctgcccccccacggggcccccttccacttccagctgagccccaggctcccagagctcggccggaactggagcctcagccaggtcaacgtgagccacgcgcgcctgcggccgcgacaccaggtccccgaaggcctgcaccgcctcagcctgctgctccgggactcggggcagccgccccagcagcgcgagcagcctctgaacgtgaccgtgtgccgctgcggcaaggacggcgtctgcctgccgggggccgcagcgctgctggcggggggcacaggcctcagcctgggcgcactggtcatcgtgctggccagcgccctcctgctgctggtgctggtcctgctcgtggcactccgggcgcggttctggaagcagtctcggggcaaggggctgctgcacggcccccaggacgaccttcgagacaatgtcctcaactacgatgagcaaggaggcggggagggaggaccaggacgccttacgacatcagccagttgcgtcacccgaaaggctgagcctgcctctgggaccgccgncantttcgagaacttg

SEQ ID NO: 283220 - DNA, 1130 bp, Homo sapiens
  misc_feature (1114)..(1114): n is a, c, g, or t
  misc_feature (1117)..(1117): n is a, c, g, or t
cccaagaccacgagggtgttctgtccattgtgaaggccctggactatgagagctgtgaacactacgaactcaaagtgtcggtgcagaatgaggccccgctgcaggcggctgcccttagggctgagcggggccaggccaaggtccgcgtgcatgtgcaggacaccaacgagccccccgtgttccaggagaacccacttcggaccagcctagcagagggggcacccccaggcactctggtggccaccttctctgcccgggaccctgacacagagcagctgcagaggctcagctactccaaggactacgacccggaagactggctgcaagtggacgcagccactggccggatccagacccagcacgtgctcagcccggcgtcccccttcctcaagggcggctggtacagagccatcgtcctggcccaggatgacgcctcccagccccgcaccgccaccggcaccctgtccatcgagatcctggaggtgaacgaccatgcacctgtgctggccccgccgccgccgggcagcctgtgcagcgagccacaccaaggcccaggcctcctcctgggcgccacggatgaggacctgcccccccacggggcccccttccacttccagctgagccccaggctcccagagctcggccggaactggagcctcagccaggtcaacgtgagccacgcgcgcctgcggccgcgacaccaggtccccgaaggcctgcaccgcctcagcctgctgctccgggactcggggcagccgccccagcagcgcgagcagcctctgaacgtgaccgtgtgccgctgcggcaaggacggcgtctgcctgccgggggccgcagcgctgctggcggggggcacaggcctcagcctgggcgcactggtcatcgtgctggccagcgccctcctgctgctggtgctggtcctgctcgtggcactccgggcgcggttctggaagcagtctcggggcaaggggctgctgcacggcccccaggacgaccttcgagacaatgtcctcaactacgatgagcaaggaggcggggagggaggaccaggacgccttacgacatcagccagttgcgtcacccgaaaggctgagcctgcctctgggaccgccgncantttcgagaacttg

SEQ ID NO: 283221 - DNA, 779 bp, Homo sapiens
ttactgattctatagccattttataagccttggtgattgctccttagacctttcatggttggaaaaacagtgttattagggtaaaccagagttgtgctaaacagcagctgccatcatggtacacacagagacaaaggttatgaagccttacccttgaatacaaacttcctcctttgttgtgttcaaaccagcatgattacaaagtttaagtattgtcttcatattatgagtctatttcaatggaaaaattaacagaatggttttctttttcagctaaacagaaagaatttactgacaatgtgagcagtgcttttgaacaaggtactttcttttcttcactttcttaaatatggaaagaaatttcaagcactgaagcatagccattcattcaataactagctattatataccttcctatgatagctatatagggagatatgaaatacttatgagtctacatttctgtctttaaaaaaatgcctttaagaatctacatttctggcccaggcacggtggctaatgcctgtaatcccaacactgggaggctaaggcgggcggatcacgaagtcaggagattgagaccatcctggctaacatggtgaaactctgtctctactaaaaatacaaaattaactgggtgtggtggcacaacgcctgtagtcccagctacttgggaggctgaggcaggagaatcgcttgaaccagggaggcggaagttggagtgagctgagatcggccactgcacgccagcctgagtgacagagcgagactccatctca

SEQ ID NO: 283222 - DNA, 1129 bp, Homo sapiens
  misc_feature (1)..(2): n is a, c, g, or t
  misc_feature (5)..(6): n is a, c, g, or t
nncannagtctggttagacgctctctttgcttttccccacgagtgaccacggctagataggccgccggccagatgtggcgggggagagccggggctttgctccgggtgtgggggttttggccgacaggggttcccagaaggagaccgctaagctgcgatgctgcgtcgcaggcgggaagcaattatccccgctgttggaactgcggcggcccatggggccccgggcgggaggacaggttcttctgcccacagtgccgagcgctgcaggcacctgaccccactcgagactacttcagccttatggactgcaaccgttccttcagagttgatacagcgaagctccagcacaggtaccagcaactgcagcgtcttgtccacccagatttcttcagccagaggtctcagactgaaaaggacttctcagagaagcattcgaccctggtgaatgatgcctataagaccctcctggcccccctgagcagaggactgtaccttctaaagctccatggaatagagattcctgaaaggacagattatgaaatggacaggcaattcctcatagaaataatggaaatcaatgaaaaactcgcagaagctgaaagtgaagctgccatgaaagagattgaatccattgtcaaagctaaacagaaagaatttactgacaatgtgagcagtgcttttgaacaagatgactttgaagaagccaaggaaattttgacaaagatgagatacttttcaaatatagaagaaaagatcaagttaaagaagattcccctttaattgtggatagtttaaagtttaaaaaataaagttcttgctgggcacagtggctcacacctgtaatcccagcactttgggaggctgaggtgggtggatgacaaggtcaggagttcaagaccagcttggccaacatagtgaaaccccgtctctgctgaaaatacaaaaattagccgggcatggtggcgcgtgcctgtaatcccagctacttggtaggccgaggcaggagaatcgcttaaacccgtgaggtggaggttgcagtgagcagagatcacgcaactgcactccagcttgggcaacagagtgagacttaatcttgaaaaataaataaatgaaaaataaaattcttgta

SEQ ID NO: 283223 - DNA, 870 bp, Homo sapiens
ggtacttgaggggcagggcctgggagactggaagacttgaatgaataggcaaccgttccttcagagttgatacagcgaagctccagcacaggtaccagcaactgcagcgtcttgtccacccagatttcttcagccagaggtctcagactgaaaaggacttctcagagaagcattcgaccctggtgaatgatgcctataagaccctcctggcccccctgagcagaggactgtaccttctaaagctccatggaatagagattcctgaaaggacagattatgaaatggacaggcaattcctcatagaaataatggaaatcaatgaaaaactcgcagaagctgaaagtgaagctgccatgaaagagattgaatccattgtcaaagctaaacagaaagaatttactgacaatgtgagcagtgcttttgaacaagatgactttgaagaagccaaggaaattttgacaaagatgagatacttttcaaatatagaagaaaagatcaagttaaagaagattcccctttaattgtggatagtttaaagtttaaaaaataaagttcttgctgggcacagtggctcacacctgtaatcccagcactttgggaggctgaggtgggtggatgacaaggtcaggagttcaagaccagcttggccaacatagtgaaaccccgtctctgctgaaaatacaaaaattagccgggcatggtggcgcgtgcctgtaatcccagctacttggtaggccgaggcaggagaatcgcttaaacccgtgaggtggaggttgcagtgagcagagatcacgcaactgcactccagcttgggcaacagagtgagacttaatcttgaaaaataaataaatgaaaaataaaattcttgta

SEQ ID NO: 283224 - DNA, 984 bp, Homo sapiens
  misc_feature (1)..(2): n is a, c, g, or t
  misc_feature (5)..(6): n is a, c, g, or t
nncannagtctggttagacgctctctttgcttttccccacgagtgaccacggctagataggccgccggccagatgtggcgggggagagccggggctttgctccgggtgtgggggttttggccgacaggggttcccagaaggagaccgctaagctgcgatgctgcgtcgcaggcgggaagcaattatccccgctgttggaactgcggcggcccatggggccccgggcgggaggacaggttcttctgcccacagtgccgagcgctgcaggcacctgaccccactcgagactacttcagccttatggactgcaaccgttccttcagagttgatacagcgaagctccagcacaggtaccagcaactgcagcgtcttgtccacccagatttcttcagccagaggtctcagactgaaaaggacttctcagagaagcattcgaccctggtgaatgatgcctataagaccctcctggcccccctgagcagaggactgtaccttctaaacagaaagaatttactgacaatgtgagcagtgcttttgaacaagatgactttgaagaagccaaggaaattttgacaaagatgagatacttttcaaatatagaagaaaagatcaagttaaagaagattcccctttaattgtggatagtttaaagtttaaaaaataaagttcttgctgggcacagtggctcacacctgtaatcccagcactttgggaggctgaggtgggtggatgacaaggtcaggagttcaagaccagcttggccaacatagtgaaaccccgtctctgctgaaaatacaaaaattagccgggcatggtggcgcgtgcctgtaatcccagctacttggtaggccgaggcaggagaatcgcttaaacccgtgaggtggaggttgcagtgagcagagatcacgcaactgcactccagcttgggcaacagagtgagacttaatcttgaaaaataaataaatgaaaaataaaattcttgta

SEQ ID NO: 283225 - DNA, 876 bp, Homo sapiens
  misc_feature (1)..(2): n is a, c, g, or t
  misc_feature (5)..(6): n is a, c, g, or t
nncannagtctggttagacgctctctttgcttttccccacgagtgaccacggctagataggccgccggccagatgtggcgggggagagccggggctttgctccgggtgtgggggttttggccgacaggggttcccagaaggagaccgctaagctgcgatgctgcgtcgcaggcgggaagcaattatccccgctgttggaactgcggcggcccatggggccccgggcgggaggacaggttcttctgcccacagtgccgagcgctgcaggcacctgaccccactcgagactacttcagccttatggactgcaaccgttccttcagagttgatacagcgaagctccagcacaggtaccagcaactgcagcgtcttgtccacccagatttcttcagccagaggtctcagactgaaaaggacttctcagagaagcattcgaccctggtgaatgatgcctataagaccctcctggcccccctgagcagaggactgtaccttctaaagctccatggaatagagattcctgaaaggacagattatgaaatggacaggcaattcctcatagaaataatggaaatcaatgaaaaactcgcagaagctgaaagtgaagctgccatgaaagagattgaatccattgtcaaagctaaacagaaagaatttactgacaatgtgagcagtgcttttgaacaagatgactttgaagaagccaaggaaattttgacaaagatgagatacttttcaaatatagaagaaaagatcaagttaaagaagattcccctttaattgtggatagtttaaagtttaaaaaataaagttcttgcttgagccaaccatgcccggctggcagttgtatttctaaaggcccttctgatgattcca

SEQ ID NO: 283226 - DNA, 341 bp, Homo sapiens
ctcaacgtcaaaacaaaaacaaaaacaaaaaaactttgtgatttggatggtaatagtactatcttcatctccactaacagactgaaaaggacttctcagagaagcattcgaccctggtgaatgatgcctataagaccctcctggcccccctgagcagaggactgtaccttgtaaggtgatttcccaacacttctgtgtatgacgtcctgatgcccattatggcgtaggacagccacgtcccctttattcagcagaagagtgcttgaggtcaggcatggtggctcacacctgtaatcccagaactttcagaggctgaggtggtcagatcacttcagcccagg

SEQ ID NO: 283227 - DNA, 1074 bp, Homo sapiens
  misc_feature (1)..(2): n is a, c, g, or t
  misc_feature (5)..(6): n is a, c, g, or t
nncannagtctggttagacgctctctttgcttttccccacgagtgaccacggctagataggccgccggccagatgtggcgggggagagccggggctttgctccgggtgtgggggttttggccgacaggggttcccagaaggagaccgctaagctgcgatgctgcgtcgcaggcgggaagcaattatccccgctgttggaactgcggcggcccatggggccccgggcgggaggacaggttcttctgcccacagtgccgagcgctgcaggcacctgaccccactcgagactacttcagccttatggactgcaaccgttccttcagagttgatacagcgaagctccagcacagactgaaaaggacttctcagagaagcattcgaccctggtgaatgatgcctataagaccctcctggcccccctgagcagaggactgtaccttctaaagctccatggaatagagattcctgaaaggacagattatgaaatggacaggcaattcctcatagaaataatggaaatcaatgaaaaactcgcagaagctgaaagtgaagctgccatgaaagagattgaatccattgtcaaagctaaacagaaagaatttactgacaatgtgagcagtgcttttgaacaagatgactttgaagaagccaaggaaattttgacaaagatgagatacttttcaaatatagaagaaaagatcaagttaaagaagattcccctttaattgtggatagtttaaagtttaaaaaataaagttcttgctgggcacagtggctcacacctgtaatcccagcactttgggaggctgaggtgggtggatgacaaggtcaggagttcaagaccagcttggccaacatagtgaaaccccgtctctgctgaaaatacaaaaattagccgggcatggtggcgcgtgcctgtaatcccagctacttggtaggccgaggcaggagaatcgcttaaacccgtgaggtggaggttgcagtgagcagagatcacgcaactgcactccagcttgggcaacagagtgagacttaatcttgaaaaataaataaatgaaaaataaaattcttgta

SEQ ID NO: 283228 - DNA, 548 bp, Homo sapiens
  misc_feature (1)..(2): n is a, c, g, or t
  misc_feature (5)..(6): n is a, c, g, or t
nncannagtctggttagacgctctctttgcttttccccacgagtgaccacggctagataggccgccggccagatgtggcgggggagagccggggctttgctccgggtgtgggggttttggccgacaggggttcccagaaggagaccgctaagctgcgatgctgcgtcgcaggcgggaagcaattatccccgctgttggaactgcggcggcccatggggccccgggcgggaggacaggttcttctgcccacagtgccgagcgctgcaggcacctgaccccactcgagactacttcagccttatggactgcaaccgttccttcagagttgatacagcgaagctccagcacaggtaccagcaactgcagcgtcttgtccacccagatttcttcagccagaggtctcagcctcccaaaatgcctggattgcaggcgcgagccaccacggccggctgaataaacatttgtcaaaagaagacatactagtggccaacatgtaaatgaaaaatgttctggataaacagaaactgattataaaacaaaaaacaaaa

SEQ ID NO: 283229 - DNA, 1739 bp, Homo sapiens
cggccgggaggtgagcgcactgttcgttcagcttgtgggtagcactcgggccgagccatgcaggcggcgcgcgtggactacatcgctccctggtgggtcgtgtggctgcacagcgtcccgcacgtcggcctgcgcctgcagcccgtgaacagcaccttcagccccggcgacgagagttaccaggagtcgctgctgttcctggggctggtggccgccgtctgcctgggcctgaacctcatcttccttgtggcttacctggtctgtgcatgccactgccggcgggacgatgcggtgcagaccaagcagcaccactcctgctgcatcacctggacggccgtggtggccgggctcatctgctgtgctgcggtgggcgttggtttctatggaaacagcgagaccaacgatggggcgtaccagctgatgtactccttggacgatgccaaccacaccttctctgggatcgatgctctggtttccggaactacccagaagatgaaggtggacctagagcagcacctggcccggctcagtgagatctttgctgcccggggcgattacctgcagaccctgaagttcatacagcagatggcgggcagcgttgttgttcagctctcaggactgcccgtgtggagggaggtcaccatggagctgaccaagctatccgaccagactggctacgtggagtactacaggtggctctcctacctcctgctctttatcctggacctggtcatctgcctcattgcctgcctgggactggccaagcgctccaagtgtctcctggcctcgatgctgtgctgtggggcactgagcctgctcctcagttgggcatccctggccgctgatggcgctgcggcagtggccaccagtgacttctgtgtggctcctgacaccttcatcctgaacgtcacggagggccagatcagcacagaggtgactcgctactacctgtattgcagccagagtggaagcagccccttccagcagaccctgaccaccttccagcgcgcactcaccaccatgcagatccaggtcgcggggctgctgcagtttgccgtgcccctcttctccactgcagaggaagacctgcttgcaatccagctcctgctgaactcctcagagtccagccttcaccagctgactgccatggtggactgccgagggctgcacaaggattatctggacgctcttgctggcatctgctacgacggcctccagggcttgctgtaccttggcctcttctccttcctggccgccctcgccttctccaccatgatctgtgcagggccaagggcctggaagcacttcaccaccagaaacagagactacgatgacattgatgatgatgacccctttaacccccaagcctggcgcatggcggctcacagtcccccgaggggacagcttcacagcttctgcagctacagcagtggcctgggaagtcagaccagcctgcagcccccggcccagaccatctccaacgcccctgtctccgagtacatgaaccaagccatgctctttggtaggaacccacgctacgagaacgtgccactaatcgggagagcctcccctccgcctacgtactctcccagcatgagagccacctacctgtctgtggcggatgagcacctgaggcactacgggaatcagtttccagcctaacagactttcgggggttcctgcctcctttttccgttctggtttttaattagtgcaaatacaagctgcgtttctttaat

SEQ ID NO: 283230 - DNA, 3619 bp, Homo sapiens
cggccgggaggtgagcgcactgttcgttcagcttgtgggtagcactcgggccgagccatgcaggcggcgcgcgtggactacatcgctccctggtgggtcgtgtggctgcacagcgtcccgcacgtcggcctgcgcctgcagcccgtgaacagcaccttcagccccggcgacgagagttaccaggagtcgctgctgttcctggggctggtggccgccgtctgcctgggcctgaacctcatcttccttgtggcttacctggtctgtgcatgccactgccggcgggacgatgcggtgcagaccaagcagcaccactcctgctgcatcacctggacggccgtggtggccgggctcatctgctgtgctgcggtgggcgttggtttctatggaaacagcgagaccaacgatggggcgtaccagctgatgtactccttggacgatgccaaccacaccttctctgggatcgatgctctggtttccggaactacccagaagatgaaggtggacctagagcagcacctggcccggctcagtgagatctttgctgcccggggcgattacctgcagaccctgaagttcatacagcagatggcgggcagcgttgttgttcagctctcaggactgcccgtgtggagggaggtcaccatggagctgaccaagctatccgaccagactggctacgtggagtactacaggtggctctcctacctcctgctctttatcctggacctggtcatctgcctcattgcctgcctgggactggccaagcgctccaagtgtctcctggcctcgatgctgtgctgtggggcactgagcctgctcctcagttgggcatccctggccgctgatggcgctgcggcagtggccaccagtgacttctgtgtggctcctgacaccttcatcctgaacgtcacggagggccagatcagcacagaggtgactcgctactacctgtattgcagccagagtggaagcagccccttccagcagaccctgaccaccttccagcgcgcactcaccaccatgcagatccaggtcgcggggctgctgcagtttgccgtgcccctcttctccactgcagaggaagacctgcttgcaatccagctcctgctgaactcctcagagtccagccttcaccagctgactgccatggtggactgccgagggctgcacaaggccaagcctgtcccctttgccccctcttctcaaggtgtgctgcttcttgccatcctggcctcagcttcagtgcccccgtctctggttccccaccctgcaacctcctccgccctgttcagagccagcttcttagtgcccagcacacagattatctggacgctcttgctggcatctgctacgacggcctccagggcttgctgtaccttggcctcttctccttcctggccgccctcgccttctccaccatgatctgtgcagggccaagggcctggaagcacttcaccaccagaaacagagactacgatgacattgatgatgatgacccctttaacccccaagcctggcgcatggcggctcacagtcccccgaggggacagcttcacagcttctgcagctacagcagtggcctgggaagtcagaccagcctgcagcccccggcccagaccatctccaacgcccctgtctccgagtacatgaaccaagccatgctctttggtaggaacccacgctacgagaacgtgccactaatcgggagagcctcccctccgcctacgtactctcccagcatgagagccacctacctgtctgtggcggatgagcacctgaggcactacgggaatcagtttccagcctaacagactttcgggggttcctgcctcctttttccgttctggtttttaattagtgcaaatacaagctgcgtttctttaatagaaaccaaaggcatctggagcccgagaggcctcctgctgtggcagaggagcagctgggattcccgaccaaagccccagggggtgcagaagactcaccacgcgggccagcctctctcttttgccctgctctccacaccagaaatgcccccaggtgcttggctgcctcagaggtaccatccctgagctggctgcctggccctgctcacccctacgcctcgcccttgccaggaggggagtggcagtgaggagggggccaggtcaggcaccaccatcaagagagctgtgtgttctctctggtcccacaacgatgactctgcctcttgtcagcccagccaagagcccagacgacccctctgtcctcgttccctgtcctcgttccctgcaggtaacatgagaagggctgatcaggagatgctctttaagaagttcgcacccctgctgacaccagaacagcccaaatcagagttcccagggccagacaggctcttcctgggccacagaggggaggcatcaggaaagctctgcagtggggggctggtggctccggggctgggggatcacaggctggtgaaccccggtgggaacagaggtgaaagcctgccacattccgcctgtctccctaaccctccattgcctcgcctctattccagaatcaatgctgcagaatgtgttagctgcagataggcatggtctcaggtatgaacagacactttgaaacgactttaggtctttcttttctccagtgttttaaacatgttgattatccaaagaattgaaactcctagcacatccagtttttacaacagatttgcagctcattccttaccctggttaggtcactacttttgcagattttgctggcactgatctggagatctgcagatctggaggagacgggaaggagtcgattcttaaataaggatcagtgaggcatcctgtcccaagctactgtttggtggggatctgggttcatctcacccacagagggaggatctttaagaggagaaaaaagccaagagggaaagccagagttccctgttctaggggactagccaaatgcctacatcagctgtcccctccctgttgtctccaagtaagtttgccagaaaaggttttagcaaagtgctacaactgtgtctttataggaggataggcctctgccctgccccacccccaccacctgtccccacccagtgtcccaggccacaggagcttattggccaggagggaataatgtcccccaatactgcctgttgagggaccagagttggggtctttggtgcttccaacctcctgccaacctggagttcacaacaccagagccccacggcctcgcacactgaagcaggggcgtgcggtgactcggtgcttctgttttggaagaaccacctgtcatcaaaacatggacagcagggtgttctcagctcccagcgaagcctccacaacagaatggggccacagggcagccgggactccctgtctcacctacattaacccatgcatactgtatgccataaactcactttggtatatccgcgtcacatgcagagaggaactctgcgacgtcaaagtgttgcttcttaaagtttcattattggcaactagagggttgtttttaatgcatggaaactaaacagattcctcggggagttcctgaaggaaccaggtgggcaaacctttgcttatatacatgcggcctcacctggaagagaaataaaccacttgtactaaaa

SEQ ID NO: 283231 - DNA, 3801 bp, Homo sapiens
  misc_feature (3481)..(3481): n is a, c, g, or t
  misc_feature (3483)..(3483): n is a, c, g, or t
  misc_feature (3487)..(3487): n is a, c, g, or t
  misc_feature (3490)..(3491): n is a, c, g, or t
  misc_feature (3494)..(3494): n is a, c, g, or t
cggccgggaggtgagcgcactgttcgttcagcttgtgggtagcactcgggccgagccatgcaggcggcgcgcgtggactacatcgctccctggtgggtcgtgtggctgcacagcgtcccgcacgtcggcctgcgcctgcagcccgtgaacagcaccttcagccccggcgacgagagttaccaggagtcgctgctgttcctggggctggtggccgccgtctgcctgggcctgaacctcatcttccttgtggcttacctggtctgtgcatgccactgccggcgggacgatgcggtgcagaccaagcagcaccactcctgctgcatcacctggacggccgtggtggccgggctcatctgctgtgctgcggtgggcgttggtttctatggaaacagcgagaccaacgatggggcgtaccagctgatgtactccttggacgatgccaaccacaccttctctgggatcgatgctctggtttccggaactacccagaagatgaaggtggacctagagcagcacctggcccggctcagtgagatctttgctgcccggggcgattacctgcagaccctgaagttcatacagcagatggcgggcagcgttgttgttcagctctcaggactgcccgtgtggagggaggtcaccatggagctgaccaagctatccgaccagactggctacgtggagtactacaggtggctctcctacctcctgctctttatcctggacctggtcatctgcctcattgcctgcctgggactggccaagcgctccaagtgtctcctggcctcgatgctgtgctgtggggcactgagcctgctcctcagttgggcatccctggccgctgatggcgctgcggcagtggccaccagtgacttctgtgtggctcctgacaccttcatcctgaacgtcacggagggccagatcagcacagaggtgactcgctactacctgtattgcagccagagtggaagcagccccttccagcagaccctgaccaccttccagcgcgcactcaccaccatgcagatccaggtcgcggggctgctgcagtttgccgtgcccctcttctccactgcagaggaagacctgcttgcaatccagctcctgctgaactcctcagagtccagccttcaccagctgactgccatggtggactgccgagggctgcacaaggattatctggacgctcttgctggcatctgctacgacggcctccagggcttgctgtaccttggcctcttctccttcctggccgccctcgccttctccaccatgatctgtgcagggccaagggcctggaagcacttcaccaccagaaacagagactacgatgacattgatgatgatgacccctttaacccccaagcctggcgcatggcggctcacagtcccccgaggggacagcttcacagcttctgcagctacagcagtggcctgggaagtcagaccagcctgcagcccccggcccagaccatctccaacgcccctgtctccgagtacatgaaccaagccatgctctttggtaggaacccacgctacgagaacgtgccactaatcgggagagcctcccctccgcctacgtactctcccagcatgagagccacctacctgtctgtggcggatgagcacctgaggcactacgggaatcagtttccagcctaacagactttcgggggttcctgcctcctttttccgttctggtttttaattagtgcaaatacaagctgcgtttctttaatagaaaccaaaggcatctggagcccgagaggcctcctgctgtggcagaggagcagctgggattcccgaccaaagccccagggggtgcagaagactcaccacgcgggccagcctctctcttttgccctgctctccacaccagaaatgcccccaggtgcttggctgcctcagaggtaccatccctgagctggctgcctggccctgctcacccctacgcctcgcccttgccaggaggggagtggcagtgaggagggggccaggtcaggcaccaccatcaagagagctgtgtgttctctctggtcccacaacgatgactctgcctcttgtcagcccagccaagagcccagacgacccctctgtcctcgttccctgtcctcgttccctgcaggtaacatgagaagggctgatcaggagatgctctttaagaagttcgcacccctgctgacaccagaacagcccaaatcagagttcccagggccagacaggctcttcctgggccacagaggggaggcatcaggaaagctctgcagtggggggctggtggctccggggctgggggatcacaggctggtgaaccccggtgggaacagaggtgaaagcctgccacattccgcctgtctccctaaccctccattgcctcgcctctattccagaatcaatgctgcagaatgtgttagctgcagataggcatggtctcaggtatgaacagacactttgaaacgactttaggtctttcttttctccagtgttttaaacatgttgattatccaaagaattgaaactcctagcacatccagtttttacaacagatttgcagctcattccttaccctggttaggtcactacttttgcagattttgctggcactgatctggagatctgcagatctggaggagacgggaaggagtcgattcttaaataaggatcagtgaggcatcctgtcccaagctactgtttggtggggatctgggttcatctcacccacagagggaggatctttaagaggagaaaaaagccaagagggaaagccagagttccctgttctaggggactagccaaatgcctacatcagctgtcccctccctgttgtctccaagtaagtttgccagaaaaggttttagcaaagtgctacaactgtgtctttataggaggataggcctctgccctgccccacccccaccacctgtccccacccagtgtcccaggccacaggagcttattggccaggagggaataatgtcccccaatactgcctgttgagggaccagagttggggtctttggtgcttccaacctcctgccaacctggagttcacaacaccagagccccacggcctcgcacactgaagcaggggcgtgcggtgactcggtgcttctgttttggaagaaccacctgtcatcaaaacatggacagcagggtgttctcagctcccagcgaagcctccacaacagaatggggccacagggcagccgggactccctgtctcacctacattaacccatgcatactgtatgccataaactcactttggtatatccgcgtcacatgcagagaggaactctgcgacgtcaaagtgttgcttcttaaagtttcattattggcaactagagggttgtttttaatgcatggaaactaaacagattcctcggggagttcctgaaggaaccaggtgggcaaacctttgcttatatacatgcggcctcacctggaagagaaataaaccacttgtactaaaaaaaaaaananaaancgnnggngaaccgggcccgtcgacccgggaacagaagatgatccggaacacacgaaagcaagggagcccggagtcaggagcaccgcacacaccgctaacacccagaaagggcgctgcgcaccaatgacagaatcacagagagaatttccggaattacgcggagaagccgcgatccaataacaatagtaacgatctaccccacaaagaaacatcccagcctagagacgctcggggtccctcgaataccgcacgccctcctcaacaaatggaagcggacgtcgccccggcaaaatcggcaaaattgcgcaatgaaa

SEQ ID NO: 283232 - DNA, 1663 bp, Homo sapiens
cggccgggaggtgagcgcactgttcgttcagcttgtgggtagcactcgggccgagccatgcaggcggcgcgcgtggactacatcgctccctggtgggtcgtgtggctgcacagcgtcccgcacgtcggcctgcgcctgcagcccgtgaacagcaccttcagccccggcgacgagagttaccaggagtcgctgctgttcctggggctggtggccgccgtctgcctgggcctgaacctcatcttccttgtggcttacctggtctgtgcatgccactgccggcgggacgatgcggtgcagaccaagcagcaccactcctgctgcatcacctggacggccgtggtggccgggctcatctgctgtgctgcggtgggcgttggtttctatggaaacagcgagaccaacgatggggcgtaccagctgatgtactccttggacgatgccaaccacaccttctctgggatcgatgctctggtttccggaactacccagaagatgaaggtggacctagagcagcacctggcccggctcagtgagatctttgctgcccggggcgattacctgcagaccctgaagttcatacagcagatggcgggcagcgttgttgttcagctctcaggactgcccgtgtggagggaggtcaccatggagctgaccaagctatccgaccagactggctacgtggagtactacaggtggctctcctacctcctgctctttatcctggacctggtcatctgcctcattgcctgcctgggactggccaagcgctccaagtgtctcctggcctcgatgctgtgctgtggggcactgagcctgctcctcagttgggcatccctggccgctgatggcgctgcggcagtggccaccagtgacttctgtgtggctcctgacaccttcatcctgaacgtcacggagggccagatcagcacagaggtgactcgctactacctgtattgcagccagagtggaagcagccccttccagcagaccctgaccaccttccagcgcgcactcaccaccatgcagatccaggtcgcggggctgctgcagtttgccgtgcccctcttctccactgcagaggaagacctgcttgcaatccagctcctgctgaactcctcagagtccagccttcaccagctgactgccatggtggactgccgagggctgcacaaggattatctggacgctcttgctggcatctgctacgacggcctccagggcttgctgtaccttggcctcttctccttcctggccgccctcgccttctccaccatgatctgtgcagggccaagggcctggaagcacttcaccaccagcacctgtcatcaaaacatggacagcagggtgttctcagctcccagcgaagcctccacaacagaatggggccacagggcagccgggactccctgtctcacctacattaacccatgcatactgtatgccataaactcactttggtatatccgcgtcacatgcagagaggaactctgcgacgtcaaagtgttgcttcttaaagtttcattattggcaactagagggttgtttttaatgcatggaaactaaacagattcctcggggagttcctgaaggaaccaggtgggcaaacctttgcttatatacatgcggcctcacctggaagagaaataaaccacttgtactaaaa

SEQ ID NO: 283233 - DNA, 3473 bp, Homo sapiens
cggccgggaggtgagcgcactgttcgttcagcttgtgggtagcactcgggccgagccatgcaggcggcgcgcgtggactacatcgctccctggtgggtcgtgtggctgcacagcgtcccgcacgtcggcctgcgcctgcagcccgtgaacagcaccttcagccccggcgacgagagttaccaggagtcgctgctgttcctggggctggtggccgccgtctgcctgggcctgaacctcatcttccttgtggcttacctggtctgtgcatgccactgccggcgggacgatgcggtgcagaccaagcagcaccactcctgctgcatcacctggacggccgtggtggccgggctcatctgctgtgctgcggtgggcgttggtttctatggaaacagcgagaccaacgatggggcgtaccagctgatgtactccttggacgatgccaaccacaccttctctgggatcgatgctctggtttccggaactacccagaagatgaaggtggacctagagcagcacctggcccggctcagtgagatctttgctgcccggggcgattacctgcagaccctgaagttcatacagcagatggcgggcagcgttgttgttcagctctcaggactgcccgtgtggagggaggtcaccatggagctgaccaagctatccgaccagactggctacgtggagtactacaggtggctctcctacctcctgctctttatcctggacctggtcatctgcctcattgcctgcctgggactggccaagcgctccaagtgtctcctggcctcgatgctgtgctgtggggcactgagcctgctcctcagttgggcatccctggccgctgatggcgctgcggcagtggccaccagtgacttctgtgtggctcctgacaccttcatcctgaacgtcacggagggccagatcagcacagaggtgactcgctactacctgtattgcagccagagtggaagcagccccttccagcagaccctgaccaccttccagcgcgcactcaccaccatgcagatccaggtcgcggggctgctgcagtttgccgtgcccctcttctccactgcagaggaagacctgcttgcaatccagctcctgctgaactcctcagagtccagccttcaccagctgactgccatggtggactgccgagggctgcacaaggattatctggacgctcttgctggcatctgctacgacggcctccagggcttgctgtaccttggcctcttctccttcctggccgccctcgccttctccaccatgatctgtgcagggccaagggcctggaagcacttcaccaccagaaacagagactacgatgacattgatgatgatgacccctttaacccccaagcctggcgcatggcggctcacagtcccccgaggggacagcttcacagcttctgcagctacagcagtggcctgggaagtcagaccagcctgcagcccccggcccagaccatctccaacgcccctgtctccgagtacatgaaccaagccatgctctttggtaggaacccacgctacgagaacgtgccactaatcgggagagcctcccctccgcctacgtactctcccagcatgagagccacctacctgtctgtggcggatgagcacctgaggcactacgggaatcagtttccagcctaacagactttcgggggttcctgcctcctttttccgttctggtttttaattagtgcaaatacaagctgcgtttctttaatagaaaccaaaggcatctggagcccgagaggcctcctgctgtggcagaggagcagctgggattcccgaccaaagccccagggggtgcagaagactcaccacgcgggccagcctctctcttttgccctgctctccacaccagaaatgcccccaggtgcttggctgcctcagaggtaccatccctgagctggctgcctggccctgctcacccctacgcctcgcccttgccaggaggggagtggcagtgaggagggggccaggtcaggcaccaccatcaagagagctgtgtgttctctctggtcccacaacgatgactctgcctcttgtcagcccagccaagagcccagacgacccctctgtcctcgttccctgtcctcgttccctgcaggtaacatgagaagggctgatcaggagatgctctttaagaagttcgcacccctgctgacaccagaacagcccaaatcagagttcccagggccagacaggctcttcctgggccacagaggggaggcatcaggaaagctctgcagtggggggctggtggctccggggctgggggatcacaggctggtgaaccccggtgggaacagaggtgaaagcctgccacattccgcctgtctccctaaccctccattgcctcgcctctattccagaatcaatgctgcagaatgtgttagctgcagataggcatggtctcaggtatgaacagacactttgaaacgactttaggtctttcttttctccagtgttttaaacatgttgattatccaaagaattgaaactcctagcacatccagtttttacaacagatttgcagctcattccttaccctggttaggtcactacttttgcagattttgctggcactgatctggagatctgcagatctggaggagacgggaaggagtcgattcttaaataaggatcagtgaggcatcctgtcccaagctactgtttggtggggatctgggttcatctcacccacagagggaggatctttaagaggagaaaaaagccaagagggaaagccagagttccctgttctaggggactagccaaatgcctacatcagctgtcccctccctgttgtctccaagtaagtttgccagaaaaggttttagcaaagtgctacaactgtgtctttataggaggataggcctctgccctgccccacccccaccacctgtccccacccagtgtcccaggccacaggagcttattggccaggagggaataatgtcccccaatactgcctgttgagggaccagagttggggtctttggtgcttccaacctcctgccaacctggagttcacaacaccagagccccacggcctcgcacactgaagcaggggcgtgcggtgactcggtgcttctgttttggaagaaccacctgtcatcaaaacatggacagcagggtgttctcagctcccagcgaagcctccacaacagaatggggccacagggcagccgggactccctgtctcacctacattaacccatgcatactgtatgccataaactcactttggtatatccgcgtcacatgcagagaggaactctgcgacgtcaaagtgttgcttcttaaagtttcattattggcaactagagggttgtttttaatgcatggaaactaaacagattcctcggggagttcctgaaggaaccaggtgggcaaacctttgcttatatacatgcggcctcacctggaagagaaataaaccacttgtactaaaa

SEQ ID NO: 283234 - DNA, 3351 bp, Homo sapiens
gagcgtggtgggccaggaccggaagtctggctctgggtgttatttaaggtggctcctgtttttgtcgctgctgttcctggggctggtggccgccgtctgcctgggcctgaacctcatcttccttgtggcttacctggtctgtgcatgccactgccggcgggacgatgcggtgcagaccaagcagcaccactcctgctgcatcacctggacggccgtggtggccgggctcatctgctgtgctgcggtgggcgttggtttctatggaaacagcgagaccaacgatggggcgtaccagctgatgtactccttggacgatgccaaccacaccttctctgggatcgatgctctggtttccggaactacccagaagatgaaggtggacctagagcagcacctggcccggctcagtgagatctttgctgcccggggcgattacctgcagaccctgaagttcatacagcagatggcgggcagcgttgttgttcagctctcaggactgcccgtgtggagggaggtcaccatggagctgaccaagctatccgaccagactggctacgtggagtactacaggtggctctcctacctcctgctctttatcctggacctggtcatctgcctcattgcctgcctgggactggccaagcgctccaagtgtctcctggcctcgatgctgtgctgtggggcactgagcctgctcctcagttgggcatccctggccgctgatggcgctgcggcagtggccaccagtgacttctgtgtggctcctgacaccttcatcctgaacgtcacggagggccagatcagcacagaggtgactcgctactacctgtattgcagccagagtggaagcagccccttccagcagaccctgaccaccttccagcgcgcactcaccaccatgcagatccaggtcgcggggctgctgcagtttgccgtgcccctcttctccactgcagaggaagacctgcttgcaatccagctcctgctgaactcctcagagtccagccttcaccagctgactgccatggtggactgccgagggctgcacaaggattatctggacgctcttgctggcatctgctacgacggcctccagggcttgctgtaccttggcctcttctccttcctggccgccctcgccttctccaccatgatctgtgcagggccaagggcctggaagcacttcaccaccagaaacagagactacgatgacattgatgatgatgacccctttaacccccaagcctggcgcatggcggctcacagtcccccgaggggacagcttcacagcttctgcagctacagcagtggcctgggaagtcagaccagcctgcagcccccggcccagaccatctccaacgcccctgtctccgagtacatgaaccaagccatgctctttggtaggaacccacgctacgagaacgtgccactaatcgggagagcctcccctccgcctacgtactctcccagcatgagagccacctacctgtctgtggcggatgagcacctgaggcactacgggaatcagtttccagcctaacagactttcgggggttcctgcctcctttttccgttctggtttttaattagtgcaaatacaagctgcgtttctttaatagaaaccaaaggcatctggagcccgagaggcctcctgctgtggcagaggagcagctgggattcccgaccaaagccccagggggtgcagaagactcaccacgcgggccagcctctctcttttgccctgctctccacaccagaaatgcccccaggtgcttggctgcctcagaggtaccatccctgagctggctgcctggccctgctcacccctacgcctcgcccttgccaggaggggagtggcagtgaggagggggccaggtcaggcaccaccatcaagagagctgtgtgttctctctggtcccacaacgatgactctgcctcttgtcagcccagccaagagcccagacgacccctctgtcctcgttccctgtcctcgttccctgcaggtaacatgagaagggctgatcaggagatgctctttaagaagttcgcacccctgctgacaccagaacagcccaaatcagagttcccagggccagacaggctcttcctgggccacagaggggaggcatcaggaaagctctgcagtggggggctggtggctccggggctgggggatcacaggctggtgaaccccggtgggaacagaggtgaaagcctgccacattccgcctgtctccctaaccctccattgcctcgcctctattccagaatcaatgctgcagaatgtgttagctgcagataggcatggtctcaggtatgaacagacactttgaaacgactttaggtctttcttttctccagtgttttaaacatgttgattatccaaagaattgaaactcctagcacatccagtttttacaacagatttgcagctcattccttaccctggttaggtcactacttttgcagattttgctggcactgatctggagatctgcagatctggaggagacgggaaggagtcgattcttaaataaggatcagtgaggcatcctgtcccaagctactgtttggtggggatctgggttcatctcacccacagagggaggatctttaagaggagaaaaaagccaagagggaaagccagagttccctgttctaggggactagccaaatgcctacatcagctgtcccctccctgttgtctccaagtaagtttgccagaaaaggttttagcaaagtgctacaactgtgtctttataggaggataggcctctgccctgccccacccccaccacctgtccccacccagtgtcccaggccacaggagcttattggccaggagggaataatgtcccccaatactgcctgttgagggaccagagttggggtctttggtgcttccaacctcctgccaacctggagttcacaacaccagagccccacggcctcgcacactgaagcaggggcgtgcggtgactcggtgcttctgttttggaagaaccacctgtcatcaaaacatggacagcagggtgttctcagctcccagcgaagcctccacaacagaatggggccacagggcagccgggactccctgtctcacctacattaacccatgcatactgtatgccataaactcactttggtatatccgcgtcacatgcagagaggaactctgcgacgtcaaagtgttgcttcttaaagtttcattattggcaactagagggttgtttttaatgcatggaaactaaacagattcctcggggagttcctgaaggaaccaggtgggcaaacctttgcttatatacatgcggcctcacctggaagagaaataaaccacttgtactaaaa

SEQ ID NO: 283235 - DNA, 459 bp, Homo sapiens
ccgctagctaatttgcttttattttttgtagaagtgggatcttgccaggttgcccaagctggtcccaaaatcatgggctcaggtgaacctcccacctgagtctcccaaagcattgggattacagccatgagccactgtacctagccccttactttccttttaacctgtcttctctaccagacaatgaataacttgagggcaaaaatgttttatcttgttcacctctgtattcctagctcctaacacataatgaatgttactagatagatggatgggtgctagatggctggatttcttcacgatgctatgctggcttcaaaccaaattaattaataaattaactaaatcagcatgggtccatcaatgactctttaagtgctttgcacggccccttcccctctcaagaacgggagtaagacatccaaagaaaggctggcctggcatctcaagactcacctc

SEQ ID NO: 283236 - DNA, 200 bp, Homo sapiens
aaggtatttctctttccataaaaaatacttcctgctctcgctggggcctttgtcgaaatgtttgcatgccactctctgcacacggcagggtgtggaacctcgacatgacccccagctgttctttgtaagggaaatgctttcttctcgtccatggtagcagagtgcctgcctcaagctggctggctttttaagaaggagaa

SEQ ID NO: 283237 - DNA, 1469 bp, Homo sapiens
agacgctggtagctcctggccagctcaaggtgtttccttttgcctggtaaccaggaggagtggctgaggcagggcatggagcggagcaacgcagctacaaagtgcggagaggagccccgctctggatcccgccggctccccaaggctgaaggagacaagtctggatccgcaggagcccccagtaagaacagcagccgcctggggggccgaccatgtatgtgtacagctggccgccgcccaaacagggcgtctggccgccgccgccgcagctgctcacctgcacctacctggccgcccctctgctgctacccccagtccaggcccacagcttccgcagccggcccgggagcctgcatgcgggcgagtgggcggccccacgggaataccaccgcttctacggccccgccgcgccacccgaggccgcgccgccctggtgggcctgccctccggcctacgccacgaccctgcgccggccctgcgccgccgccggcatctcgggactgtcgctgcaggcgcccgcggcggtggccgagagctgggcgccgtggccggagggcgggagcctgcaaaccgagctgcgctggggccgcgtggagcgcgcgcggggcccccctctgcagctaccggacttcgtgcgccgggagctgcggcgcgcgtacggcacctacccccgcgccgacgtgcgcgtcacccagcgccgcggccagttcctgctgcaggcgacgccgcgcgtgctcgagcccgaccaccgcgtggagtggcgcgtgcggcgccggcccgacagcggcgacagcagcccagcccgggaagccgcggagcgcggccgccccaggaagagcaagggcctgagctgaagccgccgcaaggcctaggggcgggcccgcgtgcacgcgcttggctctttcctgtgtgtgccgccgccgacaggcagaagtgagccctcacctgtgcgcgggaggcggacgcgctgctcacctgtctttttggcttctcccatgactgccggccagtttcctgcacttgtttctctcgctttattgctggacggtgggagaagggcaagtgcaagacggaatcgagggcacctctgggtgttctgtacctcttttcttcttgcaccttgggaagtggaggacgtgggatggaagaagggcctggacctccctccttcctcctccccaccttctcctaaggagcttgccctgcagtaagccccaactttcccttcctcttttccctctatcagagtcgtcgcccacccccctttcccaccgctcccctacccccgccttcctgccaagccgagggcgacggagatccccagcttagtaagaaaagtaaataggccgggcgcggtagctcacgcctggaatcccagcactgtgggaggccgaggcgggcggatcgcttgagcccaggagaccaggttggagaccagcctaggcaacatggcgaaaccctgtctctac

SEQ ID NO: 283238 - DNA, 960 bp, Homo sapiens
cgcggcgcagagtgggagccggagagcgagcgcggctgcagccggcggcatggctagcacggcttcggagatcatcgccttcatggtctccatctcaggctgggtactggtgtcctccacgctgcccaccgactactggaaggtgtctaccatcgacggcacggtcatcacaaccgccacctattgggccaacctgtggaaggcgtgcgttaccgactccacgggcgtctccaactgcaaggacttcccctccatgctggcgctggacggttatatacaggcatgtagaggacttatgatcgctgctgtcagcctgggcttctttggttccatatttgcgctctttggaatgaagtgtaccaaagtcggaggctccgataaagccaaagctaaaattgcttgtttggctgggattgtattcatactgtcagggctgtgctcaatgactggatgttccctatatgcaaacaaaatcacaacggaattctttgatcctctctttgttgagcaaaagtatgaattaggagccgctctgtttattggatgggcaggagcctcactgtgcataattggtggtgtcatattttgcttttcaatatctgacaacaacaaaacacccagatacacatacaacggggccacatctgtcatgtcttctcggacaaagtatcatggtggagaagattttaaaacaacaaacccttcaaaacagtttgataaaaatgcttatgtctaaaagagctcgctggcaagctgcctcttgagtttgttataaaagcgaactgttcacaaaatgatcccatcaaggccctcccataattaacactcaaaactatttttaaaatatgcatttgaagcatctgttgattgtatggatgtaagtgttcttacatagttagttatatactaatcattttctgttgtggctttctataaaaaataaacagtttatttacagga

SEQ ID NO: 283239 - DNA, 1134 bp, Homo sapiens
tatccgtgtagaaaatcagaacgactctttcaggccatctttaaaatgtcattggtaaaccatacttgatcctaaattcctgtacttcctcaggccatccgagcatgaaacgctgtcacctacccacatccgctggctgtgacgcttgtcaaagtgttctctatcggctgcatgcctagaccaccaaagcgttctgaccggacagtgtcactggagaaggcggcgcgacatgtccagggcgcagatctgggctctggtgtctggtgtcggagggtttggagctctcgttgctgctaccacgtccaatgagtggaaagtgaccacgcgagcctcctcggtgataacagccacttgggtttaccagggtctgtggatgaactgcgcaggtaacgcgttgggttctttccattgccgaccgcattttactatcttcaaagtagcaggttatatacaggcatgtagaggacttatgatcgctgctgtcagcctgggcttctttggttccatatttgcgctctttggaatgaagtgtaccaaagtcggaggctccgataaagccaaagctaaaattgcttgtttggctgggattgtattcatactgtcagggctgtgctcaatgactggatgttccctatatgcaaacaaaatcacaacggaattctttgatcctctctttgttgagcaaaagtatgaattaggagccgctctgtttattggatgggcaggagcctcactgtgcataattggtggtgtcatattttgcttttcaatatctgacaacaacaaaacacccagatacacatacaacggggccacatctgtcatgtcttctcggacaaagtatcatggtggagaagattttaaaacaacaaacccttcaaaacagtttgataaaaatgcttatgtctaaaagagctcgctggcaagctgcctcttgagtttgttataaaagcgaactgttcacaaaatgatcccatcaaggccctcccataattaacactcaaaactatttttaaaatatgcatttgaagcatctgttgattgtatggatgtaagtgttcttacatagttagttatatactaatcattttctgttgtggctttctataaaaaataaacagtttatttacagga

SEQ ID NO: 283240 - DNA, 1063 bp, Homo sapiens
cgcggcgcagagtgggagccggagagcgagcgcggctgcagccggcggcatggctagcacggcttcggagatcatcgccttcatggtctccatctcaggctgggtactggtgtcctccacgctgcccaccgactactggaaggtgtctaccatcgacggcacggtcatcacaaccgccacctattgggccaacctgtggaaggcgtgcgttaccgactccacgggcgtctccaactgcaaggacttcccctccatgctggcgctggacggttatatacaggcatgtagaggacttatgatcgctgctgtcagcctgggcttctttggttccatatttgcgctctttggaatgaagtgtaccaaagtcggaggctccgataaagccaaagctaaaattgcttgtttggctgggattgtattcatactgtcagggctgtgctcaatgactggatgttccctatatgcaaacaaaatcacaacggaattctttgatcctctctttgttgagcaaaagtatgaattaggagccgctctgtttattggatgggcaggagcctcactgtgcataattggtggtgtcatattttgcttttcaatatctgacaacaacaaaacacccaggagtggtccacagttgtcattacccagtggtcagtgaaggaaggaaggcaagagtggcggaacaccgctggagaaacagataactacatgtggcatgttaactcctgtcaaagacatgttcactgaagactctcctgagcttttccaggatgtatgtccaggagatcctgttggcacatccaaacatttccccttgtgactgcacataagcatggtcacctgacagggatcaggcccactctcctttagagggtggaatcccactgaactgagacttcctttcaacagtccccatcccacttctgcaacactatttgggccagtggtgtccagagggggaagccatctttctttccatcaagagacacaatacaccagaagtctagagcataccacctgtcatgtattggacaataaactattgcttgtgttaattttcagt

SEQ ID NO: 283241 - DNA, 1144 bp, Homo sapiens
cgcggcgcagagtgggagccggagagcgagcgcggctgcagccggcggcatggctagcacggcttcggagatcatcgccttcatggtctccatctcaggctgggtactggtgtcctccacgctgcccaccgactactggaaggtgtctaccatcgacggcacggtcatcacaaccgccacctattgggccaacctgtggaaggcgtgcgttaccgactccacgggcgtctccaactgcaaggacttcccctccatgctggcgctggacggttatatacaggcatgtagaggacttatgatcgctgctgtcagcctgggcttctttggttccatatttgcgctctttggaatgaagtgtaccaaagtcggaggctccgataaagccaaagctaaaattgcttgtttggctgggattgtattcatactgtcagggctgtgctcaatgactggatgttccctatatgcaaacaaaatcacaacggaattctttgatcctctctttgttgagcaaaagtatgaattaggagccgctctgtttattggatgggcaggagcctcactgtgcataattggtggtgtcatattttgcttttcaatatctgacaacaacaaaacacccaggagtggtccacagttgtcattacccagtggtcagtgaaggaaggaaggcaagagtggcggaacaccgctggagaaacagataactacatgtggcatgttaactcctgtcaaagacatgttcactgaagactctcctgagcttttccaggatgtatgtccaggagatcctgttggcacatccaaacatttccccttgtgactgcacataagcatggtcacctgacagggatcaggcccactctcctttagagggtggaatcccactgaactgagacttcctttcaacagtccccatcccacttctgcaacactatttgggccagtggtgtccagagggggaagccatctttctttccatcaagagacacaatacaccagaagtctagagcataccacctgtcatgtattggacaataaactattgcttgtgttaattttcagtatttcaagatgtagaatacttgctttgagaacaaaacataataataattgtaaagtctaataaaaatgtttctaagtggga

SEQ ID NO: 283242 - DNA, 1324 bp, Homo sapiens
cgcggcgcagagtgggagccggagagcgagcgcggctgcagccggcggcatggctagcacggcttcggagatcatcgccttcatggtctccatctcaggctgggtactggtgtcctccacgctgcccaccgactactggaaggtgtctaccatcgacggcacggtcatcacaaccgccacctattgggccaacctgtggaaggcgtgcgttaccgactccacgggcgtctccaactgcaaggacttcccctccatgctggcgctggacggttatatacaggcatgtagaggacttatgatcgctgctgtcagcctgggcttctttggttccatatttgcgctctttggaatgaagtgtaccaaagtcggaggctccgataaagccaaagctaaaattgcttgtttggctgggattgtattcatactgtcagggctgtgctcaatgactggatgttccctatatgcaaacaaaatcacaacggaattctttgatcctctctttgttgagcaaaagtatgaattaggagccgctctgtttattggatgggcaggagcctcactgtgcataattggtggtgtcatattttgcttttcaatatctgacaacaacaaaacacccagatacacatacaacggggccacatctgtcatgtcttctcggacaaagtatcatggtggagaagattttaaaacaacaaacccttcaaaacagtttgataaaaatgcttatgtctaaaagagctcgctggcaagctgcctcttgagtttgttataaaagcgaactgttcacaaaatgatcccatcaaggccctcccataattaacactcaaaactatttttaaaatatgcatttgaagcatctgttgattgtatggatgtaagtgttcttacatagttagttatatactaatcattttctgttgtggctttctataaaaaataaacagtttatttacaggatttgtaaaatgttttctacatttatatagaacatgaaaagcatttagtaccaaaggttcaagaagtattcgtactctagcctttttaatcattcatagatagaagtctttgtacccactccttatgtttcttttcattcataaacaggtgtataaggaacaatgtcttataaacagcatgggggcaatctgagaatattcctcaaaaggtgtccaggttaaatagacatgttactggctgcacacaggcaaattctagtttgttttttttaagtattctacaacatttatttaaaaaggtaaatctttttgttgaagcagcaagttatctggtagaacttaacttctacaggatcagagaggat

SEQ ID NO: 283243 - DNA, 1077 bp, Homo sapiens
tatccgtgtagaaaatcagaacgactctttcaggccatctttaaaatgtcattggtaaaccatacttgatcctaaattcctgtacttcctcaggccatccgagcatgaaacgctgtcacctacccacatccgctggctgtgacgcttgtcaaagtgttctctatcggctgcatgcctagaccaccaaagcgttctgaccggacagtgtcactggagaaggcggcgcgacatgtccagggcgcagatctgggctctggtgtctggtgtcggagggtttggagctctcgttgctgctaccacgtccaatgagtggaaagtgaccacgcgagcctcctcggtgataacagccacttgggtttaccagggtctgtggatgaactgcgcaggttatatacaggcatgtagaggacttatgatcgctgctgtcagcctgggcttctttggttccatatttgcgctctttggaatgaagtgtaccaaagtcggaggctccgataaagccaaagctaaaattgcttgtttggctgggattgtattcatactgtcagggctgtgctcaatgactggatgttccctatatgcaaacaaaatcacaacggaattctttgatcctctctttgttgagcaaaagtatgaattaggagccgctctgtttattggatgggcaggagcctcactgtgcataattggtggtgtcatattttgcttttcaatatctgacaacaacaaaacacccagatacacatacaacggggccacatctgtcatgtcttctcggacaaagtatcatggtggagaagattttaaaacaacaaacccttcaaaacagtttgataaaaatgcttatgtctaaaagagctcgctggcaagctgcctcttgagtttgttataaaagcgaactgttcacaaaatgatcccatcaaggccctcccataattaacactcaaaactatttttaaaatatgcatttgaagcatctgttgattgtatggatgtaagtgttcttacatagttagttatatactaatcattttctgttgtggctttctataaaaaataaacagtttatttacagga

SEQ ID NO: 283244 - DNA, 981 bp, Homo sapiens
cgcggcgcagagtgggagccggagagcgagcgcggctgcagccggcggcatggctagcacggcttcggagatcatcgccttcatggtctccatctcaggctgggtactggtgtcctccacgctgcccaccgactactggaaggtgtctaccatcgacggcacggtcatcacaaccgccacctattgggccaacctgtggaaggcgtgcgttaccgactccacgggcgtctccaactgcaaggacttcccctccatgctggcgctggacggttatatacaggcatgtagaggacttatgatcgctgctgtcagcctgggcttctttggttccatatttgcgctctttggaatgaagtgtaccaaagtcggaggctccgataaagccaaagctaaaattgcttgtttggctgggattgtattcatactgtcagggctgtgctcaatgactggatgttccctatatgcaaacaaaatcacaacggaattctttgatcctctctttgttgagcaaaagtaagtactcttctcagtctgtttccagctcacaggaagtgtatataaattaatattctcaaccaagagacatgaatttcctatatgacttttgaaagtaagacatactgataaatggtaactgatgacatcattcaagattaaatgtgtcatatgccacatacgcaaaatatgcatttaattagtttgctagtgttgcagtgtcttgtctcgaaacagttcaaggcatcaaatttagaactataaacttcatcgtttgctgtacatcatgaaactgaggtcaagtagaggaaacgtgaaaggtgtcagacggagaggaaagaatgatgcggtgtgcgaatagaaaattaaaaccttgccttgattgttgcccactcaaaatgatatttgccagatgctagtttctgggtcttttaaatttgctgtattaactactgtcttaacaagctcctcctaataaacctttat

SEQ ID NO: 283245 - DNA, 1173 bp, Homo sapiens
ggaggtagaaaacttttattagctggagaggttgaggcctacagcggggaaaggacttgccagattttcgccgcaagtcagggccatagcggggggcataacaaggcctcccaaccgaaggtcaagcaagagctccgagcgtcccacacaagtcccgaagggacactgtgacgccgcgctactgaaggcgcctgggttcccggactcggccaccgcctcgccgcttccgcccctcagaagcatggcggccacgtagcccggcccggattggacgttggcggtggacgccaaacagttggcaacacgattggctgctgcggggtgatgacgtcagggggcggtgtcggagtgaatgggggcagcatgaggccgggcggctttttgggcgccggacagcggctgagtagagccatgagccgatgtgttttggagcctcgccccccggggaagcggtggatggtggctggcctggggaatcccggactgcccggcacgcgacacagcgtgggcatggcggtgctggggcagctggcgcggcggctgggtgtggcggagagttggacgcgcgaccggcactgtgccgccgacctcgccctggccccgctgggggatgcccaactggtcctgctccggccacggcggcttatgaacgccaacgggcgcagcgtggcccgggctgcggagctgtttgggctgactgccgaggaagtctacctggtgcatgatgagctggacaagcccctggggagactggctctgaagctggggggcagtgccaggggccacaatggagtccgttcctgcattagctgcctcaactccaatgcaatgccaaggctgcgggtgggtatcgggcgcccggcgcaccctgaggcggttcaggcccatgtgctgggctgcttctcccctgctgagcaggagctgctgcctctgttgctggatcgagccaccgacctgatcttggaccacatccgtgagcgaagccaggggccctcactggggccgtgacactagtggccatggctgcctgcctgactgtagtgcccaccaacccagccactgccacagagctgccacgccagccttggtatctactttttatacaaatctcctctagactgttccaggctgcctgcggattaaagtgggggtgactgtgactggaccagtcca

SEQ ID NO: 283246 - DNA, 1290 bp, Homo sapiens
ggaggtagaaaacttttattagctggagaggttgaggcctacagcggggaaaggacttgccagattttcgccgcaagtcagggccatagcggggggcataacaaggcctcccaaccgaaggtcaagcaagagctccgagcgtcccacacaagtcccgaagggacactgtgacgccgcgctactgaaggcgcctgggttcccggactcggccaccgcctcgccgcttccgcccctcagaagcatggcggccacgtagcccggcccggattggacgttggcggtggacgccaaacagttggcaacacgattggctgctgcggggtgatgacgtcagggggcggtgtcggagtgaatgggggcagcatgaggccgggcggctttttgggcgccggacagcggctgagtagagccatgagccgatgtgttttggagcctcgccccccggggaagcggtggatggtggctggcctggggaatcccggactgcccggcacgcgacacagcgtgggcatggcggtgctggggcagctggcgcggcggctgggtgtggcggagagttggacgcgcgaccggcactgtgccgccgacctcgccctggccccgctgggggatgcccaactggtcctgctccggccacggcggcttatgaacgccaacgggcgcagcgtggcccgggctgcggagctgtttgggctgactgccgaggaagtctacctggtgcatgatgagctggacaagcccctggggagactggctctgaagctggggggcagtgccaggggccacaatggagtccgttcctgcattagctgcctcaactccaatgcaatgccaaggctgcgggtgggtatcgggcgcccggcgcaccctgaggcggttcaggcccatgtgctgggctgcttctcccctgctgagcaggagctgctgcctctgttgctggatcgagccaccgacctgatcttggaccacatccgtgagcgaagccaggggccctcactggggccgtgacactagtggccatggctgcctgcctgactgtagtgcccaccaacccagccactgccacagagctgccacgccagccttggtatctactttttatacaaatctcctctagactgttccaggctgcctgcggattaaagtgggggtgactgtgactggaccagtccaaaaaaaaaaaaaaaaaagcggggcgacaaaagatcccgggggcccactaacgccccgttttttaaagggccaaaggaaaaaaagagcccgccgtaaacacagaaacgctggcttaac

SEQ ID NO: 283247 - DNA, 1016 bp, Homo sapiens
ggaggtagaaaacttttattagctggagaggttgaggcctacagcggggaaaggacttgccagattttcgccgcaagtcagggccatagcggggggcataacaaggcctcccaaccgaaggtcaagcaagagctccgagcgtcccacacaagtcccgaagggacactgtgacgccgcgctactgaaggcgcctgggttcccggactcggccaccgcctcgccgcttccgcccctcagaagcatggcggccacgtagcccggcccggattggacgttggcggtggacgccaaacagttggcaacacgattggctgctgcggggtgatgacgtcagggggcggtgtcggagtgaatgggggcagcatgaggccgggcggctttttgggcgccggacagcggctgagtagagccatgagccgatgtgttttggagcctcgccccccggggaagcggtggatggtgagtggcgtggggcggcgacgtaggggctcccggtccctagcttcagttcggccattatgtcccgggagccgagtgcccccaaattgctgctctgttttcttaactggcttggcttggactcatcgtcaacagcagcagcatcatcatcatcaccatcatcatcatcatcatcatcatcatcatcatcatcatcaatggctgagccctcactgtgcttcctgggagccgggctcagcttcccgcctccacgggcactacaggagggaacaaagtcacctgtcaggatcatgtggaaagaggccaagggtggatttaacccaggcaccacatgattggagagggagcatctgcaaagatggagccctgcagtgcctgcgttagaaaagcattctaaggctgaggtgggcgaatcacctgaggtcaggagttcaagatcagcctgaccaacgtggcaaaaccctgtctctactaaaaatacaaaaattagctggacatggtggtggctgcctgcaatcccaactactcggaggctgaggcaggagaatcacttgaaa

SEQ ID NO: 283248 - DNA, 1080 bp, Homo sapiens
ggaggtagaaaacttttattagctggagaggttgaggcctacagcggggaaaggacttgccagattttcgccgcaagtcagggccatagcggggggcataacaaggcctcccaaccgaaggtcaagcaagagctccgagcgtcccacacaagtcccgaagggacactgtgacgccgcgctactgaaggcgcctgggttcccggactcggccaccgcctcgccgcttccgcccctcagaagcatggcggccacgtagcccggcccggattggacgttggcggtggacgccaaacagttggcaacacgattggctgctgcggggtgatgacgtcagggggcggtgtcggagtgaatgggggcagcatgaggccgggcggctttttgggcgccggacagcggctgagtagagccatgagccgatgtgttttggagcctcgccccccggggaagcggtggatggtggctggcctggggaatcccggactgcccggcacgcgacacagcgtgggcatggcggtgctggggcagctggcgcggcggctgggtgtggcggagagttggacgcgcgaccggcactgtgccgccgacctcgccctggccccgctgggggatgcccaactggtcctgctccggccacggcggcttatgaacgccaacgggcgcagcgtggcccgggctgcggagctgtttgggctgactgccgaggaagtctacctggtgcatgatgagctggacaagcccctggggagactggctctgaagctggggggcagtgccaggggccacaatggagtccgttcctgcattagctgcctcaactccaatgagctgctgcctctgttgctggatcgagccaccgacctgatcttggaccacatccgtgagcgaagccaggggccctcactggggccgtgacactagtggccatggctgcctgcctgactgtagtgcccaccaacccagccactgccacagagctgccacgccagccttggtatctactttttatacaaatctcctctagactgttccaggctgcctgcggattaaagtgggggtgactgtgactggaccagtcca

SEQ ID NO: 283249 - DNA, 1027 bp, Homo sapiens
ggaggtagaaaacttttattagctggagaggttgaggcctacagcggggaaaggacttgccagattttcgccgcaagtcagggccatagcggggggcataacaaggcctcccaaccgaaggtcaagcaagagctccgagcgtcccacacaagtcccgaagggacactgtgacgccgcgctactgaaggcgcctgggttcccggactcggccaccgcctcgccgcttccgcccctcagaagcatggcggccacgtagcccggcccggattggacgttggcggtggacgccaaacagttggcaacacgattggctgctgcggggtgatgacgtcagggggcggtgtcggagtgaatgggggcagcatgaggccgggcggctttttgggcgccggacagcggctgagtagagccatgagccgatgtgttttggagcctcgccccccggggaagcggtggatggtggctggcctggggaatcccggactgcccggcacgcgacacagcgtgggcatggcggtgctggggcagctggcgcggcggctgggtgtggcggagagttggacgcgcgaccggcactgtgccgccgacctcgccctggccccgctgggggatgcccaactggtcctgctccggccacggcggcttatgaacgccaacgggcgcagcgtggcccgggctggcaatgccaaggctgcgggtgggtatcgggcgcccggcgcaccctgaggcggttcaggcccatgtgctgggctgcttctcccctgctgagcaggagctgctgcctctgttgctggatcgagccaccgacctgatcttggaccacatccgtgagcgaagccaggggccctcactggggccgtgacactagtggccatggctgcctgcctgactgtagtgcccaccaacccagccactgccacagagctgccacgccagccttggtatctactttttatacaaatctcctctagactgttccaggctgcctgcggattaaagtgggggtgactgtgactggaccagtcca

SEQ ID NO: 283250 - DNA, 1062 bp, Homo sapiens
ggaggtagaaaacttttattagctggagaggttgaggcctacagcggggaaaggacttgccagattttcgccgcaagtcagggccatagcggggggcataacaaggcctcccaaccgaaggtcaagcaagagctccgagcgtcccacacaagtcccgaagggacactgtgacgccgcgctactgaaggcgcctgggttcccggactcggccaccgcctcgccgcttccgcccctcagaagcatggcggccacgtagcccggcccggattggacgttggcggtggacgccaaacagttggcaacacgattggctgctgcggggtgatgacgtcagggggcggtgtcggagtgaatgggggcagcatgaggccgggcggctttttgggcgccggacagcggctgagtagagccatgagccgatgtgttttggagcctcgccccccggggaagcggtggatggtggctggcctggggaatcccggactgcccggcacgcgacacagcgtgggcatggcggtgctggggcagctggcgcggcggctgggtgtggcggagagttggacgcgcgcggagctgtttgggctgactgccgaggaagtctacctggtgcatgatgagctggacaagcccctggggagactggctctgaagctggggggcagtgccaggggccacaatggagtccgttcctgcattagctgcctcaactccaatgcaatgccaaggctgcgggtgggtatcgggcgcccggcgcaccctgaggcggttcaggcccatgtgctgggctgcttctcccctgctgagcaggagctgctgcctctgttgctggatcgagccaccgacctgatcttggaccacatccgtgagcgaagccaggggccctcactggggccgtgacactagtggccatggctgcctgcctgactgtagtgcccaccaacccagccactgccacagagctgccacgccagccttggtatctactttttatacaaatctcctctagactgttccaggctgcctgcggattaaagtgggggtgactgtgactggaccagtcca

SEQ ID NO: 283251 - DNA, 1522 bp, Homo sapiens
ggaggtagaaaacttttattagctggagaggttgaggcctacagcggggaaaggacttgccagattttcgccgcaagtcagggccatagcggggggcataacaaggcctcccaaccgaaggtcaagcaagagctccgagcgtcccacacaagtcccgaagggacactgtgacgccgcgctactgaaggcgcctgggttcccggactcggccaccgcctcgccgcttccgcccctcagaagcatggcggccacgtagcccggcccggattggacgttggcggtggacgccaaacagttggcaacacgattggctgctgcggggtgatgacgtcagggggcggtgtcggagtgaatgggggcagcatgaggccgggcggctttttgggcgccggacagcggctgagtagagccatgagccgatgtgttttggagcctcgccccccggggaagcggtggatggtgagtggcgtggggcggcgacgtaggggctcccggtccctagcttcagttcggccattatgtcccgggagccgagtgcccccaaattgctgctctgttttcttaactggtgagttcagtgctcgacgggctccaaacttcttgaagctccgttcctgcactagggcgccctgcctgcccagccttctggagttctcaggggtcgggtttctgggccccttcttcgcgccccttccccactgcagcgttgctctgcgtttccgctcctctgcgttggggcccacgggacgctgtgagatcgggggtggcgagagttgttgggcctcagtttccctggtgccgcccgcaggtggctggcctggggaatcccggactgcccggcacgcgacacagcgtgggcatggcggtgctggggcagctggcgcggcggctgggtgtggcggagagttggacgcgcgaccggcactgtgccgccgacctcgccctggccccgctgggggatgcccaactggtcctgctccggccacggcggcttatgaacgccaacgggcgcagcgtggcccgggctgcggagctgtttgggctgactgccgaggaagtctacctggtgcatgatgagctggacaagcccctggggagactggctctgaagctggggggcagtgccaggggccacaatggagtccgttcctgcattagctgcctcaactccaatgcaatgccaaggctgcgggtgggtatcgggcgcccggcgcaccctgaggcggttcaggcccatgtgctgggctgcttctcccctgctgagcaggagctgctgcctctgttgctggatcgagccaccgacctgatcttggaccacatccgtgagcgaagccaggggccctcactggggccgtgacactagtggccatggctgcctgcctgactgtagtgcccaccaacccagccactgccacagagctgccacgccagccttggtatctactttttatacaaatctcctctagactgttccaggctgcctgcggattaaagtgggggtgactgtgactggaccagtcca

SEQ ID NO: 283252 - DNA, 1429 bp, Homo sapiens
ggaggtagaaaacttttattagctggagaggttgaggcctacagcggggaaaggacttgccagattttcgccgcaagtcagggccatagcggggggcataacaaggcctcccaaccgaaggtcaagcaagagctccgagcgtcccacacaagtcccgaagggacactgtgacgccgcgctactgaaggcgcctgggttcccggactcggccaccgcctcgccgcttccgcccctcagaagcatggcggccacgtagcccggcccggattggacgttggcggtggacgccaaacagttggcaacacgattggctgctgcggggtgatgacgtcagggggcggtgtcggagtgaatgggggcagcatgaggccgggcggctttttgggcgccggacagcggctgagtagagccatgagccgatgtgttttggagcctcgccccccggggaagcggtggatggtgagtggcgtggggcggcgacgtaggggctcccggtccctagcttcagttcggccattatgtcccgggagccgagtgcccccaaattgctgctctgttttcttaactggtgagttcagtgctcgacgggctccaaacttcttgaagctccgttcctgcactagggcgccctgcctgcccagccttctggagttctcaggggtcgggtttctgggccccttcttcgcgccccttccccactgcagcgttgctctgcgtttccgctcctctgcgttggggcccacgggacgctgtgagatcgggggtggcgagagttgttgggcctcagtttccctggtgccgcccgcaggtggctggcctggggaatcccggactgcccggcacgcgacacagcgtgggcatggcggtgctggggcagctggcgcggcggctgggtgtggcggagagttggacgcgcgaccggcactgtgccgccgacctcgccctggccccgctgggggatgcccaactggtcctgctccggccacggcggcttatgaacgccaacgggcgcagcgtggcccgggctgcggagctgtttgggctgactgccgaggaagtctacctggtgcatgatgagctggacaagcccctggggagactggctctgaagctggggggcagtgccaggggccacaatggagtccgttcctgcattagctgcctcaactccaatgagctgctgcctctgttgctggatcgagccaccgacctgatcttggaccacatccgtgagcgaagccaggggccctcactggggccgtgacactagtggccatggctgcctgcctgactgtagtgcccaccaacccagccactgccacagagctgccacgccagccttggtatctactttttatacaaatctcctctagactgttccaggctgcctgcggattaaagtgggggtgactgtgactggaccagtcca

SEQ ID NO: 283253 - DNA, 2225 bp, Homo sapiens
ggaccccaggcaccctccagcgtcaggtgcggatcccccagatgcccgccccgccccatcccaggacacccctggggtctccagctgcgtactggaaacgagtgggacactctgcatgctcagcgtcctgcgggaaaggtgtctggcgccccattttcctctgcatctcccgtgagtcgggagaggaactggatgaacgcagctgtgccgcgggtgccaggcccccagcctcccctgaaccctgcacggcaccccatgccccccatactgggaggctggcgagtggacatcctgcagccgctcctgtggccccggcacccagcaccgccagctgcagtgccggcaggaatttggggggggtggctcctcggtgcccccggagcgctgtggacatctcccccggcccaacatcacccagtcttgccagctgcgcctctgtggccattgggaagttggctctccttggagccagtgctccgtgcggtgcggccggggccagagaagccggcaggttcgctgtgttgggaacaacggtgatgaagtgagcgagcaggagtgtgcgtcaggccccccacagccccccagcagagaggcctgtgacatggggccctgtactactgcctggttccacagcgactggagctccaagtgctcagccgagtgtgggacgggaatccagcggcgctctgtggtctgccttgggagtggggcagccctcgggccaggccagggggaagcaggagcaggaactgggcagagctgtccaacaggaagccggccccctgacatgcgcgcctgcagcctggggccctgtgagagaacttggcgctggtacacagggccctggggtgagtgctcctccgaatgtggctctggcacacagcgtagagacatcatctgtgtatccaaactggggacggagttcaacgtgacttctccgagcaactgttctcacctccccaggccccctgccctgcagccctgtcaagggcaggcctgccaggaccgatggttttccacgccctggagcccatgttctcgctcctgccaagggggaacgcagacacgggaggtccagtgcctgagcaccaaccagaccctcagcacccgatgccctcctcaactgcggccctccaggaagcgcccctgtaacagccaaccctgcagccagcgccctgatgatcaatgcaaggacagctctccacattgccccctggtggtacaggcccggctctgcgtctacccctactacacagccacctgttgccgctcttgcgcacatgtcctggagcggtctccccaggatccctcctgaaaggggtccggggcaccttcacggttttctgtgccaccatcggtcacccattgatcggcccactctgaaccccctggctctccagcctgtcccagtctcagcagggatgtcctccaggtgacagagggtggcaaggtgactgacacaaagtgactttcagggctgtggtcaggcccatgtggtggtgtgatgggtgtgtgcacatatgcctcaggtgtgcttttgggactgcatggatatgtgtgtgctcaaacgtgtatcacttttcaaaaagaggttacacagactgagaaggacaagacctgtttccttgagactttcctaggtggaaaggaaagcaagtctgcagttccttgctaatctgagctacttagagtgtggtctccccaccaactccagttttgtgccctaagcctcatttctcatgttcagacctcacatcttctaagccgccctgtgtctctgaccccttctcatttgcctagtatctctgcccctgcctccctaattagctagggctggggtcagccactgccaatcctgccttactcaggaaggcaggaggaaagagactgcctctccagagcaaggcccagctgggcagagggtgaaaaagagaaatgtgagcatccgctcccccaccaccccgcccagcccctagccccactccctgcctcctgaaatggttcccacccagaactaatttattttttattaaagatggtcatgacaaatgaaaaatgagctcttccttgtcggctatggacccctcagcagtgtgaaggcagaaggtagggtgggcaggggaacagcattagagcccaggagagtttgggtcagagaatccccgccagccccaggccctgcaggctggtcatgggccactagaggtcaccagttctcccatttg

SEQ ID NO: 283254 - DNA, 751 bp, Homo sapiens
ggaccccaggcaccctccagcgtcaggtgcggatcccccagatgcccgccccgccccatcccaggacacccctggggtctccagctgcgtactggaaacgagtgggacactctgcatgctcagcgtcctgcgggaaaggtgtctggcgccccattttcctctgcatctcccgtgagtcgggagaggaactggatgaacgcagctgtgccgcgggtgccaggcccccagcctcccctgaaccctgcacggcaccccatgccccccatactgggaggctggcgagtggacatcctgcagccgctcctgtggccccggcacccagcaccgccagctgcagtgccggcaggaatttggggggggtggctcctcggtgcccccggagcgctgtggacatctcccccggcccaacatcacccagtcttgccagctgcgcctctgtggccattgggaagttggctctccttggagccagtgctccgtgcggtgcggccggggccagagaagccggcaggttcgctgtgttgggaacaacggtgatgaagtgagcgagcaggagtgtgcgtcaggccccccacagccccccagcagagaggcctgtgacatggggccctgtactactgcctggttccacagcgactggagctccaaggtgagcccggaacccccagccatatcctgcatcctgggtaaccacgcccaggacacctcagcctttccagcatagctcaataaacttgtattgatcaagcgc

SEQ ID NO: 283255 - DNA, 2047 bp, Homo sapiens
ggaccccaggcaccctccagcgtcaggtgcggatcccccagatgcccgccccgccccatcccaggacacccctggggtctccagctgcgtactggaaacgagtgggacactctgcatgctcagcgtcctgcgggaaaggtgtctggcgccccattttcctctgcatctcccgtgagtcgggagaggaactggatgaacgcagctgtgccgcgggtgccaggcccccagcctcccctgaaccctgcacggcaccccatgccccccatactgggaggctggcgagtggacatcctgcagccgctcctgtggccccggcacccagcaccgccagctgcagtgccggcaggaatttggggggggtggctcctcggtgcccccggagcgctgtggacatctcccccggcccaacatcacccagtcttgccagctgcgcctctgtggccattgggaagttggctctccttggagccagtgctccgtgcggtgcggccggggccagagaagccggcaggttcgctgtgttgggaacaacggtgatgaagtgagcgagcaggagtgtgcgtcaggccccccacagccccccagcagagaggcctgtgacatggggccctgtactactgcctggttccacagcgactggagctccaagtgctcagccgagtgtgggacgggaatccagcggcgctctgtggtctgccttgggagtggggcagccctcgggccaggccagggggaagcaggagcaggaactgggcagagctgtccaacaggaagccggccccctgacatgcgcgcctgcagcctggggccctgtgagagaacttggcgctggtacacagggccctggggtgagtgctcctccgaatgtggctctggcacacagcgtagagacatcatctgtgtatccaaactggggacggagttcaacgtgacttctccgagcaactgttctcacctccccaggccccctgccctgcagccctgtcaagggcaggcctgccaggaccgatggttttccacgccctggagcccatgttctcgctcctgccaagggggaacgcagacacgggaggtccagtgcctgagcaccaaccagaccctcagcacccgatgccctcctcaactgcggccctccaggaagcgcccctgtaacagccaaccctgcagccagcgccctgatgatcaatgcaaggacagctctccacattgccccctggtggtacaggcccggctctgcgtctacccctactacacagccacctgttgccgctcttgcgcacatgtcctggagcggtctccccaggatccctcctgaaaggggtccggggcaccttcacggttttctgtgccaccatcggtcacccattgatcggcccactctgaaccccctggctctccagcctgtcccagtctcagcagggatgtcctccaggtgacagagggtggcaaggtgactgacacaaagtgactttcagggctgtggtcaggcccatgtggtggtgtgatgggtgtgtgcacatatgcctcaggtgtgcttttgggactgcatggatatgtgtgtgctcaaacgtgtatcacttttcaaaaagaggttacacagactgagaaggacaagacctgtttccttgagactttcctaggtggaaaggaaagcaagtctgcagttccttgctaatctgagctacttagagtgtggtctccccaccaactccagttttgtgccctaagcctcatttctcatgttcagacctcacatcttctaagccgccctgtgtctctgaccccttctcatttgcctagtatctctgcccctgcctccctaattagctagggctggggtcagccactgccaatcctgccttactcaggaaggcaggaggaaagagactgcctctccagagcaaggcccagctgggcagagggtgaaaaagagaaatgtgagcatccgctcccccaccaccccgcccagcccctagccccactccctgcctcctgaaatggttcccacccagaactaatttattttttattaaagatggtcatgaca

SEQ ID NO: 283256 - DNA, 1398 bp, Homo sapiens
ccctgccctcccccatccacgatgagtgctcctccgaatgtggctctggcacacagcgtagagacatcatctgtgtatccaaactggggacggagttcaacgtgacttctccgagcaactgttctcacctccccaggccccctgccctgcagccctgtcaagggcaggcctgccaggaccgatggttttccacgccctggagcccatgttctcgctcctgccaagggggaacgcagacacgggaggtccagtgcctgagcaccaaccagaccctcagcacccgatgccctcctcaactgcggccctccaggaagcgcccctgtaacagccaaccctgcagccagcgccctgatgatcaatgcaaggacagctctccacattgccccctggtggtacaggcccggctctgcgtctacccctactacacagccacctgttgccgctcttgcgcacatgtcctggagcggtctccccaggatccctcctgaaaggggtccggggcaccttcacggttttctgtgccaccatcggtcacccattgatcggcccactctgaaccccctggctctccagcctgtcccagtctcagcagggatgtcctccaggtgacagagggtggcaaggtgactgacacaaagtgactttcagggctgtggtcaggcccatgtggtggtgtgatgggtgtgtgcacatatgcctcaggtgtgcttttgggactgcatggatatgtgtgtgctcaaacgtgtatcacttttcaaaaagaggttacacagactgagaaggacaagacctgtttccttgagactttcctaggtggaaaggaaagcaagtctgcagttccttgctaatctgagctacttagagtgtggtctccccaccaactccagttttgtgccctaagcctcatttctcatgttcagacctcacatcttctaagccgccctgtgtctctgaccccttctcatttgcctagtatctctgcccctgcctccctaattagctagggctggggtcagccactgccaatcctgccttactcaggaaggcaggaggaaagagactgcctctccagagcaaggcccagctgggcagagggtgaaaaagagaaatgtgagcatccgctcccccaccaccccgcccagcccctagccccactccctgcctcctgaaatggttcccacccagaactaatttattttttattaaagatggtcatgacaaatgaaaaatgagctcttccttgtcggctatggacccctcagcagtgtgaaggcagaaggtagggtgggcaggggaacagcattagagcccaggagagtttgggtcagagaatccccgccagccccaggccctgcaggctggtcatgggccactagaggtcaccagttctcccatttg

SEQ ID NO: 283257 - DNA, 2490 bp, Homo sapiens
ggaccccaggcaccctccagcgtcaggtgcggatcccccagatgcccgccccgccccatcccaggacacccctggggtctccagctgcgtactggaaacgagtgggacactctgcatgctcagcgtcctgcgggaaaggtgtctggcgccccattttcctctgcatctcccgtgagtcgggagaggaactggatgaacgcagctgtgccgcgggtgccaggcccccagcctcccctgaaccctgcacggcaccccatgccccccatactgggaggctggcgagtggacatcctgcagccgctcctgtggccccggcacccagcaccgccagctgcagtgccggcaggaatttggggggggtggctcctcggtgcccccggagcgctgtggacatctcccccggcccaacatcacccagtcttgccagctgcgcctctgtggccattgggaagttggctctccttggagccagtgctccgtgcggtgcggccggggccagagaagccggcaggttcgctgtgttgggaacaacggtgatgaagtgagcgagcaggagtgtgcgtcaggccccccacagccccccagcagagaggcctgtgacatggggccctgtactactgcctggttccacagcgactggagctccaagtgctcagccgagtgtgggacgggaatccagcggcgctctgtggtctgccttgggagtggggcagccctcgggccaggccagggggaagcaggagcaggaactgggcagagctgtccaacaggaagccggccccctgacatgcgcgcctgcagcctggggccctgtgagagaacttggcgctggtacacagggccctggggtgagtgctcctccgaatgtggctctggcacacagcgtagagacatcatctgtgtatccaaactggggacggagttcaacgtgacttctccgagcaactgttctcacctccccaggccccctgccctgcagccctgtcaagggcaggcctgccaggaccgatggttttccacgccctggagcccatgttctcgctcctgccaagggggaacgcagacacgggaggtccagtgcctgagcaccaaccagaccctcagcacccgatgccctcctcaactgcggccctccaggaagcgcccctgtaacagccaaccctgcagccagcgccctgatgatcaatgcaaggacagctctccacattgccccctggtggtacaggcccggctctgcgtctacccctactacacagccacctgttgccgctcttgcgcacatgtcctggagcggtctccccaggatccctcctgaaaggggtccggggcaccttcacggttttctgtgccaccatcggtcacccattgatcggcccactctgaaccccctggctctccagcctgtcccagtctcagcagggatgtcctccaggtgacagagggtggcaaggtgactgacacaaagtgactttcagggctgtggtcaggcccatgtggtggtgtgatgggtgtgtgcacatatgcctcaggtgtgcttttgggactgcatggatatgtgtgtgctcaaacgtgtatcacttttcaaaaagaggttacacagactgagaaggacaagacctgtttccttgagactttcctaggtggaaaggaaagcaagtctgcagttccttgctaatctgagctacttagagtgtggtctccccaccaactccagttttgtgccctaagcctcatttctcatgttcagacctcacatcttctaagccgccctgtgtctctgaccccttctcatttgcctagtatctctgcccctgcctccctaattagctagggctggggtcagccactgccaatcctgccttactcaggaaggcaggaggaaagagactgcctctccagagcaaggcccagctgggcagagggtgaaaaagagaaatgtgagcatccgctcccccaccaccccgcccagcccctagccccactccctgcctcctgaaatggttcccacccagaactaatttattttttattaaagatggtcatgacatgattgacataaaaaaaaaaaataagaataaaaaaaaagtagtggtggagccgctttaaaatatactccatcaaagagagtgcccaagtatataacgtataccgcacggatttttgtggtggtaccaatagggtgatccccctaatataagaggacacagaataaataaaagcattagggcaaattagcccattgatgttttatactaaagttgccttagaagacgtgggggagaaaacatcatgggacattaaatgttgagggaaacatttttgttgagacaaagatgacatcacttatagttatacaaggagggtgagttgtaacaaataatttgaggaagaaaaaaaacagcataaaaggagtagttattataacgagccttcatggagggtacaattatttacagtatacttagtagtgtgagtataaatgggttgaaa

SEQ ID NO: 283258 - DNA, 3496 bp, Homo sapiens
ggggcagtattctgtgttgagggaggaaaaacactcccttccaaaagcatgacaggcagaaagcagagaagggccaggactggctgagggcggggagctgggcctctggggtggacacacccttggtcacattgtgagggtagcttggttggccagtcccaccactgcagtgaccacagttgtgttgggctcacaccagtgaaccgaagctctggattctgagagtctgaggattccgtgaagatctcagacttgggctcagagcaaggatgcgtgaaattgtccatattcagattggccagtgtggcaaccagatcggagccaagttctgggagatgattggtgaggaacacgggatcgacttggctgggagcgaccgcggggcctcggccttgcagctggagagaatcagcgtgtactacaacgaagcctacggtaggaaatatgtgccccgagcagtcttggtggacctagaacctgggacgatggacagcattcgatctagcaaattaggagctctctttcaacccgacagttttgtccatggtaactctggggctggcaacaactgggccaaaggccactacacggagggagccgagctgatcgagaatgtcctagaggtggtgaggcacgagagtgagagctgtgactgcctgcagggcttccagatcgtccactccctgggcgggggcacaggctccgggatgggcactctgctcatgaacaagattagagaggagtacccggaccggatcatgaattccttcagcgtcatgccttctcccaaggtgtcggacacggtggtggagccctacaacgcggttctgtctatccaccagctgattgagaatgcagatgcctgtttctgcattgacaatgaggccctctatgacatctgcttccgtaccctgaagctgacgacacccacctatggggatctcaaccacctagtgtccttgaccatgagcggcataaccacctccctccggttcccgggtcagctcaacgcagacctgcgcaagctggcggtgaacatggtccccttcccccgcctgcacttctttatgcccggctttgccccactcacggcccagggcagccagcagtaccgagccctctccgtggccgagctcacccagcagatgttcgatgcccgcaataccatggctgcctgtgacctccgccgtggccgctacctcacagtggcctgcattttccggggcaagatgtccaccaaggaagtggaccagcaactgctctccgtgcagaccaggaacagcagctgctttgtggagtggattcccaacaacgtcaaggtggctgtctgcgacatcccgccccgggggctgagcatggccgccaccttcattggcaacaacacggccatccaagagatctttaatagggtctctgagcatttctcagccatgttcaaaaggaaagcttttgtgcactggtacaccagcgaagggatggacataaacgaatttggggaagctgaaaataacatccatgatttggtatccgagtaccaacaatttcaagatgccaaagcagttctagaggaagatgaagaggtcacggaggaggcagaaatggagccagaagataagggacattaactgtgagagaagctgtgccgcggagtcgcttacagaacagtttctcattagatgagtgtttctcctgcagcactccaaaacccactctgcactgcagcacagtgaatgatatgcactcaccattagcttcgacacagggactgagggagacaggtggggagcagctgacaggcattagggtctttgctgacatctactaaccttgaagagtttgatgttcagtgcatacttattaacttaaaaaaatagcaaatttattgtaaagtgctccctttgtttcaaagtgtttgccaggcatccagactacacgtgtggatttgcagggagccactggagttggtgttacatttttatactttagcagcactgataggcaccctggaatcctcacttggtatccgagggctactaagactctttccttaggttctttcctctgagcaaacactgactggcatcctgctttccagtgcctgccagcctccagaagagccaggtgcctgactagtacatggggagctacagagccaaggtcaatgtgagtcaacatccactagaaatatccatgttgtgtagacctgtgcatacaacatgctaactggaaaagaggaaaaaagaaaagccacagtcctctccacaaaaatacctggtccaaacaagaaaaacaaaaagacaagcaaaactaaagaactgcagtcttctgatctttatttctgaagagctagcctttaacatatatgtttatatagtttaaatttcttactactgttagatcccaggaattcattaataatcatccttggctttccttttaaaggctattttgaaatggtcttttcactttcattcagtcatcaccccccaaaatgctctgcagcctctctgctctttgagaaagggcacaccatgcgctcggcaaccattcaaatgcaggaattaagcagcaatggctgcagtgtccttctcagttatggaggacatcgtctcattagggaacttttacagttcaaattaatttgcagaagttgccataaatgtttgcataatgacatagctttaagcactacatgattttaatctgctcacattataacaggaccaaatacacaagagcgtaatcaaatcatctgtaacttcttaattacagtttacctatttctgacatgcagcactgccatctcttccagcaccatcagggttttaatggccctctagaattaccactgagatacactatttgatccatggataaccggtaatgggaaaatgctccgaccctcaatgcagtaaatatttacttgcaggcaactgggttctcatctcttgatttgcttttgtaatcagcaataataaaatagcaggtagatggatgacagttgctcattctgagaaacttcactcttttcacttatgcatcacgaggaaataactaaaatacataccaagagaaaaataccttgccatcggatcatcaacaagtcttctatttacaaacttcaaaaaacacaaaacaacattcatgttttaaatgctttctacttgtggttcaagaagcactagatttagtaagaaactctacctatatacttagtttgaagttagtaacttcctgagatgctaaagacttacagcctgcgattatacaaggatttacacatgcttcctctggtgctttacttcccaaacctaaaaaagcaatgaaatagatgtaaggaaggagggatttaaaccttttaaaaaacttttgctgacttatattactgtaaagatttgtttgctcaatagtaatcattaaactacaaagtaattcaattttaaatggcaaaattgctttatttcagactaaataaattccttttcttgaagcctaa

SEQ ID NO: 283259 - DNA, 399 bp, Homo sapiens
ttgataaaacattaacttttagaaaaacaagtaggctgactttttcctatttttctacacaggtaggaaatatgtgccccgagcagtcttggtggacctagaacctgggacgatggacagcattcgatctagcaaattaggagctctctttcaacccgacagttttgtccatggtatgtttttccagaaggttccaccaggaggagggggggatgctttactggtgcccttctcttttcacctttcttcccctgctggtttctctttttggccacaggtaactctggggctggcaacaactgggccaaaggccactacacggagggagccgagctgatcgagaatgtcctagaggtggtgaggcacgagagtgagagctgtgactgcctgcagggcttc

SEQ ID NO: 283260 - DNA, 417 bp, Homo sapiens
tctctttcaacccgacagttttgtccatggtatgtttttccagaaggttccaccaggaggagggggggatgctttactggtgcccttctcttttcacctttcttcccctgctggtttctctttttggccacaggtaactctggggctggcaacaactgggccaaaggccactacacggagggagccgagctgatcgagaatgtcctagaggtggtgaggcacgagagtgagagctgtgactgcctgcagggcttccagatcgtccactccctgggcgggggcacaggctccgggatgggcactctgctcatgaacaagattagagaggagtacccggaccggatcatgaattccttcagcgtcatgccttctcccaaggtgtcggacacggtggtggagccctacaacgcggttctg

SEQ ID NO: 283261 - DNA, 1421 bp, Homo sapiens
atggcgaacgcgagcgagccgggtggcagcggcggcggcgaggcggccgccctgggcctcaagctggccacgctcagcctgctgctgtgcgtgagcctagcgggcaacgtgctgttcgcgctgctgatcgtgcgggagcgcagcctgcaccgcgccccgtactacctgctgctcgacctgtgcctggccgacgggctgcgcgcgctcgcctgcctcccggccgtcatgctggcggcgcggcgtgcggcggccgcggcgggggcgccgccgggcgcgctgggctgcaagctgctcgccttcctggccgcgctcttctgcttccacgccgccttcctgctgctgggcgtgggcgtcacccgctacctggccatcgcgcaccaccgcttctatgcagagcgcctggccggctggccgtgcgccgccatgctggtgtgcgccgcctgggcgctggcgctggccgcggccttcccgccagtgctggacggcggtggcgacgacgaggacgcgccgtgcgccctggagcagcggcccgacggcgcccccggcgcgctgggcttcctgctgctgctggccgtggtggtgggcgccacgcacctcgtctacctccgcctgctcttcttcatccacgaccgccgcaagatgcggcccgcgcgcctggtgcccgccgtcagccacgactggaccttccacggcccgggcgccaccggccaggcggccgccaactggacggcgggcttcggccgcgggcccacgccgcccgcgcttgtgggcatccggcccgcagggccgggccgcggcgcgcgccgcctcctcgtgctggaagaattcaagacggagaagaggctgtgcaagatgttctacgccgtcacgctgctcttcctgctcctctgggggccctacgtcgtggccagctacctgcgggtcctggtgcggcccggcgccgtcccccaggcctacctgacggcctccgtgtggctgaccttcgcgcaggccggcatcaaccccgtcgtgtgcttcctcttcaacagggagctgagggactgcttcagggcccagttcccctgctgccagagcccccggaccacccaggcgacccatccctgcgacctgaaaggcattggtttatgagggaggccccgccacatagacccccaacccagcctttccctttggctcggacggtgacgttgtatcttttccttctggcaaaaatttctcttcttcctgttattggtagttctgaacgttagatattttttttccatggggtcaaaaggtacctaagtatatgattgcgagtggaaaaataggggacagaaatcaggtattggcagtttttccattttcatttgtgtgtgaatttttaatataaatgcggagacgtaaagcattaatgcaagttaaaatgtttcagtgaacaa

SEQ ID NO: 283262 - DNA, 2447 bp, Homo sapiens
atggcgaacgcgagcgagccgggtggcagcggcggcggcgaggcggccgccctgggcctcaagctggccacgctcagcctgctgctgtgcgtgagcctagcgggcaacgtgctgttcgcgctgctgatcgtgcgggagcgcagcctgcaccgcgccccgtactacctgctgctcgacctgtgcctggccgacgggctgcgcgcgctcgcctgcctcccggccgtcatgctggcggcgcggcgtgcggcggccgcggcgggggcgccgccgggcgcgctgggctgcaagctgctcgccttcctggccgcgctcttctgcttccacgccgccttcctgctgctgggcgtgggcgtcacccgctacctggccatcgcgcaccaccgcttctatgcagagcgcctggccggctggccgtgcgccgccatgctggtgtgcgccgcctgggcgctggcgctggccgcggccttcccgccagtgctggacggcggtggcgacgacgaggacgcgccgtgcgccctggagcagcggcccgacggcgcccccggcgcgctgggcttcctgctgctgctggccgtggtggtgggcgccacgcacctcgtctacctccgcctgctcttcttcatccacgaccgccgcaagatgcggcccgcgcgcctggtgcccgccgtcagccacgactggaccttccacggcccgggcgccaccggccaggcggccgccaactggacggcgggcttcggccgcgggcccacgccgcccgcgcttgtgggcatccggcccgcagggccgggccgcggcgcgcgccgcctcctcgtgctggaagaattcaagacggagaagaggctgtgcaagatgttctacgccgtcacgctgctcttcctgctcctctgggggccctacgtcgtggccagctacctgcgggtcctggtgcggcccggcgccgtcccccaggcctacctgacggcctccgtgtggctgaccttcgcgcaggccggcatcaaccccgtcgtgtgcttcctcttcaacagggagctgagggactgcttcagggcccagttcccctgctgccagagcccccggaccacccaggcgacccatccctgcgacctgaaaggcattggtttatgagggaggccccgccacatagacccccaacccagcctttccctttggctcggacggtgacgttgtatcttttccttctggcccctgtttaattttctaagctgccttcaaaatgactcgaagtggacagacacttggattgtactgactcctttgggggtggggtgggtgaggagtaggatgctcagcccactccagctccgcacattcgtcctcctaactcgactttcttcctgacaataggccctgcagtctttttgtagcggtactgacgtcttttattccatgtgtggttcctttttttctttttctataaaggctgtactaattttcttcatgcaacgtttcctaaagaccatggccagttttctacagaagctatttttgacaacctcaagtggcattacattttgcagtgaagtagaggaacctagggggacttcttcacaagttagatttcttgaggatcttctgttggaagcaggagaaagtggggggtggggggaagttgtccgaaatgccctctgaattgccggctgcagggtccttgtgctgcgctggttctttgaaagtctcagtgttgatattgaacttaaagagcagagatggagatcagtagcaaggcagtcatttttttaaagcagtaagtaacaagtaagatttggttcccggtttactttctgctgctaaaaaccacgtcagtgacaactgctctctgtattatagcaatcttgaatggaaacatttctgtcaagttgtaagttttaaaagagtaaagtgttttggttagtaatgatgtggagaaaaatacagtattgcatgtgttcgtgtgtatagattgtggttcgaggattgggagggctctgagaagcagagtactacatcaaaattgttttaagtattttttgccaataaaaaattaattttatggaaatggcttgtgctttgagaagcccagttttattctgtcttatgaaactaatttccactttgaaaattgttcttctgttgtttatggtataaatgaatggaatataatgatatcctccttctaggaaacaaagcatttccttaaaatgtttgctaggttaagctgtgctgttctactgatggttgttttaaattaataatgagaactataatttaaataatatttctttgttagacattataatgttaaactgaaagactaaattctgcaagtactatataatatttttggcttataatgctacatttttattaatgtaccttccgttttgaggatttatatctgtatttctctttgcattatacaaatataccagtattttcattctgga

SEQ ID NO: 283263 - DNA, 477 bp, Homo sapiens
gtcctgtgatgacctgtggcggaaggtaaaccgaaggtgactgcggttaacgtcctcgatgggaatggccaccttcaagaattgaaaaagaagtttaagcactgttatcaatatcatccagcgtaacagctttattcaactggagctatcagagccaacccctggcctggttttcaaatattcaagctcttggcggtgagacggtgtttactccatcgtggagatgtgagcacgctgcattatgaaaaggcaccatatcagagctacagaacaggatcccactccccagcaatgacctccacaggctggcagctcggtttttttgtttggtgtaaagacagcatgccacacataaaacagtactgggaagagaaagacaatagctatcttaaaaagactctgtcatttgtctccatgaacgtcctatttttacgtccaaaaggagatgagagtaaatgtattctaagaaacaccagt

SEQ ID NO: 283264 - DNA, 290 bp, Homo sapiens
cgggggccttaaagcttctttttttggaaagtggcttttatggtcgggccacggtataatttgccctgcccagtgagggcagctgctgaggaatgcaggggaggaagaacctgagacagcgccacgttcctggtaatatagtcccatgatcccacacaaagaagattcctggccgggcacaatggctcacacctctaatgccagcactttgggaggccgaggagggaagatcacttgagctcaagagttcgagaccagcgtgggcaacatagtgagacaccattcctaca

SEQ ID NO: 283265 - DNA, 713 bp, Homo sapiens
gtatgtaattaagtaaaagtttatttatttttttcaataaaagaaaaagtctgagtatagacaaattattgatcgctttattcgtactcactgtgacactaacaaaaagaagaaatgaaaagggaaaatagtacaaatgaagaaaatctgaaaatcaatggaagcacgaggacattcctagtcattttctcaattatcaaggaaaaataagatgcaaatagcttcaagtatgatgtgatagtcatgaatttgtgtcttttgctccgctttatttttaaacaataaaattaaggctacaaaattttccctgaacatagctttagctgtatccaatagtttttgatacaatgtttttttcttttcccttttggatacttaatttgtagtttcaattttgatttctcctgtgaactaggaattatgtggaagagatttcttaatgtcccattaatcagagacttaagaaatcattttattgccttatctcttctttgaatgaatgaaagtttaaaaatctgcttttgggaaatcaattgcagttttatttaatgccattaatcaagtatatgattaatttgtgtgttacgtgaatatgagaaaaaaattatagtttattgtattttttaatcccttatatctttaattgtatacttgaattgttcaattctgaaagaatattggaacctcccacaataaatatatttttatcaatt

SEQ ID NO: 283266 - DNA, 1662 bp, Homo sapiens
ggccgcctcctggggcagaatggaacagcctgggcccagggctccggatccctctctctgccaccacaacctccagccaaggtttttaaacactcgaggaagtgcctggctaagaggggacaggaaaaaaggaagaactggtgattttccaaggaaaacagggccaaaggcaaagaagaaagagaagtcctggaagctctgaagagaacaggtcctgcctgagtcccgatccccatataggatcttggaaacagcaagcagatgaccccaactgggattcctatgctaccactatgaggactgcattcacgcctaaaacaggagcagtgcctgccttaattcgccaaaacggtatcagaagattaggatatacatattcacttagtgatcctattctcaatcagacacaatatagtgatgagtacacttggaaatcacactctaaagaagatttgatcaaaactgagacttcaagaggaatcaagagccacaaatctcatctcaatgaagacattttcctgtggacactacctcactgtcaacaaacggggacactaaagaactgcctcccttggaaaatcccggcttcaatgaaagaagttaacaaggcactatcaaatcagtttatttcccttactaagagagactttgtggacagatcaaaagctcagaagattaagaaaagttctcacttgtctctggaatggaaaaagttacttccccaacctccagacactgaattccgaaggaattaccaaattccagctaaaattcctgagcttcaagatttcagtttcaaatatggatgctactcaagcttgcctgttgcttctcagggtctagtgccttctgtgctgcacagctacctgaggaaccaagagcacacaaagaaacagaccacataccaaagtgactacgacaaaacctacccagatttcttaatgcttttaaactcatttacttcctctcaagtcaaagagtaccttcagagtctttcctacaaagatagacaaattattgatcgctttattcgtactcactgtgacactaacaaaaagaagaaatgaaaagggaaaatagtacaaatgaagaaaatctgaaaatcaatggaagcacgaggacattcctagtcattttctcaattatcaaggaaaaataagatgcaaatagcttcaagtatgatgtgatagtcatgaatttgtgtcttttgctccgctttatttttaaacaataaaattaaggctacaaaattttccctgaacatagctttagctgtatccaatagtttttgatacaatgtttttttcttttcccttttggatacttaatttgtagtttcaattttgatttctcctgtgaactaggaattatgtggaagagatttcttaatgtcccattaatcagagacttaagaaatcattttattgccttatctcttctttgaatgaatgaaagtttaaaaatctgcttttgggaaatcaattgcagttttatttaatgccattaatcaagtatatgattaatttgtgtgttacgtgaatatgagaaaaaaattatagtttattgtattttttaatcccttatatctttaattgtatacttgaattgttcaattctgaaagaatattggaacctcccacaataaatatatttttatcaatt

SEQ ID NO: 283267 - DNA, 1484 bp, Homo sapiens
ggccgcctcctggggcagaatggaacagcctgggcccagggctccggatccctctctctgccaccacaacctccagccaacagatgaccccaactgggattcctatgctaccactatgaggactgcattcacgcctaaaacaggagcagtgcctgccttaattcgccaaaacggtatcagaagattaggatatacatattcacttagtgatcctattctcaatcagacacaatatagtgatgagtacacttggaaatcacactctaaagaagatttgatcaaaactgagacttcaagaggaatcaagagccacaaatctcatctcaatgaagacattttcctgtggacactacctcactgtcaacaaacggggacactaaagaactgcctcccttggaaaatcccggcttcaatgaaagaagttaacaaggcactatcaaatcagtttatttcccttactaagagagactttgtggacagatcaaaagctcagaagattaagaaaagttctcacttgtctctggaatggaaaaagttacttccccaacctccagacactgaattccgaaggaattaccaaattccagctaaaattcctgagcttcaagatttcagtttcaaatatggatgctactcaagcttgcctgttgcttctcagggtctagtgccttctgtgctgcacagctacctgaggaaccaagagcacacaaagaaacagaccacataccaaagtgactacgacaaaacctacccagatttcttaatgcttttaaactcatttacttcctctcaagtcaaagagtaccttcagagtctttcctacaaagatagacaaattattgatcgctttattcgtactcactgtgacactaacaaaaagaagaaatgaaaagggaaaatagtacaaatgaagaaaatctgaaaatcaatggaagcacgaggacattcctagtcattttctcaattatcaaggaaaaataagatgcaaatagcttcaagtatgatgtgatagtcatgaatttgtgtcttttgctccgctttatttttaaacaataaaattaaggctacaaaattttccctgaacatagctttagctgtatccaatagtttttgatacaatgtttttttcttttcccttttggatacttaatttgtagtttcaattttgatttctcctgtgaactaggaattatgtggaagagatttcttaatgtcccattaatcagagacttaagaaatcattttattgccttatctcttctttgaatgaatgaaagtttaaaaatctgcttttgggaaatcaattgcagttttatttaatgccattaatcaagtatatgattaatttgtgtgttacgtgaatatgagaaaaaaattatagtttattgtattttttaatcccttatatctttaattgtatacttgaattgttcaattctgaaagaatattggaacctcccacaataaatatatttttatcaatt

SEQ ID NO: 283268 - DNA, 8950 bp, Homo sapiens
cgcacgttgaatcgcgtggtgactccgggcttgaggttggaattaagaatagtcaggtggtgagtggaacgtctcttggggtgtcggaattcaaaacggacctggaggatgttgatctccaagaacatgccctggcggcggctgcagggcatttccttcgggatgtattcggctgaagagctcaagaaattaagtgttaaatccattacgaaccctcgatacctggacagcctggggaacccatcggcaaacggcctgtacgatttagctttgggccctgcagattccaaagaggtgtgctccacctgcgtgcaggacttcagcaactgttctgggcacctgggccacattgagctcccactcacagtgtataaccctctcctcttcgataagctgtacctgctgcttcggggctcttgtttaaactgccacatgctgacttgtccccgggccgtgattcacctcttactctgccagctgagggttctggaagtcggggccctacaagcagtctacgagcttgagagaattctgaacaggtttctggaagaaaatgccgatccctctgcctctgaaattcgggaggaattagaacaatacacaactgaaattgtgcagaacaacctcctggggtcccagggcgcacatgtaaagaacgtgtgtgagagcaagagcaagctcattgctctcttctggaaggcacatatgaatgctaagcgctgtccccactgcaagaccgggcgatccgttgtccgaaaggaacacaacagcaagttgactatcacatttccagccatggtgcacaggacagctggccagaaggactctgagcccctgggaattgaggaagctcagataggaaaacgaggatacttaacacccaccagtgcccgcgaacacctttctgccctgtggaagaatgaaggattctttctgaactaccttttttcgggaatggatgatgatggtatggaatccagattcaatcccagtgtgttctttctagatttcttggtggtgccgccctcaaggtatcgcccagtcagtcgcctaggagaccagatgtttactaatggccagacggtgaacttgcaggctgtcatgaaggatgtagttctgattcgaaaacttctggcattgatggcccaagaacagaagttgccagaggaagtggccacacccactacagatgaggaaaaagactctttgattgctattgaccgatcctttttgagtacacttccaggccagtccctcatagacaaactttacaacatttggattcgccttcagagccacgtcaatattgtgtttgatagcgagatggacaaactaatgatggacaagtacccaggcattaggcagatcctggagaagaaagaaggcctgttccgaaaacacatgatgggaaagcgagtggactacgctgcgcgctcagtcatctgcccagacatgtacatcaacaccaacgaaattggaattcccatggtgtttgccacaaaactgacctacccacagccagttaccccatggaatgttcaggaacttaggcaagcggtcatcaacggccctaatgtgcacccaggagcctccatggtcatcaatgaggacggcagccgcacagccctgagcgctgtggacatgacccagcgagaggccgtggccaagcagcttctgaccccagccacgggggcacctaagccccaggggacaaaaattgtgtgccggcatgtgaagaatggggacattctgctactgaaccgacagcccacactgcacagaccctccatccaggcccaccgtgcccgcatcctgcctgaagagaaagtgctgcggctccactatgccaactgcaaggcctataatgccgactttgatggagacgagatgaatgcccatttcccccagagtgagctgggccgggccgaggcctacgtcctggcctgcactgatcagcagtaccttgttcccaaggatggccaaccattggcgggactgatccaggatcacatggtttcaggggcaagcatgactactcggggttgctttttcacccgggagcactatatggagctggtgtaccgaggactcacggacaaagtggggcgcgtgaagctcctttctccttccatcctgaagccctttccgctgtggacaggaaaacaggttgtgtcaacgctgctcataaatataatcccagaggaccacatcccactgaacttatctggaaaggcgaaaatcactgggaaagcctgggtgaaggaaactcctcgatccgttcctggctttaaccctgactcgatgtgcgagtcccaggtgatcatcagggaaggggagctgctctgcggagtgctggacaaggcgcactatgggagctccgcctacggcctggtccactgctgctatgagatctatggaggcgagaccagcggcaaggttctaacctgcctggcccgcctcttcaccgcctacctgcagctctacagaggcttcaccttgggcgtggaagacattttggtgaagccaaaggcagatgtcaagaggcaacgtatcattgaagaatccacccactgcgggccccaggctgtcagggctgcattaaacctgccagaagccgcatcatatgatgaggtccgaggaaaatggcaggatgcccatctgggcaaggaccagagggattttaacatgattgatctgaagttcaaggaggaagtgaaccattacagcaatgagattaacaaggcatgcatgccttttggcctacacagacagttcccagagaacacgctgcagctgatggtgcagtcgggagccaaaggttcaactgtgaacacgatgcagatctcgtgcctgctgggccagattgaactggaaggtcggagcaccccgctgatggcgtctggcaagtcactgccctgctttgagccttatgagttcacccccagggctggtggctttgtcactggcaggttcctcaccggcatcaaacctcctgagttcttcttccactgcatggcaggacgagagggcctggtggacactgctgtgaaaaccagccgctcaggctatctccaaaggtgcatcatcaagcacctagaggggctggtcgtgcagtatgatctcacggtccgtgacagtgacggcagtgtggtgcagttcctgtatggggaggatggcctggacatccccaagacacagttcctgcagcccaagcagttccccttcctggccagcaactacgaggtgataatgaaatcacagcatctccatgaagttttatccagagcagatcccaaaaaagctctccaccacttcagagctatcaaaaaatggcaaagcaagcaccccaacaccctgctgagaagaggcgccttcttgagttattcccagaaaattcaggaagctgtgaaagccctgaaacttgagagtgaaaaccgcaatggccgcagccctgggactcaggagatgctgaggatgtggtatgagttggatgaggaaagccgaaggaaataccagaagaaggcggccgcttgtcctgaccccagtctgtctgtctggcgtcctgacatctactttgcatcagtgtcagaaacatttgaaacaaaggttgatgactacagtcaagagtgggcagctcaaacagagaagagttatgagaaatcagagctttctctcgacaggttgaggaccttgctgcagctgaagtggcagcgctcactgtgtgagccgggcgaggctgtgggcctgctggctgcccagagcatcggagagccctccacccagatgaccctcaacaccttccactttgcaggcagaggcgagatgaacgtcaccctgggcattccaaggttgcgggagattctcatggtggccagcgccaacatcaagacacccatgatgagcgtgcccgtgctcaacaccaagaaagccctgaagagagtgaaaagcctgaagaagcaactcaccagggtgtgcttgggggaggtgttgcagaaaattgacgtccaggagtccttctgtatggaagaaaaacagaacaaattccaggtgtaccagctgcggtttcagttcctgccacatgcatattaccagcaggagaagtgcctgagacccgaggacatcctgcgcttcatggaaacaagattctttaaacttctgatggaatccatcaaaaagaagaataataaagcatcagctttcaggaacgtaaacactcgaagagctacacagcgggatctggacaacgctggggagttggggaggagtcggggagagcaggagggtgatgaggaagaggaggggcacattgtggatgctgaagctgaggagggagacgccgatgcctctgatgccaaacgcaaggagaagcaggaggaggaggttgattatgagagtgaggaagaggaggagagggagggcgaggagaacgacgatgaagacatgcaggaggaacgaaatccccacagggaaggtgctcgaaagacccaagagcaagatgaagaggtgggcttaggcactgaggaggacccgtcccttcccgccctcctgacgcagccccggaaacccacccacagccaggagccccaggggcccgaggccatggagcgccgggtccaggctgtgcgtgagatccacccgttcatagatgactaccagtacgacaccgaggagagcctgtggtgccaggtgacagtgaagctccctctgatgaagatcaactttgacatgagctccctggtagtatctttggcccatggtgccgtcatctatgcgaccaagggcatcactcggtgcctcctgaatgaaacaaccaacaataagaacgagaaggagcttgtgctaaacacagaaggaatcaacctcccagagctattcaagtatgcagaggtcctggatctgcgccgcctctactccaacgacatccacgccatagccaacacgtatggcattgaggccgcgctgcgggtgatcgagaaggagatcaaggatgtgtttgccgtgtatggcatcgcggtcgaccctcgccatctctccctggttgctgattatatgtgcttcgagggtgtttacaagccactgaatcgctttgggatccggtcaaactcttccccgctacagcagatgacatttgaaaccagcttccagtttctgaagcaagccaccatgctgggatcccacgatgagctgaggtctccttctgcctgccttgtggtcgggaaggtcgtcaggggcgggacaggcctgttcgagctcaagcagcctctgagatagcagctaccccggcaccatctgcccagctccaaggacccttggtgagggcgtggcccagcctgccttctgcatgagaggaccaggagactggaatccagggcagttccaagtgacagtacagagcacagcagcgaccttgggcctgaaagcagtgggcctctgagctgggccagcttcacctggaaagtgacagagttgctcatccttgcccctccctgtctctggatttttatcaaggtttaccaagtcttctgagtccccctgagatggctggggcctcacctgtgctgcaggaggcctctgtggcataacccctaaggagaagtcctgattcacgattcactgagaagaccaaggggaagccatgctttgctgctggggaccccaggcacctccagagtagggaagcggggttcttttgctgtgagtggccagggacaacagacaagattcctgggggctcccgatgagcaggaacgtggagcctgctgcccaaggcctgctccttccggctgctccagcccctgggggcagagtccacaaagagtccccatcaagacttcttccctgagtcaagtacagcgtagcatagtcctccacccacccaacctctctgcctggccagggtcctggccctgccactgtgtggcgaggtgtccttctagaccacatcagccccaaggctgggagcagtcgctccagggccgcagcagttcactcccacacatagaacccaggtcactgctggggcgattgaacaggttgcctggcttttctctgctgtcagtttggtgtggaggcctatgttctgccccatacaccccacaggccctgcttatgggaaggaacacaggcctccagcccagaggactgtgccgccctgttcttggccgtccacgtttcctctccctctagcaccagcaatacatttccctggcatggacagaaaagacagagaggacttgtacaaaggctttgtaaaaccagaggctagcttctatctttgtctactgttatttcagctcagggcgggtaattaacatcattggaactagctattaggaaagaaaaaaaacttggttttttttacaacaattttttcccttggtttgcagtttctgcatttggatttgagaacccagggcggggattttcttggcacagtcaggtcttgggtccctcttcctgtgctttcttgtctgaggccttagggggaagagctcagcctctgcagcctcctccacctctgcccctggcctgcctctgctgtgacctccttccagagctagctgctggccctgtggccaggagaagcagaggggagaagcctttatgcagaagctgtgctagccttggtctggggtggggaggctgctgctgtgaccttaggggtagggttggggatcaagggaggctttgtcaagggagagtgaccatgttgctccctacatccatgcaataggacccagcctgcacctcctaggcctacactggggaaagcctgacagaaatcagtacctcctaacggggtctgccaggttcaccaaggcatgggcacagaggaatatgacagttttgaggcaggcaggaagggccagcctgcaagggtaagacattcattctttgagttaaaggccatattcacttgatgatttctacacacactagaattgtgagagtgtccttgaaggagatcacaaagtaacctggtgactgtggcacagggtccgtggattccatctctcccaggcactgagggcgcagaggcgaaggagcaagccctgcatattggcagggctgtgaccatcgcacttagatcagacccccgacctgtgttgggatgtgagggatgccctcctgccccacccatccacatggttcctgggcagctctgttttattcctgtgtctttcctgatggatgagtattaagacagcatgtctggtttttaaacagacatttgggagcttgcacatcctgatgagcagggactcactgtggtggccttagggaattacacgctcactttggtggttctctatgctcggaagcctctgagagtggccttggcagcttaagatggcagaggctttggagtcttcttaggactgtaagtgcccattgaggatgcatttgagttttggaaagtaggcccaagtcaaatctgatggatggattcaagaacatggactaatctgcgttgtcatttttaatcaaaatgtaatggagattgatcatctggtggggttcacaaacttttcatgagagctgtgagttctttttttgagatgcacttttgcacttgttacccaggctgagtgcaatggcgcaatctcggctccactgcaacctccatctcccgagttcaagcgattctcctgcctcagcctcccgagtagctgagattgcaggcatgcgccaccacgcctggctaatttttgtattttagtagagatggggtttcaccatgttggccaggctagtctcgaactcctgatctcgggtgatccgcctgcctcggcctcccaaagtgctgggtttacaggcgtgagctactgtgccggccagagctatgagttctttcagaatcctcagatgccattagctagccactgtttggacatccttctcaccttgccctttggggtgatatccatacctacttgcttgcttctaacagtttttttatttgttttgtagagacgggttttggtttattgctcaggctggtttcaaactcctaggctcaagcggtcctcccactgtggcctcccaaagtgctgggtggtgtgagccaccgtgcctggccagttaattttttttagtgtctcttttttgggttctcaccagaaacactatcagcattcccacagatattcctgtgagtctttgaaacattttctatcctgcattgagtaagaataaaaccgaggaaggggtgaagcaccttgtctcatccccagtctggaacttgaaccttcttttctcttcactttgccctacccccaaataatatgtacaaatgtctgtatccattgagcactaactccctattccttccacctccccagcccctggcaaccactgttctacgttctgtctctacgaatttgacttctctaggtccctcatacaagtggaaaagtacagcatgtctttttgtgaccggcttatttcacttagcataatgtcctcaaggttcatccatgctgtagcatgtgtcagaattgccttcttgcttgaggctgctgatacctcctcatgtgtatataccgtattttgtttaatcactcatctgttggtggacacttgggttgcctccacctcttggctgttgcaaataacgctgtgaacatggatatacagatatctgaggccaggccaggcgttcacacctgtaatcccaatacgttgggaggccgaggcgggcagatcatctgaggtcaggattcgagaccaccctggccaacatggcaaaaccccatctctactaaaaatacaaaaattagctgggtgtggtggtgcgcgcctataatcccagctactcgggaggctgaggcaggagaatcttgaactcaggaggtggaggttgcagtgagccgagattgcgccactgcactccagcctgggtgacagagtgagattccgtctcaaaaaaaaaaaaaaacaaaaactcaga

SEQ ID NO: 283269 - DNA, 6875 bp, Homo sapiens
cgcacgttgaatcgcgtggtgactccgggcttgaggttggaattaagaatagtcaggtggtgagtggaacgtctcttggggtgtcggaattcaaaacggacctggaggatgttgatctccaagaacatgccctggcggcggctgcagggcatttccttcgggatgtattcggctgaagagctcaagaaattaagtgttaaatccattacgaaccctcgatacctggacagcctggggaacccatcggcaaacggcctgtacgatttagctttgggccctgcagattccaaagaggtgtgctccacctgcgtgcaggacttcagcaactgttctgggcacctgggccacattgagctcccactcacagtgtataaccctctcctcttcgataagctgtacctgctgcttcggggctcttgtttaaactgccacatgctgacttgtccccgggccgtgattcacctcttactctgccagctgagggttctggaagtcggggccctacaagcagtctacgagcttgagagaattctgaacaggtttctggaagaaaatgccgatccctctgcctctgaaattcgggaggaattagaacaatacacaactgaaattgtgcagaacaacctcctggggtcccagggcgcacatgtaaagaacgtgtgtgagagcaagagcaagctcattgctctcttctggaaggcacatatgaatgctaagcgctgtccccactgcaagaccgggcgatccgttgtccgaaaggaacacaacagcaagttgactatcacatttccagccatggtgcacaggacagctggccagaaggactctgagcccctgggaattgaggaagctcagataggaaaacgaggatacttaacacccaccagtgcccgcgaacacctttctgccctgtggaagaatgaaggattctttctgaactaccttttttcgggaatggatgatgatggtatggaatccagattcaatcccagtgtgttctttctagatttcttggtggtgccgccctcaaggtatcgcccagtcagtcgcctaggagaccagatgtttactaatggccagacggtgaacttgcaggctgtcatgaaggatgtagttctgattcgaaaacttctggcattgatggcccaagaacagaagttgccagaggaagtggccacacccactacagatgaggaaaaagactctttgattgctattgaccgatcctttttgagtacacttccaggccagtccctcatagacaaactttacaacatttggattcgccttcagagccacgtcaatattgtgtttgatagcgagatggacaaactaatgatggacaagtacccaggcattaggcagatcctggagaagaaagaaggcctgttccgaaaacacatgatgggaaagcgagtggactacgctgcgcgctcagtcatctgcccagacatgtacatcaacaccaacgaaattggaattcccatggtgtttgccacaaaactgacctacccacagccagttaccccatggaatgttcaggaacttaggcaagcggtcatcaacggccctaatgtgcacccaggagcctccatggtcatcaatgaggacggcagccgcacagccctgagcgctgtggacatgacccagcgagaggccgtggccaagcagcttctgaccccagccacgggggcacctaagccccaggggacaaaaattgtgtgccggcatgtgaagaatggggacattctgctactgaaccgacagcccacactgcacagaccctccatccaggcccaccgtgcccgcatcctgcctgaagagaaagtgctgcggctccactatgccaactgcaaggcctataatgccgactttgatggagacgagatgaatgcccatttcccccagagtgagctgggccgggccgaggcctacgtcctggcctgcactgatcagcagtaccttgttcccaaggatggccaaccattggcgggactgatccaggatcacatggtttcaggggcaagcatgactactcggggttgctttttcacccgggagcactatatggagctggtgtaccgaggactcacggacaaagtggggcgcgtgaagctcctttctccttccatcctgaagccctttccgctgtggacaggaaaacaggttgtgtcaacgctgctcataaatataatcccagaggaccacatcccactgaacttatctggaaaggcgaaaatcactgggaaagcctgggtgaaggaaactcctcgatccgttcctggctttaaccctgactcgatgtgcgagtcccaggtgatcatcagggaaggggagctgctctgcggagtgctggacaaggcgcactatgggagctccgcctacggcctggtccactgctgctatgagatctatggaggcgagaccagcggcaaggttctaacctgcctggcccgcctcttcaccgcctacctgcagctctacagaggcttcaccttgggcgtggaagacattttggtgaagccaaaggcagatgtcaagaggcaacgtatcattgaagaatccacccactgcgggccccaggctgtcagggctgcattaaacctgccagaagccgcatcatatgatgaggtccgaggaaaatggcaggatgcccatctgggcaaggaccagagggattttaacatgattgatctgaagttcaaggaggaagtgaaccattacagcaatgagattaacaaggcatgcatgccttttggcctacacagacagttcccagagaacacgctgcagctgatggtgcagtcgggagccaaaggttcaactgtgaacacgatgcagatctcgtgcctgctgggccagattgaactggaaggtcggagcaccccgctgatggcgtctggcaagtcactgccctgctttgagccttatgagttcacccccagggctggtggctttgtcactggcaggttcctcaccggcatcaaacctcctgagttcttcttccactgcatggcaggacgagagggcctggtggacactgctgtgaaaaccagccgctcaggctatctccaaaggtgcatcatcaagcacctagaggggctggtcgtgcagtatgatctcacggtccgtgacagtgacggcagtgtggtgcagttcctgtatggggaggatggcctggacatccccaagacacagttcctgcagcccaagcagttccccttcctggccagcaactacgaggtgataatgaaatcacagcatctccatgaagttttatccagagcagatcccaaaaaagctctccaccacttcagagctatcaaaaaatggcaaagcaagcaccccaacaccctgctgagaagaggcgccttcttgagttattcccagaaaattcaggaagctgtgaaagccctgaaacttgagagtgaaaaccgcaatggccgcagccctgggactcaggagatgctgaggatgtggtatgagttggatgaggaaagccgaaggaaataccagaagaaggcggccgcttgtcctgaccccagtctgtctgtctggcgtcctgacatctactttgcatcagtgtcagaaacatttgaaacaaaggttgatgactacagtcaagagtgggcagctcaaacagagaagagttatgagaaatcagagctttctctcgacaggttgaggaccttgctgcagctgaagtggcagcgctcactgtgtgagccgggcgaggctgtgggcctgctggctgcccagagcatcggagagccctccacccagatgaccctcaacaccttccactttgcaggcagaggcgagatgaacgtcaccctgggcattccaaggttgcgggagattctcatggtggccagcgccaacatcaagacacccatgatgagcgtgcccgtgctcaacaccaagaaagccctgaagagagtgaaaagcctgaagaagcaactcaccagggtgtgcttgggggaggtgttgcagaaaattgacgtccaggagtccttctgtatggaagaaaaacagaacaaattccaggtgtaccagctgcggtttcagttcctgccacatgcatattaccagcaggagaagtgcctgagacccgaggacatcctgcgcttcatggaaacaagattctttaaacttctgatggaatccatcaaaaagaagaataataaagcatcagctttcaggaacgtaaacactcgaagagctacacagcgggatctggacaacgctggggagttggggaggagtcggggagagcaggagggtgatgaggaagaggaggggcacattgtggatgctgaagctgaggagggagacgccgatgcctctgatgccaaacgcaaggagaagcaggaggaggaggttgattatgagagtgaggaagaggaggagagggagggcgaggagaacgacgatgaagacatgcaggaggaacgaaatccccacagggaaggtgctcgaaagacccaagagcaagatgaagaggtgggcttaggcactgaggaggacccgtcccttcccgccctcctgacgcagccccggaaacccacccacagccaggagccccaggggcccgaggccatggagcgccgggtccaggctgtgcgtgagatccacccgttcatagatgactaccagtacgacaccgaggagagcctgtggtgccaggtgacagtgaagctccctctgatgaagatcaactttgacatgagctccctggtagtatctttggcccatggtgccgtcatctatgcgaccaagggcatcactcggtgcctcctgaatgaaacaaccaacaataagaacgagaaggagcttgtgctaaacacagaaggaatcaacctcccagagctattcaagtatgcagaggtcctggatctgcgccgcctctactccaacgacatccacgccatagccaacacgtatggcattgaggccgcgctgcgggtgatcgagaaggagatcaaggatgtgtttgccgtgtatggcatcgcggtcgaccctcgccatctctccctggttgctgattatatgtgcttcgagggtgtttacaagccactgaatcgctttgggatccggtcaaactcttccccgctacagcagatgacatttgaaaccagcttccagtttctgaagcaagccaccatgctgggatcccacgatgagctgaggtctccttctgcctgccttgtggtcgggaaggtcgtcaggggcgggacaggcctgttcgagctcaagcagcctctgagatagcagctaccccggcaccatctgcccagctccaaggacccttggtgagggcgtggcccagcctgccttctgcatgagaggaccaggagactggaatccagggcagttccaagtgacagtacagagcacagcagcgaccttgggcctgaaagcagtgggcctctgagctgggccagcttcacctggaaagtgacagagttgctcatccttgcccctccctgtctctggatttttatcaaggtttaccaagtcttctgagtccccctgagatggctggggcctcacctgtgctgcaggaggcctctgtggcataacccctaaggagaagtcctgattcacgattcactgagaagaccaaggggaagccatgctttgctgctggggaccccaggcacctccagagtagggaagcggggttcttttgctgtgagtggccagggacaacagacaagattcctgggggctcccgatgagcaggaacgtggagcctgctgcccaaggcctgctccttccggctgctccagcccctgggggcagagtccacaaagagtccccatcaagacttcttccctgagtcaagtacagcgtagcatagtcctccacccacccaacctctctgcctggccagggtcctggccctgccactgtgtggcgaggtgtccttctagaccacatcagccccaaggctgggagcagtcgctccagggccgcagcagttcactcccacacatagaacccaggtcactgctggggcgattgaacaggttgcctggcttttctctgctgtcagtttggtgtggaggcctatgttctgccccatacaccccacaggccctgcttatgggaaggaacacaggcctccagcccagaggactgtgccgccctgttcttggccgtccacgtttcctctccctctagcaccagcaatacatttccctggcatggacagaaaagacagagaggacttgtacaaaggctttgtaaaaccagaggctagcttctatctttgtctactgttatttcagctcagggcgggtaattaacatcattggaactagctattaggaaagaaaaaaaacttggttttttttacaacaaaaaaaaaaaaaaaaaaaaaaaaaaaaaaaaaaaataataaaaaacaaaaaaaaaaaaaaaaataaaaaaaaaaagaaaaacaaaatcacaaaacatacaaaaaatcacagtgcgcctcacacaatacctcaccaatgccagaccctatgtcatctcttactgttctgatgttgattgaatgggcggcgctactctaactgagacgcgactgtctatatataaaacagaaccgcggtgggagaggacatacgaaaaaacatacctgtgtggtatgtgagaagacaagtgtacgctggttcgtgtgcttctctagtctggtagagaccgcaccctccatccagggccgaggaggcccattaacatcaccggcgctctacgcttccctcaaggacgttatataccgctcgtctgtagctggtctcacttcgtcttcgcgggcgcgtgggtgcccgtacctaccacgtcgtccccttcggcggccgtcctacacgttcgtcgcgtctcgtaca

SEQ ID NO: 283270 - DNA, 6213 bp, Homo sapiens
  misc_feature (90)..(90): n is a, c, g, or t
ggttctggggagctctgcattgtgggagagtgtaggggcagacagtcatctcagcagctggggctagatgggagcccaggtctaggggtngagccaagctgctcagtaacatggctgcagcctcctcctcctagaaaaccatcaggaaatgcagccctggctgggggacactggagcaagcccagaccccggggcattggatctagcctgttctgaagtcttgtttgcctgcagaacaggagcccccctttccctcccctccactgcccccaaccctcatcagaggctgccctggggaggtgatgggccggcggggactgagccgatggtgtccttacaggtgcatcatcaagcacctagaggggctggtcgtgcagtatgatctcacggtccgtgacagtgacggcagtgtggtgcagttcctgtatggggaggatggcctggacatccccaagacacagttcctgcagcccaagcagttccccttcctggccagcaactacgaggtgataatgaaatcacagcatctccatgaagttttatccagagcagatcccaaaaaagctctccaccacttcagagctatcaaaaaatggcaaagcaagcaccccaacaccctgctgagaagaggcgccttcttgagttattcccagaaaattcaggaagctgtgaaagccctgaaacttgagagtgaaaaccgcaatggccgcagccctgggactcaggagatgctgaggatgtggtatgagttggatgaggaaagccgaaggaaataccagaagaaggcggccgcttgtcctgaccccagtctgtctgtctggcgtcctgacatctactttgcatcagtgtcagaaacatttgaaacaaaggttgatgactacagtcaagagtgggcagctcaaacagagaagagttatgagaaatcagagctttctctcgacaggttgaggaccttgctgcagctgaagtggcagcgctcactgtgtgagccgggcgaggctgtgggcctgctggctgcccagagcatcggagagccctccacccagatgaccctcaacaccttccactttgcaggcagaggcgagatgaacgtcaccctgggcattccaaggttgcgggagattctcatggtggccagcgccaacatcaagacacccatgatgagcgtgcccgtgctcaacaccaagaaagccctgaagagagtgaaaagcctgaagaagcaactcaccagggtgtgcttgggggaggtgttgcagaaaattgacgtccaggagtccttctgtatggaagaaaaacagaacaaattccaggtgtaccagctgcggtttcagttcctgccacatgcatattaccagcaggagaagtgcctgagacccgaggacatcctgcgcttcatggaaacaagattctttaaacttctgatggaatccatcaaaaagaagaataataaagcatcagctttcaggaacgtaaacactcgaagagctacacagcgggatctggacaacgctggggagttggggaggagtcggggagagcaggagggtgatgaggaagaggaggggcacattgtggatgctgaagctgaggagggagacgccgatgcctctgatgccaaacgcaaggagaagcaggaggaggaggttgattatgagagtgaggaagaggaggagagggagggcgaggagaacgacgatgaagacatgcaggaggaacgaaatccccacagggaaggtgctcgaaagacccaagagcaagatgaagaggtgggcttaggcactgaggaggacccgtcccttcccgccctcctgacgcagccccggaaacccacccacagccaggagccccaggggcccgaggccatggagcgccgggtccaggctgtgcgtgagatccacccgttcatagatgactaccagtacgacaccgaggagagcctgtggtgccaggtgacagtgaagctccctctgatgaagatcaactttgacatgagctccctggtagtatctttggcccatggtgccgtcatctatgcgaccaagggcatcactcggtgcctcctgaatgaaacaaccaacaataagaacgagaaggagcttgtgctaaacacagaaggaatcaacctcccagagctattcaagtatgcagaggtcctggatctgcgccgcctctactccaacgacatccacgccatagccaacacgtatggcattgaggccgcgctgcgggtgatcgagaaggagatcaaggatgtgtttgccgtgtatggcatcgcggtcgaccctcgccatctctccctggttgctgattatatgtgcttcgagggtgtttacaagccactgaatcgctttgggatccggtcaaactcttccccgctacagcagatgacatttgaaaccagcttccagtttctgaagcaagccaccatgctgggatcccacgatgagctgaggtctccttctgcctgccttgtggtcgggaaggtcgtcaggggcgggacaggcctgttcgagctcaagcagcctctgagatagcagctaccccggcaccatctgcccagctccaaggacccttggtgagggcgtggcccagcctgccttctgcatgagaggaccaggagactggaatccagggcagttccaagtgacagtacagagcacagcagcgaccttgggcctgaaagcagtgggcctctgagctgggccagcttcacctggaaagtgacagagttgctcatccttgcccctccctgtctctggatttttatcaaggtttaccaagtcttctgagtccccctgagatggctggggcctcacctgtgctgcaggaggcctctgtggcataacccctaaggagaagtcctgattcacgattcactgagaagaccaaggggaagccatgctttgctgctggggaccccaggcacctccagagtagggaagcggggttcttttgctgtgagtggccagggacaacagacaagattcctgggggctcccgatgagcaggaacgtggagcctgctgcccaaggcctgctccttccggctgctccagcccctgggggcagagtccacaaagagtccccatcaagacttcttccctgagtcaagtacagcgtagcatagtcctccacccacccaacctctctgcctggccagggtcctggccctgccactgtgtggcgaggtgtccttctagaccacatcagccccaaggctgggagcagtcgctccagggccgcagcagttcactcccacacatagaacccaggtcactgctggggcgattgaacaggttgcctggcttttctctgctgtcagtttggtgtggaggcctatgttctgccccatacaccccacaggccctgcttatgggaaggaacacaggcctccagcccagaggactgtgccgccctgttcttggccgtccacgtttcctctccctctagcaccagcaatacatttccctggcatggacagaaaagacagagaggacttgtacaaaggctttgtaaaaccagaggctagcttctatctttgtctactgttatttcagctcagggcgggtaattaacatcattggaactagctattaggaaagaaaaaaaacttggttttttttacaacaattttttcccttggtttgcagtttctgcatttggatttgagaacccagggcggggattttcttggcacagtcaggtcttgggtccctcttcctgtgctttcttgtctgaggccttagggggaagagctcagcctctgcagcctcctccacctctgcccctggcctgcctctgctgtgacctccttccagagctagctgctggccctgtggccaggagaagcagaggggagaagcctttatgcagaagctgtgctagccttggtctggggtggggaggctgctgctgtgaccttaggggtagggttggggatcaagggaggctttgtcaagggagagtgaccatgttgctccctacatccatgcaataggacccagcctgcacctcctaggcctacactggggaaagcctgacagaaatcagtacctcctaacggggtctgccaggttcaccaaggcatgggcacagaggaatatgacagttttgaggcaggcaggaagggccagcctgcaagggtaagacattcattctttgagttaaaggccatattcacttgatgatttctacacacactagaattgtgagagtgtccttgaaggagatcacaaagtaacctggtgactgtggcacagggtccgtggattccatctctcccaggcactgagggcgcagaggcgaaggagcaagccctgcatattggcagggctgtgaccatcgcacttagatcagacccccgacctgtgttgggatgtgagggatgccctcctgccccacccatccacatggttcctgggcagctctgttttattcctgtgtctttcctgatggatgagtattaagacagcatgtctggtttttaaacagacatttgggagcttgcacatcctgatgagcagggactcactgtggtggccttagggaattacacgctcactttggtggttctctatgctcggaagcctctgagagtggccttggcagcttaagatggcagaggctttggagtcttcttaggactgtaagtgcccattgaggatgcatttgagttttggaaagtaggcccaagtcaaatctgatggatggattcaagaacatggactaatctgcgttgtcatttttaatcaaaatgtaatggagattgatcatctggtggggttcacaaacttttcatgagagctgtgagttctttttttgagatgcacttttgcacttgttacccaggctgagtgcaatggcgcaatctcggctccactgcaacctccatctcccgagttcaagcgattctcctgcctcagcctcccgagtagctgagattgcaggcatgcgccaccacgcctggctaatttttgtattttagtagagatggggtttcaccatgttggccaggctagtctcgaactcctgatctcgggtgatccgcctgcctcggcctcccaaagtgctgggtttacaggcgtgagctactgtgccggccagagctatgagttctttcagaatcctcagatgccattagctagccactgtttggacatccttctcaccttgccctttggggtgatatccatacctacttgcttgcttctaacagtttttttatttgttttgtagagacgggttttggtttattgctcaggctggtttcaaactcctaggctcaagcggtcctcccactgtggcctcccaaagtgctgggtggtgtgagccaccgtgcctggccagttaattttttttagtgtctcttttttgggttctcaccagaaacactatcagcattcccacagatattcctgtgagtctttgaaacattttctatcctgcattgagtaagaataaaaccgaggaaggggtgaagcaccttgtctcatccccagtctggaacttgaaccttcttttctcttcactttgccctacccccaaataatatgtacaaatgtctgtatccattgagcactaactccctattccttccacctccccagcccctggcaaccactgttctacgttctgtctctacgaatttgacttctctaggtccctcatacaagtggaaaagtacagcatgtctttttgtgaccggcttatttcacttagcataatgtcctcaaggttcatccatgctgtagcatgtgtcagaattgccttcttgcttgaggctgctgatacctcctcatgtgtatataccgtattttgtttaatcactcatctgttggtggacacttgggttgcctccacctcttggctgttgcaaataacgctgtgaacatggatatacagatatctgaggccaggccaggcgttcacacctgtaatcccaatacgttgggaggccgaggcgggcagatcatctgaggtcaggattcgagaccaccctggccaacatggcaaaaccccatctctactaaaaatacaaaaattagctgggtgtggtggtgcgcgcctataatcccagctactcgggaggctgaggcaggagaatcttgaactcaggaggtggaggttgcagtgagccgagattgcgccactgcactccagcctgggtgacagagtgagattccgtctcaaaaaaaaaaaaaaacaaaaactcaga

SEQ ID NO: 283271 - DNA, 3367 bp, Homo sapiens
cgcacgttgaatcgcgtggtgactccgggcttgaggttggaattaagaatagtcaggtggtgagtggaacgtctcttggggtgtcggaattcaaaacggacctggaggatgttgatctccaagaacatgccctggcggcggctgcagggcatttccttcgggatgtattcggctgaagagctcaagaaattaagtgttaaatccattacgaaccctcgatacctggacagcctggggaacccatcggcaaacggcctgtacgatttagctttgggccctgcagattccaaagaggtgtgctccacctgcgtgcaggacttcagcaactgttctgggcacctgggccacattgagctcccactcacagtgtataaccctctcctcttcgataagctgtacctgctgcttcggggctcttgtttaaactgccacatgctgacttgtccccgggccgtgattcacctcttactctgccagctgagggttctggaagtcggggccctacaagcagtctacgagcttgagagaattctgaacaggtttctggaagaaaatgccgatccctctgcctctgaaattcgggaggaattagaacaatacacaactgaaattgtgcagaacaacctcctggggtcccagggcgcacatgtaaagaacgtgtgtgagagcaagagcaagctcattgctctcttctggaaggcacatatgaatgctaagcgctgtccccactgcaagaccgggcgatccgttgtccgaaaggaacacaacagcaagttgactatcacatttccagccatggtgcacaggacagctggccagaaggactctgagcccctgggaattgaggaagctcagataggaaaacgaggatacttaacacccaccagtgcccgcgaacacctttctgccctgtggaagaatgaaggattctttctgaactaccttttttcgggaatggatgatgatggtatggaatccagattcaatcccagtgtgttctttctagatttcttggtggtgccgccctcaaggtatcgcccagtcagtcgcctaggagaccagatgtttactaatggccagacggtgaacttgcaggctgtcatgaaggatgtagttctgattcgaaaacttctggcattgatggcccaagaacagaagttgccagaggaagtggccacacccactacagatgaggaaaaagactctttgattgctattgaccgatcctttttgagtacacttccaggccagtccctcatagacaaactttacaacatttggattcgccttcagagccacgtcaatattgtgtttgatagcgagatggacaaactaatgatggacaagtacccaggcattaggcagatcctggagaagaaagaaggcctgttccgaaaacacatgatgggaaagcgagtggactacgctgcgcgctcagtcatctgcccagacatgtacatcaacaccaacgaaattggaattcccatggtgtttgccacaaaactgacctacccacagccagttaccccatggaatgttcaggaacttaggcaagcggtcatcaacggccctaatgtgcacccaggagcctccatggtcatcaatgaggacggcagccgcacagccctgagcgctgtggacatgacccagcgagaggccgtggccaagcagcttctgaccccagccacgggggcacctaagccccaggggacaaaaattgtgtgccggcatgtgaagaatggggacattctgctactgaaccgacagcccacactgcacagaccctccatccaggcccaccgtgcccgcatcctgcctgaagagaaagtgctgcggctccactatgccaactgcaaggcctataatgccgactttgatggagacgagatgaatgcccatttcccccagagtgagctgggccgggccgaggcctacgtcctggcctgcactgatcagcagtaccttgttcccaaggatggccaaccattggcgggactgatccaggatcacatggtttcaggggcaagcatgactactcggggttgctttttcacccgggagcactatatggagctggtgtaccgaggactcacggacaaagtggggcgcgtgaagctcctttctccttccatcctgaagccctttccgctgtggacaggaaaacaggttgtgtcaacgctgctcataaatataatcccagaggaccacatcccactgaacttatctggaaaggcgaaaatcactgggaaagcctgggtgaaggaaactcctcgatccgttcctggctttaaccctgactcgatgtgcgagtcccaggtgatcatcagggaaggggagctgctctgcggagtgctggacaaggcgcactatgggagctccgcctacggcctggtccactgctgctatgagatctatggaggcgagaccagcggcaaggttctaacctgcctggcccgcctcttcaccgcctacctgcagctctacagaggcttcaccttgggcgtggaagacattttggtgaagccaaaggcagatgtcaagaggcaacgtatcattgaagaatccacccactgcgggccccaggctgtcagggctgcattaaacctgccagaagccgcatcatatgatgaggtccgaggaaaatggcaggatgcccatctgggcaaggaccagagggattttaacatgattgatctgaagttcaaggaggaagtgaaccattacagcaatgagattaacaaggcatgcatgccttttggcctacacagacagttcccagagaacacgctgcagctgatggtgcagtcgggagccaaaggttcaactgtgaacacgatgcagatctcgtgcctgctgggccagattgaactggaaggtcggagcaccccgctgatggcgtctggcaagtcactgccctgctttgagccttatgagttcacccccagggctggtggctttgtcactggcaggttcctcaccggcatcaaacctcctgtatgtattttggtttttccatttagctttttccctcatttctaggcttaattgtaggtgaactatgactgccctacagggtagggcagaagacactgggggctattgtagctgtcgaggtcaaaaagtcctaggagatcagggaagggagtggcctgtctggtcaggaaaggctgctggaggtgttggcctgagcccttcaggaagcgcactgtcctcactgtcacctttgacctgggtcccattctctgcaggagttcttcttccactgcatggcaggacgagagggcctggtggacactgctgtgaaaaccagccgctcaggctatctccaaaggtaaaatgtatctgccgtgccccttgaggtagagtg

SEQ ID NO: 283272 - DNA, 2831 bp, Homo sapiens
cacttacggctaggtacgaggctgggtgttgcctgttcttggccgtccacgtttcctctccctctagcaccagcaatacatttccctggcatggacagaaaagacagagaggacttgtacaaaggctttgtaaaaccagaggctagcttctatctttgtctactgttatttcagctcagggcgggtaattaacatcattggaactagctattaggaaagaaaaaaaacttggttttttttacaacaattttttcccttggtttgcagtttctgcatttggatttgagaacccagggcggggattttcttggcacagtcaggtcttgggtccctcttcctgtgctttcttgtctgaggccttagggggaagagctcagcctctgcagcctcctccacctctgcccctggcctgcctctgctgtgacctccttccagagctagctgctggccctgtggccaggagaagcagaggggagaagcctttatgcagaagctgtgctagccttggtctggggtggggaggctgctgctgtgaccttaggggtagggttggggatcaagggaggctttgtcaagggagagtgaccatgttgctccctacatccatgcaataggacccagcctgcacctcctaggcctacactggggaaagcctgacagaaatcagtacctcctaacggggtctgccaggttcaccaaggcatgggcacagaggaatatgacagttttgaggcaggcaggaagggccagcctgcaagggtaagacattcattctttgagttaaaggccatattcacttgatgatttctacacacactagaattgtgagagtgtccttgaaggagatcacaaagtaacctggtgactgtggcacagggtccgtggattccatctctcccaggcactgagggcgcagaggcgaaggagcaagccctgcatattggcagggctgtgaccatcgcacttagatcagacccccgacctgtgttgggatgtgagggatgccctcctgccccacccatccacatggttcctgggcagctctgttttattcctgtgtctttcctgatggatgagtattaagacagcatgtctggtttttaaacagacatttgggagcttgcacatcctgatgagcagggactcactgtggtggccttagggaattacacgctcactttggtggttctctatgctcggaagcctctgagagtggccttggcagcttaagatggcagaggctttggagtcttcttaggactgtaagtgcccattgaggatgcatttgagttttggaaagtaggcccaagtcaaatctgatggatggattcaagaacatggactaatctgcgttgtcatttttaatcaaaatgtaatggagattgatcatctggtggggttcacaaacttttcatgagagctgtgagttctttttttgagatgcacttttgcacttgttacccaggctgagtgcaatggcgcaatctcggctccactgcaacctccatctcccgagttcaagcgattctcctgcctcagcctcccgagtagctgagattgcaggcatgcgccaccacgcctggctaatttttgtattttagtagagatggggtttcaccatgttggccaggctagtctcgaactcctgatctcgggtgatccgcctgcctcggcctcccaaagtgctgggtttacaggcgtgagctactgtgccggccagagctatgagttctttcagaatcctcagatgccattagctagccactgtttggacatccttctcaccttgccctttggggtgatatccatacctacttgcttgcttctaacagtttttttatttgttttgtagagacgggttttggtttattgctcaggctggtttcaaactcctaggctcaagcggtcctcccactgtggcctcccaaagtgctgggtggtgtgagccaccgtgcctggccagttaattttttttagtgtctcttttttgggttctcaccagaaacactatcagcattcccacagatattcctgtgagtctttgaaacattttctatcctgcattgagtaagaataaaaccgaggaaggggtgaagcaccttgtctcatccccagtctggaacttgaaccttcttttctcttcactttgccctacccccaaataatatgtacaaatgtctgtatccattgagcactaactccctattccttccacctccccagcccctggcaaccactgttctacgttctgtctctacgaatttgacttctctaggtccctcatacaagtggaaaagtacagcatgtctttttgtgaccggcttatttcacttagcataatgtcctcaaggttcatccatgctgtagcatgtgtcagaattgccttcttgcttgaggctgctgatacctcctcatgtgtatataccgtattttgtttaatcactcatctgttggtggacacttgggttgcctccacctcttggctgttgcaaataacgctgtgaacatggatatacagatatctgaggccaggccaggcgttcacacctgtaatcccaatacgttgggaggccgaggcgggcagatcatctgaggtcaggattcgagaccaccctggccaacatggcaaaaccccatctctactaaaaatacaaaaattagctgggtgtggtggtgcgcgcctataatcccagctactcgggaggctgaggcaggagaatcttgaactcaggaggtggaggttgcagtgagccgagattgcgccactgcactccagcctgggtgacagagtgagattccgtctcaaaaaaaaaaaaaaacaaaaactcaga

SEQ ID NO: 283273 - DNA, 732 bp, Homo sapiens
cgcacgttgaatcgcgtggtgactccgggcttgaggttggaattaagaatagtcaggtggtgagtggaacgtctcttggggtgtcggaattcaaaacggacctggaggatgttgatctccaagaacatgccctggcggcggctgcagggcatttccttcgggatgtattcggctgaagagctcaagaaattaagtgttaaatccattacgaaccctcgatacctggacagcctggggaacccatcggcaaacggcctgtacgatttagctttgggccctgcagattccaaagaggtgtgctccacctgcgtgcaggacttcagcaactgttctgggcacctgggccacattgagctcccactcacagtgtataaccctctcctcttcgataagctgtacctgctgcttcggggctcttgtttaaactgccacatgctgacttgtccccgggccgtgattcacctcttactctgccagctgagggttctggaagtcggggccctacaagcagtctacgagcttgagagaattctgaacagggtaggtgggtagtggtggtcacagaaatcagaaaaggcaaagtggtgtggggaacaagagatgcttgtatgttgtcctagttaccatgccgatagtcatcagaacgtttgatctttatatcttataactggataccaatagctgagtgtgaaaacaggaagctataagaataataaaagaaatgttcataga

SEQ ID NO: 283274 - DNA, 576 bp, Homo sapiens
actcgggaggctgaggtgggaggatcactggagcccaggagtttgaggctgcagtgagtcgaggttgcaccactacactctagcctgggcaacaggagtgagaccttgttaaaaaaaaaaaaaaaaagacagaataatgctgcctgtgaagcagtcagtgtatagtagatgcttaactcctttttatgaacagtttaccagtgtacttagtgcaagttttgttctaaatctgtttttaagaagttaccactcattcatttagcacatatgtattttatgacttattcatttagcacatatgtatttattaactattgggtaccaactctgcacttagtgttggggtacactagtgagaaagacagattgtgccctccagagctatcaagcaggcattaaataatcacttaactataggtttgtgctggaaaggaaacatcagagaggttggtaactttagctttcctcttggtcttttttatccccttaggaaattaagtgttaaatccattacgaaccctcgatacctggacagcctggggaacccatcggcaaacggcctgtacgatttagctt

SEQ ID NO: 283275 - DNA, 407 bp, Homo sapiens
gagattgatttttgtggtcaagttgcaggcttggggataaagaattgataaatcccattgcagaaagagtacctgtttctgatttattgcactttgattctcctccttggctccaggaattgaggaagctcagataggaaaacgaggatacttaacacccaccagtgcccgcgaacacctttctgccctgtggaagaatgaaggtgctgtatcaggctaaagaaatagccttgatcttctctaggcttttatttcctggactcattaaccctgccttattacttcttttaagttgtaatgattgtagcttcctcctggaactgatccagaggtttggggcagtcttcagggcacattgacattgagtcatagagcaggagaggtcatacccagcaccaaaaacttga

SEQ ID NO: 283276 - DNA, 7649 bp, Homo sapiens
cgcacgttgaatcgcgtggtgactccgggcttgaggttggaattaagaatagtcaggtggtgagtggaacgtctcttggggtgtcggaattcaaaacggacctggaggatgttgatctccaagaacatgccctggcggcggctgcagggcatttccttcgggatgtattcggctgaagagctcaagaaattaagtgttaaatccattacgaaccctcgatacctggacagcctggggaacccatcggcaaacggcctgtacgatttagctttgggccctgcagattccaaagaggtgtgctccacctgcgtgcaggacttcagcaactgttctgggcacctgggccacattgagctcccactcacagtgtataaccctctcctcttcgataagctgtacctgctgcttcggggctcttgtttaaactgccacatgctgacttgtccccgggccgtgattcacctcttactctgccagctgagggttctggaagtcggggccctacaagcagtctacgagcttgagagaattctgaacaggtttctggaagaaaatgccgatccctctgcctctgaaattcgggaggaattagaacaatacacaactgaaattgtgcagaacaacctcctggggtcccagggcgcacatgtaaagaacgtgtgtgagagcaagagcaagctcattgctctcttctggaaggcacatatgaatgctaagcgctgtccccactgcaagaccgggcgatccgttgtccgaaaggaacacaacagcaagttgactatcacatttccagccatggtgcacaggacagctggccagaaggactctgagcccctgggaattgaggaagctcagataggaaaacgaggatacttaacacccaccagtgcccgcgaacacctttctgccctgtggaagaatgaaggattctttctgaactaccttttttcgggaatggatgatgatggtatggaatccagattcaatcccagtgtgttctttctagatttcttggtggtgccgccctcaaggtatcgcccagtcagtcgcctaggagaccagatgtttactaatggccagacggtgaacttgcaggctgtcatgaaggatgtagttctgattcgaaaacttctggcattgatggcccaagaacagaagttgccagaggaagtggccacacccactacagatgaggaaaaagactctttgattgctattgaccgatcctttttgagtacacttccaggccagtccctcatagacaaactttacaacatttggattcgccttcagagccacgtcaatattgtgtttgatagcgagatggacaaactaatgatggacaagtacccaggcattaggcagatcctggagaagaaagaaggcctgttccgaaaacacatgatgggaaagcgagtggactacgctgcgcgctcagtcatctgcccagacatgtacatcaacaccaacgaaattggaattcccatggtgtttgccacaaaactgacctacccacagccagttaccccatggaatgttcaggaacttaggcaagcggtcatcaacggccctaatgtgcacccaggagcctccatggtcatcaatgaggacggcagccgcacagccctgagcgctgtggacatgacccagcgagaggccgtggccaagcagcttctgaccccagccacgggggcacctaagccccaggggacaaaaattgtgtgccggcatgtgaagaatggggacattctgctactgaaccgacagcccacactgcacagaccctccatccaggcccaccgtgcccgcatcctgcctgaagagaaagtgctgcggctccactatgccaactgcaaggcctataatgccgactttgatggagacgagatgaatgcccatttcccccagagtgagctgggccgggccgaggcctacgtcctggcctgcactgatcagcagtaccttgttcccaaggatggccaaccattggcgggactgatccaggatcacatggtttcaggggcaagcatgactactcggggttgctttttcacccgggagcactatatggagctggtgtaccgaggactcacggacaaagtggggcgcgtgaagctcctttctccttccatcctgaagccctttccgctgtggacaggaaaacaggttgtgtcaacgctgctcataaatataatcccagaggaccacatcccactgaacttatctggaaaggcgaaaatcactgggaaagcctgggtgaaggaaactcctcgatccgttcctggctttaaccctgactcgatgtgcgagtcccaggtgatcatcagggaaggggagctgctctgcggagtgctggacaaggcgcactatgggagctccgcctacggcctggtccactgctgctatgagatctatggaggcgagaccagcggcaaggttctaacctgcctggcccgcctcttcaccgcctacctgcagctctacagaggcttcaccttgggcgtggaagacattttggtgaagccaaaggcagatgtcaagaggcaacgtatcattgaagaatccacccactgcgggccccaggctgtcagggctgcattaaacctgccagaagccgcatcatatgatgaggtccgaggaaaatggcaggatgcccatctgggcaaggaccagagggattttaacatgattgatctgaagttcaaggaggaagtgaaccattacagcaatgagattaacaaggcatgcatgccttttggcctacacagacagttcccagagaacacgctgcagctgatggtgcagtcgggagccaaaggttcaactgtgaacacgatgcagatctcgtgcctgctgggccagattgaactggaaggtcggagcaccccgctgatggcgtctggcaagtcactgccctgctttgagccttatgagttcacccccagggctggtggctttgtcactggcaggttcctcaccggcatcaaacctcctgagttcttcttccactgcatggcaggacgagagggcctggtggacactgctgtgaaaaccagccgctcaggctatctccaaaggtgcatcatcaagcacctagaggggctggtcgtgcagtatgatctcacggtccgtgacagtgacggcagtgtggtgcagttcctgtatggggaggatggcctggacatccccaagacacagttcctgcagcccaagcagttccccttcctggccagcaactacgaggtgataatgaaatcacagcatctccatgaagttttatccagagcagatcccaaaaaagctctccaccacttcagagctatcaaaaaatggcaaagcaagcaccccaacaccctgctgagaagaggcgccttcttgagttattcccagaaaattcaggaagctgtgaaagccctgaaacttgagagtgaaaaccgcaatggccgcagccctgggactcaggagatgctgaggatgtggtatgagttggatgaggaaagccgaaggaaataccagaagaaggcggccgcttgtcctgaccccagtctgtctgtctggcgtcctgacatctactttgcatcagtgtcagaaacatttgaaacaaaggttgatgactacagtcaagagtgggcagctcaaacagagaagagttatgagaaatcagagctttctctcgacaggttgaggaccttgctgcagctgaagtggcagcgctcactgtgtgagccgggcgaggctgtgggcctgctggctgcccagagcatcggagagccctccacccagatgaccctcaacaccttccactttgcaggcagaggcgagatgaacgtcaccctgggcattccaaggttgcgggagattctcatggtggccagcgccaacatcaagacacccatgatgagcgtgcccgtgctcaacaccaagaaagccctgaagagagtgaaaagcctgaagaagcaactcaccagggtgtgcttgggggaggtgttgcagaaaattgacgtccaggagtccttctgtatggaagaaaaacagaacaaattccaggtgtaccagctgcggtttcagttcctgccacatgcatattaccagcaggagaagtgcctgagacccgaggacatcctgcgcttcatggaaacaagattctttaaacttctgatggaatccatcaaaaagaagaataataaagcatcagctttcaggaacgtaaacactcgaagagctacacagcgggatctggacaacgctggggagttggggaggagtcggggagagcaggagggtgatgaggaagaggaggggcacattgtggatgctgaagctgaggagggagacgccgatgcctctgatgccaaacgcaaggagaagcaggaggaggaggttgattatgagagtgaggaagaggaggagagggagggcgaggagaacgacgatgaagacatgcaggaggaacgaaatccccacagggaaggtgctcgaaagacccaagagcaagatgaagaggtgggcttaggcactgaggaggacccgtcccttcccgccctcctgacgcagccccggaaacccacccacagccaggagccccaggggcccgaggccatggagcgccgggtccaggctgtgcgtgagatccacccgttcatagatgactaccagtacgacaccgaggagagcctgtggtgccaggtgacagtgaagctccctctgatgaagatcaactttgacatgagctccctggtagtatctttggcccatggtgccgtcatctatgcgaccaagggcatcactcggtgcctcctgaatgaaacaaccaacaataagaacgagaaggagcttgtgctaaacacagaaggaatcaacctcccagagctattcaagtatgcagaggtcctggatctgcgccgcctctactccaacgacatccacgccatagccaacacgtatggcattgaggccgcgctgcgggtgatcgagaaggagatcaaggatgtgtttgccgtgtatggcatcgcggtcgaccctcgccatctctccctggttgctgattatatgtgcttcgagggtgtttacaagccactgaatcgctttgggatccggtcaaactcttccccgctacagcagatgacatttgaaaccagcttccagtttctgaagcaagccaccatgctgggatcccacgatgagctgaggtctccttctgcctgccttgtggtcgggaaggtcgtcaggggcgggacaggcctgttcgagctcaagcagcctctgagatagcagctaccccggcaccatctgcccagctccaaggacccttggtgagggcgtggcccagcctgccttctgcatgagaggaccaggagactggaatccagggcagttccaagtgacagtacagagcacagcagcgaccttgggcctgaaagcagtgggcctctgagctgggccagcttcacctggaaagtgacagagttgctcatccttgcccctccctgtctctggatttttatcaaggtttaccaagtcttctgagtccccctgagatggctggggcctcacctgtgctgcaggaggcctctgtggcataacccctaaggagaagtcctgattcacgattcactgagaagaccaaggggaagccatgctttgctgctggggaccccaggcacctccagagtagggaagcggggttcttttgctgtgagtggccagggacaacagacaagattcctgggggctcccgatgagcaggaacgtggagcctgctgcccaaggcctgctccttccggctgctccagcccctgggggcagagtccacaaagagtccccatcaagacttcttccctgagtcaagtacagcgtagcatagtcctccacccacccaacctctctgcctggccagggtcctggccctgccactgtgtggcgaggtgtccttctagaccacatcagccccaaggctgggagcagtcgctccagggccgcagcagttcactcccacacatagaacccaggtcactgctggggcgattgaacaggttgcctggcttttctctgctgtcagtttggtgtggaggcctatgttctgccccatacaccccacaggccctgcttatgggaaggaacacaggcctccagcccagaggactgtgccgccctgttcttggccgtccacgtttcctctccctctagcaccagcaatacatttccctggcatggacagaaaagacagagaggacttgtacaaaggctttgtaaaaccagaggctagcttctatctttgtctactgttatttcagctcagggcgggtaattaacatcattggaactagctattaggaaagaaaaaaaacttggttttttttacaacaattttttcccttggtttgcagtttctgcatttggatttgagaacccagggcggggattttcttggcacagtcaggtcttgggtccctcttcctgtgctttcttgtctgaggccttagggggaagagctcagcctctgcagcctcctccacctctgcccctggcctgcctctgctgtgacctccttccagagctagctgctggccctgtggccaggagaagcagaggggagaagcctttatgcagaagctgtgctagccttggtctggggtggggaggctgctgctgtgaccttaggggtagggttggggatcaagggaggctttgtcaagggagagtgaccatgttgctccctacatccatgcaataggacccagcctgcacctcctaggcctacactggggaaagcctgacagaaatcagtacctcctaacggggtctgccaggttcaccaaggcatgggcacagaggaatatgacagttttgaggcaggcaggaagggccagcctgcaagggtaagacattcattctttgagttaaaggccatattcacttgatgatttctacacacactagaattgtgagagtgtccttgaaggagatcacaaagtaacctggtgactgtggcacagggtccgtggattccatctctcccaggcactgagggcgcagaggcgaaggagcaagccctgcatattggcagggctgtgaccatcgcacttagatcagacccccgacctgtgttgggatgtgagggatgccctcctgccccacccatccacatggttcctgggcagctctgttttattcctgtgtctttcctgatggatgagtattaagacagcatgtctggtttttaaacagacatttgggagcttgcacatcctgatgagcagggactcactgtggtggccttagggaattacacgctcactttggtggttctctatgctcggaagcctctgagagtggccttggcagcttaagatggcagaggctttggagtcttcttaggactgtaagtgcccattgaggatgcatttgagttttggaaagtaggcccaagtcaaatctgatggatggattcaagaacatggactaatctgcgttgtcatttttaatcaaaatgtaatggagattgatcatctggtggggttcacaaacttttcatgagagctgtgagttctttttttgagatgcacttttgcacttgttacccagtgcactccagcctgggtgacagagtgagattccgtctcaaaaaaaaaaaaaaacaaaaactcaga

SEQ ID NO: 283277 - DNA, 4151 bp, Homo sapiens
agagagagagcggccagggggagatacgcaggcagaagggagcagaaggccaggccctctaaataaatcccttccttcctctctccaggtcctggatctgcgccgcctctactccaacgacatccacgccatagccaacacgtatggcattgaggccgcgctgcgggtgatcgagaaggagatcaaggatgtgtttgccgtgtatggcatcgcggtcgaccctcgccatctctccctggttgctgattatatgtgcttcgagggtgtttacaagccactgaatcgctttgggatccggtcaaactcttccccgctacagcagatgacatttgaaaccagcttccagtttctgaagcaagccaccatgctgggatcccacgatgagctgaggtctccttctgcctgccttgtggtcgggaaggtcgtcaggggcgggacaggcctgttcgagctcaagcagcctctgagatagcagctaccccggcaccatctgcccagctccaaggacccttggtgagggcgtggcccagcctgccttctgcatgagaggaccaggagactggaatccagggcagttccaagtgacagtacagagcacagcagcgaccttgggcctgaaagcagtgggcctctgagctgggccagcttcacctggaaagtgacagagttgctcatccttgcccctccctgtctctggatttttatcaaggtttaccaagtcttctgagtccccctgagatggctggggcctcacctgtgctgcaggaggcctctgtggcataacccctaaggagaagtcctgattcacgattcactgagaagaccaaggggaagccatgctttgctgctggggaccccaggcacctccagagtagggaagcggggttcttttgctgtgagtggccagggacaacagacaagattcctgggggctcccgatgagcaggaacgtggagcctgctgcccaaggcctgctccttccggctgctccagcccctgggggcagagtccacaaagagtccccatcaagacttcttccctgagtcaagtacagcgtagcatagtcctccacccacccaacctctctgcctggccagggtcctggccctgccactgtgtggcgaggtgtccttctagaccacatcagccccaaggctgggagcagtcgctccagggccgcagcagttcactcccacacatagaacccaggtcactgctggggcgattgaacaggttgcctggcttttctctgctgtcagtttggtgtggaggcctatgttctgccccatacaccccacaggccctgcttatgggaaggaacacaggcctccagcccagaggactgtgccgccctgttcttggccgtccacgtttcctctccctctagcaccagcaatacatttccctggcatggacagaaaagacagagaggacttgtacaaaggctttgtaaaaccagaggctagcttctatctttgtctactgttatttcagctcagggcgggtaattaacatcattggaactagctattaggaaagaaaaaaaacttggttttttttacaacaattttttcccttggtttgcagtttctgcatttggatttgagaacccagggcggggattttcttggcacagtcaggtcttgggtccctcttcctgtgctttcttgtctgaggccttagggggaagagctcagcctctgcagcctcctccacctctgcccctggcctgcctctgctgtgacctccttccagagctagctgctggccctgtggccaggagaagcagaggggagaagcctttatgcagaagctgtgctagccttggtctggggtggggaggctgctgctgtgaccttaggggtagggttggggatcaagggaggctttgtcaagggagagtgaccatgttgctccctacatccatgcaataggacccagcctgcacctcctaggcctacactggggaaagcctgacagaaatcagtacctcctaacggggtctgccaggttcaccaaggcatgggcacagaggaatatgacagttttgaggcaggcaggaagggccagcctgcaagggtaagacattcattctttgagttaaaggccatattcacttgatgatttctacacacactagaattgtgagagtgtccttgaaggagatcacaaagtaacctggtgactgtggcacagggtccgtggattccatctctcccaggcactgagggcgcagaggcgaaggagcaagccctgcatattggcagggctgtgaccatcgcacttagatcagacccccgacctgtgttgggatgtgagggatgccctcctgccccacccatccacatggttcctgggcagctctgttttattcctgtgtctttcctgatggatgagtattaagacagcatgtctggtttttaaacagacatttgggagcttgcacatcctgatgagcagggactcactgtggtggccttagggaattacacgctcactttggtggttctctatgctcggaagcctctgagagtggccttggcagcttaagatggcagaggctttggagtcttcttaggactgtaagtgcccattgaggatgcatttgagttttggaaagtaggcccaagtcaaatctgatggatggattcaagaacatggactaatctgcgttgtcatttttaatcaaaatgtaatggagattgatcatctggtggggttcacaaacttttcatgagagctgtgagttctttttttgagatgcacttttgcacttgttacccaggctgagtgcaatggcgcaatctcggctccactgcaacctccatctcccgagttcaagcgattctcctgcctcagcctcccgagtagctgagattgcaggcatgcgccaccacgcctggctaatttttgtattttagtagagatggggtttcaccatgttggccaggctagtctcgaactcctgatctcgggtgatccgcctgcctcggcctcccaaagtgctgggtttacaggcgtgagctactgtgccggccagagctatgagttctttcagaatcctcagatgccattagctagccactgtttggacatccttctcaccttgccctttggggtgatatccatacctacttgcttgcttctaacagtttttttatttgttttgtagagacgggttttggtttattgctcaggctggtttcaaactcctaggctcaagcggtcctcccactgtggcctcccaaagtgctgggtggtgtgagccaccgtgcctggccagttaattttttttagtgtctcttttttgggttctcaccagaaacactatcagcattcccacagatattcctgtgagtctttgaaacattttctatcctgcattgagtaagaataaaaccgaggaaggggtgaagcaccttgtctcatccccagtctggaacttgaaccttcttttctcttcactttgccctacccccaaataatatgtacaaatgtctgtatccattgagcactaactccctattccttccacctccccagcccctggcaaccactgttctacgttctgtctctacgaatttgacttctctaggtccctcatacaagtggaaaagtacagcatgtctttttgtgaccggcttatttcacttagcataatgtcctcaaggttcatccatgctgtagcatgtgtcagaattgccttcttgcttgaggctgctgatacctcctcatgtgtatataccgtattttgtttaatcactcatctgttggtggacacttgggttgcctccacctcttggctgttgcaaataacgctgtgaacatggatatacagatatctgaggccaggccaggcgttcacacctgtaatcccaatacgttgggaggccgaggcgggcagatcatctgaggtcaggattcgagaccaccctggccaacatggcaaaaccccatctctactaaaaatacaaaaattagctgggtgtggtggtgcgcgcctataatcccagctactcgggaggctgaggcaggagaatcttgaactcaggaggtggaggttgcagtgagccgagattgcgccactgcactccagcctgggtgacagagtgagattccgtctcaaaaaaaaaaaaaaacaaaaactcaga

SEQ ID NO: 283278 - DNA, 1458 bp, Homo sapiens
cgcacgttgaatcgcgtggtgactccgggcttgaggttggaattaagaatagtcaggtggtgagtggaacgtctcttggggtgtcggaattcaaaacggacctggaggatgttgatctccaagaacatgccctggcggcggctgcagggcatttccttcgggatgtattcggctgaagagctcaagaaattaagtgttaaatccattacgaaccctcgatacctggacagcctggggaacccatcggcaaacggcctgtacgatttagctttgggccctgcagattccaaagaggtgtgctccacctgcgtgcaggacttcagcaactgttctgggcacctgggccacattgagctcccactcacagtgtataaccctctcctcttcgataagctgtacctgctgcttcggggctcttgtttaaactgccacatgctgacttgtccccgggccgtgattcacctcttactctgccagctgagggttctggaagtcggggccctacaagcagtctacgagcttgagagaattctgaacaggtttctggaagaaaatgccgatccctctgcctctgaaattcgggaggaattagaacaatacacaactgaaattgtgcagaacaacctcctggggtcccagggcgcacatgtaaagaacgtgtgtgagagcaagagcaagctcattgctctcttctggaaggcacatatgaatgctaagcgctgtccccactgcaagaccgggcgatccgttgtccgaaaggaacacaacagcaagttgactatcacatttccagccatggtgcacaggacagctggccagaaggactctgagcccctgggaattgaggaagctcagataggaaaacgaggatacttaacacccaccagtgcccgcgaacacctttctgccctgtggaagaatgaaggtgctgtatcaggctaaagaaatagccttgatcttctctaggcttttatttcctggactcattaaccctgccttattacttcttttaagttgtaatgattgtagcttcctcctggaactgatccagaggtttggggcagtcttcagggcacattgacattgagtcatagagcaggagaggtcatacccagcaccaaaaacttgacaattatcgcagctgagcctggttatgaaatgacaactgcaggtgggcctcacttaatacaggttggcatatttttagaaggttcagtgtaacttattttaaatgcccgtaagtaaaatgctttgtccttctgtgaatcaaagaatgaactctgtcttatttaaattgggactttactataagggaaatccttctttccttttgagtgtataacaaaacctacgcagtatattcaagcccttgtgagagtatgttgtggaacgctgactataacctctgtgtaataagcgcttacaaatgaacatgttgttaaagaggtatcagaaaaa

SEQ ID NO: 283279 - DNA, 368 bp, Homo sapiens
ctgcttcagattttgtttaaatataagaactggaaaaccaaagctttgtcatctctaaaacaccttcactgagaaacgaagtgtccttctcatcccatggggctgttctgggtatcaagtgactgtttagcttggccatttgctgctcctacctcaaatagaaggttggaatgcactgttgcacacatccgatttcaatttacaaaactggaattaaaccgtatgcaatgtaccttttaaaacttaacattatactaagtatattttgacacataattacacatcctttgaaactgcatataattccaccatagaggtgtatcataatttatgattggacattttgattaaaagccagcaatacaaac

SEQ ID NO: 283280 - DNA, 2369 bp, Homo sapiens
ccggctccgggcccggaggggtgcggcgggggcaggcggggaaggaccacgtgccttcggagagaggggttggaagcaatagagaagtagacttaaggggaaaccagcaaggggaaggagaggcccgggaacgcagcagggcgagttgttttgctccactcgtccaggaagccctagatgccgggggttcagggtcgaggctgcgttaaagtaacgttcttttctccccgggcgcgccctgtcttcctgggcattccttgcgctctccgttcgctttgcagagagatctgagcttcgctgtctcccggtcggacgctcgcagctgcgttcccgggctggggctccgtgccgtccagggccgggtctgggggccaggacctgctgggatgacgtgagttgaggaggctcagcggaaagcgacaggaaagtaagctctctgaagtcaagaaccatagttgttttgttcactactgtatactcagcacctaatagtacttggcacataagtactcagggactatttgtcaaatgcaagaacatatgcccctaaagcagaagtcaggaaaaccagaaaaaatgcctttaagtattacagaaatgccacaggcctccacttaaattgaaaagcaagctaacccctcttgataaaaatgtggattgagatcaagaagcagcttctctgctccttctggaatctccacctggtttagcctgctgcctccactcctgcctccaccatgtccatcagggtgatccagaagtcctacaaggtgtccacctttggcccccaggctttcagcagccacccctacactagtgggcccagtgcctgcaccagctccttgagcttctccctagtggggagcttcactgtgcagcttctggggtggcctgggcggaggctatggtggggccagcagtatgcgaggcatcaccaccatcacggtaaaccagagcctgctgagcccccttaacctggaggtggactccaacatccaggctgtatacacccaggagaaggagcagatcaagaccctcaacaacaagtttgcctccttcacagaccaggtatggttcctggagcagcagaacaaggtgctggagaccaagtggagccttctgcagcagcacaagatggctgggagcaacatggacaacatgttcgggagctatatcaacaaccttaggcggctgctggagccaggagaagctgaggctggaagcggagcttggcaacatgcaggggctggtggaggacttcaggaacaagtatgaggatgagatcaataagcctacagagatggagaattaatttgtcctcatcaagaaggatgtggatgaaacttacatgaacaacgtagagctggagtctcacctggaagggccgactgtatgaagtggagatccgggagctgcagtcccagatctccaacatgtctgtggtgctgtccatggacagcagccactcctggacatggacagcatcatcactgaggtaaagaggcagtacaaggaggttgccaactgcagccgggctgaggctgagagcacgtaccagatcaagtatgtggagctgcagacgctggctaggaagcacagggatgacctgcggcatacaaagactcagatctccaagatgaaccggaacatcagccagctccaggctgagattgagggcctccaaggccagggggcttccctggaggccaccatcccagatgctgagcatcgtggggagctggccgttaaggatgccaatgccaagctctccaagctggaggccactctgcaacgtgtgagtaccaggagctgatgaaagtcaagctggcctggaaatggaggtcgccacctacagaaagctgcgggagagctaggagagccagctggagtctgggatgcagaacatgagtatccatacgaagaccaccagcggctatgcaggtgatctgagctcggcctatgtgggcctcacaactcgtgacctcagctatggcctgggctccagctttggctctggcacaggcttcagctccttcaggtgcaccagctccaccagggccgtggttgtgaagaagatcgagacccgcgatgggaagctggtgtctgagtcctctgacttcctgcccaagtgaacaactgtggcagctcctcctagtctgcccctcccgtggctgccacagactccaggagggaggctgctgtgtggggaagcacagacaacaggagaccccccacctgaggctcaacccacccgtgggggagtttactgtctggggaccccccttgcccatgcttccagctagaaaacaattgtggtttttttttggtccaaaataaaacctcagctagctccaccaaaaaaaaaaaaa

SEQ ID NO: 283281 - DNA, 1546 bp, Homo sapiens
ccggctccgggcccggaggggtgcggcgggggcaggcggggaaggaccacgtgccttcggagagaggggttggaagcaatagagaagtagacttaaggggaaaccagcaaggggaaggagaggcccgggaacgcagcagggcgagttgttttgctccactcgtccaggaagccctagatgccgggggttcagggtcgaggctgcgttaaagtaacgttcttttctccccgggcgcgccctgtcttcctgggcattccttgcgctctccgttcgctttgcagagagatctgagcttcgctgtctcccggtcggacgctcgcagctgcgttcccgggctggggctccgtgccgtccagggccgggtctgggggccaggacctgctgggatgacgtgagttgaggaggctcagcggaaagcgacaggaaaggtgggtggaaaaggaaagggcccattagacgaatctgattcatcttctgtgactaagcacccgcaacagttaggaatttaggcagagctggtgatcctgggacaatagcacttcctaggtaattcgtcttaaaaagttaaagaagctgcttgaccacaaagtatgaacttctggagggcggggcccgtggcagctgacagggaatattgtgtgttgagaaaggaaatgagttccaaggataccaaggacaacgttaccagaggcagaaatgacacgagatacaaaagaacgtattcaaaaatttaacaaaacagaaatggaaaattattttaaaatatattgaaatatcaacgaataacacctcaaatgtacagggatatgtaaagcagcaactcgggtcggaagcaaggaatcgaggcgttgggtgtgtttaaacttgacgaggtagggagaagagaccctgatacaaactccttcagaatcgttgactctcggtcctttctagtatatttttttagtagaacaacgtgcagataagtgtttaaaatgcagatcttcctaaggaaacacttttaaaggcaacagaggggaatttttttttaagttaaaatggaagaagttagtgggtttaacagatatgaacaactgagtttcctttgggggagaggcaatgaaaagagccggagtactttagggatcactttggagaggatattgtagtgggggaaaggaaggtaaaaacttaggaagcagagtagtacctttaaagtcgtcagtactttatataccatcaactgggctatggacaacagaagctgtgcctggaaataactcacactgaaggttaacttgaatataaatttagaacagatcttaaatacaaatgatgatgttcattataaactgttattcttcaaagactcatttaactgaagtaacattgtatttgcataccagagcactggtgtttttcaaaatgagtttaggataagaaaattcacttgaaaagctggagtatgtatgtattttgcgccatcatggattttatcataagcagtgttcaagaaaacaaattaccagcgaattcccaccctaaccccgaggttcgctgtacttcc

SEQ ID NO: 283282 - DNA, 2273 bp, Homo sapiens
cccccccgccctaaccccagcgcgactgcagctccggcaaagacaactgtggggccgggcggcggcaaggcgacggaatgtgctgccggctgagagggggaggcagcctcgatctgagggccaccggcgctgcggccacgcccatcgcctccagcccggctcgcccattggctaaccaggctccgagagatctgagcttcgctgtctcccggtcggacgctcgcagctgcgttcccgggctggggctccgtgccgtccagggccgggtctgggggccaggacctgctgggatgacgtgagttgaggaggctcagcggaaagcgacaggaaagtaagctctctgaagtcaagaaccatagttgttttgttcactactgtatactcagcacctaatagtacttggcacataagtactcagggactatttgtcaaatgcaagaacatatgcccctaaagcagaagtcaggaaaaccagaaaaaatgcctttaagtattacagaaatgccacaggcctccacttaaattgaaaagcaagctaacccctcttgataaaaatgtggattgagatcaagaagcagcttctctgctccttctggaatctccacctggtttagcctgctgcctccactcctgcctccaccatgtccatcagggtgatccagaagtcctacaaggtgtccacctttggcccccaggctttcagcagccacccctacactagtgggcccagtgcctgcaccagctccttgagcttctccctagtggggagcttcactgtgcagcttctggggtggcctgggcggaggctatggtggggccagcagtatgcgaggcatcaccaccatcacggtaaaccagagcctgctgagcccccttaacctggaggtggactccaacatccaggctgtatacacccaggagaaggagcagatcaagaccctcaacaacaagtttgcctccttcacagaccaggtatggttcctggagcagcagaacaaggtgctggagaccaagtggagccttctgcagcagcacaagatggctgggagcaacatggacaacatgttcgggagctatatcaacaaccttaggcggctgctggagccaggagaagctgaggctggaagcggagcttggcaacatgcaggggctggtggaggacttcaggaacaagtatgaggatgagatcaataagcctacagagatggagaattaatttgtcctcatcaagaaggatgtggatgaaacttacatgaacaacgtagagctggagtctcacctggaagggccgactgtatgaagtggagatccgggagctgcagtcccagatctccaacatgtctgtggtgctgtccatggacagcagccactcctggacatggacagcatcatcactgaggtaaagaggcagtacaaggaggttgccaactgcagccgggctgaggctgagagcacgtaccagatcaagtatgtggagctgcagacgctggctaggaagcacagggatgacctgcggcatacaaagactcagatctccaagatgaaccggaacatcagccagctccaggctgagattgagggcctccaaggccagggggcttccctggaggccaccatcccagatgctgagcatcgtggggagctggccgttaaggatgccaatgccaagctctccaagctggaggccactctgcaacgtgtgagtaccaggagctgatgaaagtcaagctggcctggaaatggaggtcgccacctacagaaagctgcgggagagctaggagagccagctggagtctgggatgcagaacatgagtatccatacgaagaccaccagcggctatgcaggtgatctgagctcggcctatgtgggcctcacaactcgtgacctcagctatggcctgggctccagctttggctctggcacaggcttcagctccttcaggtgcaccagctccaccagggccgtggttgtgaagaagatcgagacccgcgatgggaagctggtgtctgagtcctctgacttcctgcccaagtgaacaactgtggcagctcctcctagtctgcccctcccgtggctgccacagactccaggagggaggctgctgtgtggggaagcacagacaacaggagaccccccacctgaggctcaacccacccgtgggggagtttactgtctggggaccccccttgcccatgcttccagctagaaaacaattgtggtttttttttggtccaaaataaaacctcagctagctccaccaaaaaaaaaaaaa

SEQ ID NO: 283283 - DNA, 1209 bp, Homo sapiens
gcggccgcgggtgctgccggggggcgcggcgggcgcagcagagcggcgggcggcggcggcgtcgtcgagcgcagacaatacaagcgcctcggaccgagtccccgaacctgccctagccaaaatggcggccgagaaagagcggaagtgacacagggtctcactctgttgtccaggcatgatcacagctcactgcagccttgacctcccagactcaagtgaacctcccacctcagcctcccaagtagctgggaccacaggaaatggacatatggaactcatcattcattttaaagtatggtggccattggcggtgacaaaaggaaaagaagcaaagagactcagtccataatgctgattagttagaagaaagggctaggattgagaaagtaccaggaacttttaattatttaaaagagaatgctgactgttaatgttttaaatcttactgttcaaatgtactaatatgaatttttaccctttgtgcatgaatattctaaacaactagaagacctccacaatttagcagttatgaaagttaaactttttattataaaaattctaaaccttactgctcctttaccaggaacatgacacactatttagcatcagttgcatacctcgccaatagtataattcaactgtcttgcccgaacaatcatctccatctggaagacgtagcctttagaaacacatttttctattaatttctctagaacttcttttcggtataatctgtaagaaattaaaaatatatatcaacttctggataaatacacatgcctatgtatcctgacctttcaaagagttcactggtatgtataaagcctaaaactttcactggccattggtaaacagaaaagctcgcacacttgatgattatgatacatttgtcctaagcaagaaaggccattaaatatttgctaaataacttagaataattgtgaaaatgaattctcagttatctttttatagaattattttcccaccatactatcagaaattagtgaaatacggtaaaatgaatcatttgatgcagaaccatccattatttaagatttccctaaaatttaaagttgaaagaaactgttccaaatattgaacaacagggtggacagatgatcatgaagcaactatatatgttagatgacaagaaagaacctcataattcacagtcattttccaataaatgtttatgatgaattttgattt

SEQ ID NO: 283284 - DNA, 412 bp, Homo sapiens
ctcctctcgctcctcagcagcggggaccgagagagggagctgtgtctgagaagacgccaaaatcccccttagcgctgcctgcgggagggggagggggcacaagatggcggcggccgggggggggggggcgggagttcagctcatggatcccggcgggcggcggaggggagaccgggccggcggaggcggcggcggcaacgggcgggggagggggctgatcccgcgtctcccctcagcagacaatacaagcgcctcggaccgagtccccgaacctgccctagccaaaatggcggccgagaaagagcggaagtgacgtaagtgcctcattagcataagaggactcattgtccagctaaataggggggggcagtggggacagcacccctaacccccttttccccagggggggttc

SEQ ID NO: 283285 - DNA, 473 bp, Homo sapiens
actattaaatgaggagagtcttccctaccctaagagctcactaacgagccctaaatattacagatcaccacctccttgctctgtaattcctggtcttctcttactaacaggaaatggacatatggaactcatcattcattttaaagtatggtggccattggcggtgacaaaaggaaaagaagcaaagagactcagtccataatgctgattagttagaagaaagggctaggattgagaaagtaccaggaacttttaattatttaaaagagaatgctgactgttaatgttttaaatcttactgttcaaatgtactaatatgaatttttaccctttgtgcatgaatattctaaacaactagaagacctccacaatttagcagttatgaaagttaaactttttattataaaaattctaaaccttactgctcctttaccaggaacatgacacactatttagcatcagttgcatacctc

SEQ ID NO: 283286 - DNA, 318 bp, Homo sapiens
atcccgcgtctcccctcagcagacaatacaagcgcctcggaccgagtccccgaacctgccctagccaaaatggcggccgagaaagagcggaagtgacgtaagtgcctcattagcataagaggactcattgtccagctaaataggggggggcagtggggacagcacccctaacccccttttccccagggggggttcctcttactcccacccctgcttgcacctaacttttcctgagggagggtgctctcagcacccccacccccgcttgagggaaattatataatccccactgaggggggagctctcgcgagaaccagg

SEQ ID NO: 283287 - DNA, 928 bp, Homo sapiens
gcggccgcgggtgctgccggggggcgcggcgggcgcagcagagcggcgggcggcggcggcgtcgtcgagcgcagacaatacaagcgcctcggaccgagtccccgaacctgccctagccaaaatggcggccgagaaagagcggaagtgacgttaaagaggcttttgtatactggagatataaccaaaaaaggtctaaggtgactttacgcagagattgaaggatgagcagcagatggtcatcaaggagcatggaaacagcatttcaggcaaaggaaaatggaactctgtgaactcagaagcatgctatggcatggaaagcaaaaaggaaggagcacaaggcagaggtcagaaagggaggcaggggccaacaaacacataggggcttgagggacaagggaaggaacttggatttttccctagatgttagtgggaactccctgaactccctgaactggagggacaataatctgattctgtttttatgtatctagcttaaactcagaacagcttccaaaatcttattcacagaggttttgtggtcttttgggctaagaatttaattatattgcctacaaacaaatataactgtgtatattttactaacatttaactaaattcttatcttactgtattaacatttccatgtttaatgatagctagcatgcctgtattaatgcatgtattggaaatgattcagcatttcactatttggtgtggtatttgtattaggactgggttatttttattatgcttaagaggtttccttctattcttaaagttttaactagaaaatggtagtaaataatatctcctttagcatctacagacttaaccacactactttgttaacataatgaatgaattataagtgattaccaataatgagccattctggcattcctggaataaacccttttgttcacggtgt

SEQ ID NO: 283288 - DNA, 1440 bp, Homo sapiens
aacgcgatccattcggctagtacgagccgcaggttaatcggcacgagggcttctctctggcccgagccagcatgatccgctgggcccccagcgcatctcctggaagagcccactcaccctggacgagctcttcggtagcctcagaccgtccttgaagaggatgactgagacattatgggccacgcgctgtgtgtctgctctcggggaactgtcatcattgacaataagcgctacctcttcatccagaaactgggggagggtgggttcagctatgtggacctagtggaagggttacatgatggacacttctacgccctgaagcgaatcctgtgtcacgagcagcaggaccgggaggaggcccagcgagaagccgacatgcatcgcctcttcaatcaccccaacatccttcgcctcgtggcttactgtctgagggaacggggtgctaagcatgaggcctggctgctgctaccattcttcaagagaggtacgctgtggaatgagatagaaaggctgaaggacaaaggcaacttcctgaccgaggatcaaatcctttggctgctgctggggatctgcagaggccttgaggccattcatgccaagggttatgcccacagagacttgaagcccaccaatatattgcttggagatgaggggcagccagttttaatggacttgggttccatgaatcaagcatgcatccatgtggagggctcccgccaggctctgaccctgcaggactgggcagcccagcggtgcaccatctcctaccgagccccagagctcttctctgtgcagagtcactgtgtcatcgatgagcggactgatgtctggtccctaggctgcgtgctatatgccatgatgtttggggaaggcccttatgacatggtgttccaaaagggtgacagtgtggcccttgctgtgcagaaccaactcagcatcccacaaagccccaggcattcttcagcattgcggcagctcctgaactcgatgatgaccgtggacccgcatcagcgtcctcacattcctctcctcctcagtcagctggaggcgctgcagcccccagctcctggccaacatactacccaaatctgaaaaagcagcatgttgagaagatggccccttgtgccttggaaagaggttcccatccctcattggaatcaccacccattccatccaggacttctcttacacttgggggtagcggggtcaggacaatcatctcagtcctgcatcttttcttctgctttcttccctccaagagcaaaacctgggcaaggggacttactgagtgggggtgggtgggggttgggaaaagggaaactggtgggatatggaacatggctctgagcaggactgttgagctcacatagtgttctgactccaaatctgggagcaggagaatgtgtaaacaagaataaagtggaagcaggttggtgtaga

SEQ ID NO: 283289 - DNA, 1424 bp, Homo sapiens
tgatgatgtcagcactgcttccggtcggtggcgcttctctctggcccgagccagcatgatccgctgggcccccagcgcatctcctggaagagcccactcaccctggacgagctcttcggtagcctcagaccgtccttgaagaggatgactgagacattatgggccacgcgctgtgtgtctgctctcggggaactgtcatcattgacaataagcgctacctcttcatccagaaactgggggagggtgggttcagctatgtggacctagtggaagggttacatgatggacacttctacgccctgaagcgaatcctgtgtcacgagcagcaggaccgggaggaggcccagcgagaagccgacatgcatcgcctcttcaatcaccccaacatccttcgcctcgtggcttactgtctgagggaacggggtgctaagcatgaggcctggctgctgctaccattcttcaagagaggtacgctgtggaatgagatagaaaggctgaaggacaaaggcaacttcctgaccgaggatcaaatcctttggctgctgctggggatctgcagaggccttgaggccattcatgccaagggttatgcccacagagacttgaagcccaccaatatattgcttggagatgaggggcagccagttttaatggacttgggttccatgaatcaagcatgcatccatgtggagggctcccgccaggctctgaccctgcaggactgggcagcccagcggtgcaccatctcctaccgagccccagagctcttctctgtgcagagtcactgtgtcatcgatgagcggactgatgtctggtccctaggctgcgtgctatatgccatgatgtttggggaaggcccttatgacatggtgttccaaaagggtgacagtgtggcccttgctgtgcagaaccaactcagcatcccacaaagccccaggcattcttcagcattgcggcagctcctgaactcgatgatgaccgtggacccgcatcagcgtcctcacattcctctcctcctcagtcagctggaggcgctgcagcccccagctcctggccaacatactacccaaatctgaaaaagcagcatgttgagaagatggccccttgtgccttggaaagaggttcccatccctcattggaatcaccacccattccatccaggacttctcttacacttgggggtagcggggtcaggacaatcatctcagtcctgcatcttttcttctgctttcttccctccaagagcaaaacctgggcaaggggacttactgagtgggggtgggtgggggttgggaaaagggaaactggtgggatatggaacatggctctgagcaggactgttgagctcacatagtgttctgactccaaatctgggagcaggagaatgtgtaaacaagaataaagtggaagcaggttggtgtaga

SEQ ID NO: 283290 - DNA, 1638 bp, Homo sapiens
aacgcgatccattcggctagtacgagccgcaggttaatcggcacgagggcttctctctggcccgagccagcatgatccgctgggcccccagcgcatctcctggaagagcccactcaccctggacgagctcttcggtagcctcagaccgtccttgaagaggatgactgagacattatgggccacgcgctgtgtgtctgctctcggggaactgtcatcattgacaataagcgctacctcttcatccagaaactgggggagggtgggttcagctatgtggacctagtggaagggttacatgatggacacttctacgccctgaagcgaatcctgtgtcacgagcagcaggaccgggaggaggcccagcgagaagccgacatgcatcgcctcttcaatcaccccaacatccttcgcctcgtggcttactgtctgagggaacggggtgctaagcatgaggcctggctgctgctaccattcttcaagagaggtacgctgtggaatgagatagaaaggctgaaggacaaaggcaacttcctgaccgaggatcaaatcctttggctgctgctggggatctgcagaggccttgaggccattcatgccaagggttatgcccacagagacttgaagcccaccaatatattgcttggagatgaggggcagccagttttaatggacttgggttccatgaatcaagcatgcatccatgtggagggctcccgccaggctctgaccctgcaggactgggcagcccagcggtgcaccatctcctaccgagccccagagctcttctctgtgcagagtcactgtgtcatcgatgagcggactgatgtctggtccctaggctgcgtgctatatgccatgatgtttggggaaggcccttatgacatggtgttccaaaagggtgacagtgtggcccttgctgtgcagaaccaactcagcatcccacaaagccccaggcattcttcagcattgcggcagctcctgaactcgatgatgaccgtggacccgcatcagcgtcctcacattcctctcctcctcagtcagctggaggcgctgcagcccccagctcctggccaacatactacccaaatctgaaaaagcagcatgttgagaagatggccccttgtgccttggaaagaggttcccatccctcattggaatcaccacccattccatccaggacttctcttacacttgggggtagcggggtcaggacaatcatctcagtcctgcatcttttcttctgctttcttccctccaagagcaaaacctgggcaaggggacttactgagtgggggtgggtgggggttgggaaaagggaaactggtgggatatggaacatggctctgagcaggactgttgagctcacatagtgttctgactccaaatctgggagcaggagaatgtgtaaacaagaataaagtggaagcaggttggtgtagaacttagtctcagtgttcctggagtgagagaagaggtgcaaggggcccaaagtcaggttgccatattcaggcgaactgcctgggaaggaggaatggtgcagagtcggcaatggtgtgacttcattctacaggaggttggttagcagtggacagttctagcttgtcttagatcaaaacttaaagctgcttgggctcaagc

SEQ ID NO: 283291 - DNA, 1995 bp, Homo sapiens
tgatgatgtcagcactgcttccggtcggtggcgcttctctctggcccgagccagcatgatccgctgggcccccagcgcatctcctggaagagcccactcaccctggacgagctcttcggtagcctcagaccgtccttgaagaggatgactgagacattatgggccacgcgctgtgtgtctgctctcggggaactgtcatcattgacaataagcgctacctcttcatccagaaactgggggaggggtgagtgtttggaagtcagttaactagtcctcaagtttatgatcattgaaggacagcggtgtgcatatgcttggggcacaagggttttatccctatccctgtcctctctcacctgacagaacctagctacacagtatcaagaaggtggattctggagccaggcctgctaaatccacctcgtgtgaccttgataaaccatgtttttttcatcagcttaatggagatgattattatccctcactgatggagttgtgaggattaaatgagataatgtgtataaaatgtctcacccaatgcggggttgacaagtacttgataagtgttggctattatttatttagcatctgtcaagtgcagaggtctctattacgaccataggacctcaaagatttctatatctctgctcctgaggagctcacggtgtaatattcttcagatttctcttagagccacatcttgggaaggtttctgctaaatgggaaggacaccccactccccaccaggaaatttctctaggtccaagccatgtgggagatgaccatggccctttattgacccctttggcccacagtgggttcagctatgtggacctagtggaagggttacatgatggacacttctacgccctgaagcgaatcctgtgtcacgagcagcaggaccgggaggaggcccagcgagaagccgacatgcatcgcctcttcaatcaccccaacatccttcgcctcgtggcttactgtctgagggaacggggtgctaagcatgaggcctggctgctgctaccattcttcaagagaggtacgctgtggaatgagatagaaaggctgaaggacaaaggcaacttcctgaccgaggatcaaatcctttggctgctgctggggatctgcagaggccttgaggccattcatgccaagggttatgcccacagagacttgaagcccaccaatatattgcttggagatgaggggcagccagttttaatggacttgggttccatgaatcaagcatgcatccatgtggagggctcccgccaggctctgaccctgcaggactgggcagcccagcggtgcaccatctcctaccgagccccagagctcttctctgtgcagagtcactgtgtcatcgatgagcggactgatgtctggtccctaggctgcgtgctatatgccatgatgtttggggaaggcccttatgacatggtgttccaaaagggtgacagtgtggcccttgctgtgcagaaccaactcagcatcccacaaagccccaggcattcttcagcattgcggcagctcctgaactcgatgatgaccgtggacccgcatcagcgtcctcacattcctctcctcctcagtcagctggaggcgctgcagcccccagctcctggccaacatactacccaaatctgaaaaagcagcatgttgagaagatggccccttgtgccttggaaagaggttcccatccctcattggaatcaccacccattccatccaggacttctcttacacttgggggtagcggggtcaggacaatcatctcagtcctgcatcttttcttctgctttcttccctccaagagcaaaacctgggcaaggggacttactgagtgggggtgggtgggggttgggaaaagggaaactggtgggatatggaacatggctctgagcaggactgttgagctcacatagtgttctgactccaaatctgggagcaggagaatgtgtaaacaagaataaagtggaagcaggttggtgtaga

SEQ ID NO: 283292 - DNA, 1379 bp, Homo sapiens
aacgcgatccattcggctagtacgagccgcaggttaatcggcacgagggcttctctctggcccgagccagcatgatccgctgggcccccagcgcatctcctggaagagcccactcaccctggacgagctcttcggtagcctcagaccgtccttgaagaggatgactgagacattatgggccacgcgctgtgtgtctgctctcggggaactgtcatcattgacaataagcgctacctcttcatccagaaactgggggagggcgaatcctgtgtcacgagcagcaggaccgggaggaggcccagcgagaagccgacatgcatcgcctcttcaatcaccccaacatccttcgcctcgtggcttactgtctgagggaacggggtgctaagcatgaggcctggctgctgctaccattcttcaagagaggtacgctgtggaatgagatagaaaggctgaaggacaaaggcaacttcctgaccgaggatcaaatcctttggctgctgctggggatctgcagaggccttgaggccattcatgccaagggttatgcccacagagacttgaagcccaccaatatattgcttggagatgaggggcagccagttttaatggacttgggttccatgaatcaagcatgcatccatgtggagggctcccgccaggctctgaccctgcaggactgggcagcccagcggtgcaccatctcctaccgagccccagagctcttctctgtgcagagtcactgtgtcatcgatgagcggactgatgtctggtccctaggctgcgtgctatatgccatgatgtttggggaaggcccttatgacatggtgttccaaaagggtgacagtgtggcccttgctgtgcagaaccaactcagcatcccacaaagccccaggcattcttcagcattgcggcagctcctgaactcgatgatgaccgtggacccgcatcagcgtcctcacattcctctcctcctcagtcagctggaggcgctgcagcccccagctcctggccaacatactacccaaatctgaaaaagcagcatgttgagaagatggccccttgtgccttggaaagaggttcccatccctcattggaatcaccacccattccatccaggacttctcttacacttgggggtagcggggtcaggacaatcatctcagtcctgcatcttttcttctgctttcttccctccaagagcaaaacctgggcaaggggacttactgagtgggggtgggtgggggttgggaaaagggaaactggtgggatatggaacatggctctgagcaggactgttgagctcacatagtgttctgactccaaatctgggagcaggagaatgtgtaaacaagaataaagtggaagcaggttggtgtaga

SEQ ID NO: 283293 - DNA, 1405 bp, Homo sapiens
aacgcgatccattcggctagtacgagccgcaggttaatcggcacgagggcttctctctggcccgagccagcatgatccgctgggcccccagcgcatctcctggaagagcccactcaccctggacgagctcttcggtagcctcagaccgtccttgaagaggatgactgagacattatgggccacgcgctgtgtgtctgctctcggggaactgtcatcattgacaataagcgctacctcttcatccagaaactgggggagggtgggttcagctatgtggacctagtggaagggttacatgatggacacttctacgccctgaagcgaatcctgtgtcacgagcagcaggaccgggaggaggcccagcgagaagccgacatgcatcgcctcttcaatcaccccaacatccttcgcctcgtggcttactgtctgagggaacggggtgctaagcatgaggcctggctgctgctaccattcttcaagagaggtacgctgtggaatgagatagaaaggctgaaggacaaaggcaacttcctgaccgaggatcaaatcctttggctgctgctggggatctgcagaggccttgaggccattcatgccaagggttatgcccacagagacttgaagcccaccaatatattgcttggagatgaggggcagccagttttaatggacttgggttccatgaatcaagcatgcatccatgtggagggctcccgccaggctctgaccctgcaggactgggcagcccagcggtgcaccatctcctaccgagccccagagctcttctctgtgcagagtcactgtgtcatcgatgagcggactgatgtctggtccctaggctgcgtgctatatgccatgatgtttggggaaggcccttatgacatggtgttccaaaagggtgacagtgtggcccttgctgtgcagaaccaactcagcatcccacaaagccccaggcattcttcagcattgcggcagctcctgaactcgatgatgaccgtggacccgcatcagcgtcctcacattcctctctcctggccaacatactacccaaatctgaaaaagcagcatgttgagaagatggccccttgtgccttggaaagaggttcccatccctcattggaatcaccacccattccatccaggacttctcttacacttgggggtagcggggtcaggacaatcatctcagtcctgcatcttttcttctgctttcttccctccaagagcaaaacctgggcaaggggacttactgagtgggggtgggtgggggttgggaaaagggaaactggtgggatatggaacatggctctgagcaggactgttgagctcacatagtgttctgactccaaatctgggagcaggagaatgtgtaaacaagaataaagtggaagcaggttggtgtaga

SEQ ID NO: 283294 - DNA, 1567 bp, Homo sapiens
aacgcgatccattcggctagtacgagccgcaggttaatcggcacgagggcttctctctggcccgagccagcatgatccgctgggcccccagcgcatctcctggaagagcccactcaccctggacgagctcttcggtagcctcagaccgtccttgaagaggatgactgagacattatgggccacgcgctgtgtgtctgctctcggggaactgtcatcattgacaataagcgctacctcttcatccagaaactgggggagggtgggttcagctatgtggacctagtggaagggttacatgatggacacttctacgccctgaagcgaatcctgtgtcacgagcagcaggaccgggaggaggcccagcgagaagccgacatgcatcgcctcttcaatcaccccaacatccttcgcctcgtggcttactgtctgagggaacggggtgctaagcatgaggcctggctgctgctaccattcttcaagagaggtacgctgtggaatgagatagaaaggctgaaggacaaaggcaacttcctgaccgaggatcaaatcctttggctgctgctggggatctgcagaggccttgaggccattcatgccaagggttatgcccacagagacttgaagcccaccaatatattgcttggagatgaggggcagccagttttaatggacttgggttccatgaatcaagcatgcatccatgtggagggctcccgccaggctctgaccctgcaggactgggcagcccagcggtgcaccatctcctaccgagccccagagctcttctctgtgcagagtcactgtgtcatcgatgagcggactgatgtctggtccctaggctgcgtgctatatgccatgatgtttggggaaggcccttatgacatggtgttccaaaagggtgacagtgtggcccttgctgtgcagaaccaactcagcatcccacaaagccccaggcattcttcagcattgcggcagctcctgaactcgatgatgaccgtggacccgcatcagcgtcctcacattcctctcctcctcagtcagctggaggcgctgcagcccccagctcctggccaacatactacccaaatctgaaaaagcagcatgttgagaagatggccccttgtgccttggaaagaggttcccatcctctcagtcctgcatcttttcttctgctttcttccctccaagagcaaaacctgggcaaggggacttactgagtgggggtgggtgggggttgggaaaagggaaactggtgggatatggaacatggctctgagcaggactgttgagctcacatagtgttctgactccaaatctgggagcaggagaatgtgtaaacaagaataaagtggaagcaggttggtgtagaacttagtctcagtgttcctggagtgagagaagaggtgcaaggggcccaaagtcaggttgccatattcaggcgaactgcctgggaaggaggaatggtgcagagtcggcaatggtgtgacttcattctacaggaggttggttagcagtggacagttctagcttgtcttagatcaaaacttaaagctgcttgggctcaagc

SEQ ID NO: 283295 - DNA, 1177 bp, Homo sapiens
aacgcgatccattcggctagtacgagccgcaggttaatcggcacgagggcttctctctggcccgagccagcatgatccgctgggcccccagcgcatctcctggaagagcccactcaccctggacgagctcttcggtagcctcagaccgtccttgaagaggatgactgagacattatgggccacgcgctgtgtgtctgctctcggggaactgtcatcattgacaataagcgctacctcttcatccagaaactgggggagggtgggttcagctatgtggacctagtggaagggttacatgatggacacttctacgccctgaagcgaatcctgtgtcacgagcagcaggaccgggaggaggcccagcgagaagccgacatgcatcgcctcttcaatcaccccaacatccttcgcctcgtggcttactgtctgagggaacggggtgctaagcatgaggcctggctgctgctaccattcttcaagagaggtacgctgtggaatgagatagaaaggctgaaggacaaaggcaacttcctgaccgaggatcaaatcctttggctgctgctggggatctgcagaggccttgaggccattcatgccaagggttatgcccacagagacttgaagcccaccaatatattgcttggagatgaggggcagccagttttaatggacttgggttccatgaatcaagcatgcatccatgtggagggctcccgccaggctctgaccctgcaggactgggcagcccagcggtgcaccatctcctaccgagccccagagctcttctctgtgcagagtcactgtgtcatcgatgagcggactgatgtctggtccctaggctgcgtgctatatgccatgatgtttggggaaggcccttatgacatggtgttccaaaagggtgacagtgtggcccttgctgtgcagaaccaactcagcatcccacaaagccccaggcattcttcagcattgcggcagctcctgaactcgatgatgaccgtggacccgcatcagcgtcctcacattcctctcctcctcagtcagctggaggcgctgcagcccccagctcctggccaacatactacccaaatctgaaaaagcagcatgttgagaagatggccccttgtgccttggaaagaggttcccatccatccgcttatccgggtcctctagagtcagc

SEQ ID NO: 283296 - DNA, 1043 bp, Homo sapiens
aggcacgagaataaccaaggtcccggaatttttgggaacggggtgctaagcatgaggcctggctgctgctaccattcttcaagagaggtacgctgtggaatgagatagaaaggctgaaggacaaaggcaacttcctgaccgaggatcaaatcctttggctgctgctggggatctgcagaggccttgaggccattcatgccaagggttatgcccacagagacttgaagcccaccaatatattgcttggagatgaggggcagccagttttaatggacttgggttccatgaatcaagcatgcatccatgtggagggctcccgccaggctctgaccctgcaggactgggcagcccagcggtgcaccatctcctaccgagccccagagctcttctctgtgcagagtcactgtgtcatcgatgagcggactgatgtctggtccctaggctgcgtgctatatgccatgatgtttggggaaggcccttatgacatggtgttccaaaagggtgacagtgtggcccttgctgtgcagaaccaactcagcatcccacaaagccccaggcattcttcagcattgcggcagctcctgaactcgatgatgaccgtggacccgcatcagcgtcctcacattcctctcctcctcagtcagctggaggcgctgcagcccccagctcctggccaacatactacccaaatctgaaaaagcagcatgttgagaagatggccccttgtgccttggaaagaggttcccatccctcattggaatcaccacccattccatccaggacttctcttacacttgggggtagcggggtcaggacaatcatctcagtcctgcatcttttcttctgctttcttccctccaagagcaaaacctgggcaaggggacttactgagtgggggtgggtgggggttgggaaaagggaaactggtgggatatggaacatggctctgagcaggactgttgagctcacatagtgttctgactccaaatctgggagcaggagaatgtgtaaacaagaataaagtggaagcaggttggtgtaga

SEQ ID NO: 283297 - DNA, 1690 bp, Homo sapiens
tgatgatgtcagcactgcttccggtcggtggcgcttctctctggcccgagccaggtcagtccggcagtgcagatggcccatcccgggctctgggctcctagaccggggtgggccctgccaggagtgggcctgagcctcgcacgtcctctgaaactacgctatgctctgcttttgcggcgcgatgggcgtgggagcgggggctgcccaaagatgggctggggttggaggaagtggcccggtagccgctgtgtgtcctgaggccgtaaggcgcctgaccccacccctgaagctggcgacggagcagggcctgttttctctacactatagtcatgatccgctgggcccccagcgcatctcctggaagagcccactcaccctggacgagctcttcggtagcctcagaccgtccttgaagaggatgactgagacattatgggccacgcgctgtgtgtctgctctcggggaactgtcatcattgacaataagcgctacctcttcatccagaaactgggggagggtgggttcagctatgtggacctagtggaagggttacatgatggacacttctacgccctgaagcgaatcctgtgtcacgagcagcaggaccgggaggaggcccagcgagaagccgacatgcatcgcctcttcaatcaccccaacatccttcgcctcgtggcttactgtctgagggaacggggtgctaagcatgaggcctggctgctgctaccattcttcaagagacttgaagcccaccaatatattgcttggagatgaggggcagccagttttaatggacttgggttccatgaatcaagcatgcatccatgtggagggctcccgccaggctctgaccctgcaggtaaaagagtctccaggttccttttctcacctgttccccattcccaccccttctggtgcatgtcccagtttggtcacatgaccatgacctgtgccccacttttgagctctgggatcactgttccaggactgggcagcccagcggtgcaccatctcctaccgagccccagagctcttctctgtgcagagtcactgtgtcatcgatgagcggactgatgtctggtccctaggctgcgtgctatatgccatgatgtttggggaaggcccttatgacatggtgttccaaaagggtgacagtgtggcccttgctgtgcagaaccaactcagcatcccacaaagccccaggcattcttcagcattgcggcagctcctgaactcgatgatgaccgtggacccgcatcagcgtcctcacattcctctcctcctcagtcagctggaggcgctgcagcccccagctcctggccaacatactacccaaatctgaaaaagcagcatgttgagaagatggccccttgtgccttggaaagaggttcccatccctcattggaatcaccacccattccatccaggacttctcttacacttgggggtagcggggtcaggacaatcatctcagtcctgcatcttttcttctgctttcttccctccaagagcaaaacctgggcaaggggacttactgagtgggggtgggtgggggttgggaaaagggaaactggtgggatatggaacatggctctgagcaggactgttgagctcacatagtgttctgactccaaatctgggagcaggagaatgtgtaaacaagaataaagtggaagcaggttggtgtaga

SEQ ID NO: 283298 - DNA, 977 bp, Homo sapiens
aacgcgatccattcggctagtacgagccgcaggttaatcggcacgagggcttctctctggcccgagccagcatgatccgctgggcccccagcgcatctcctggaagagcccactcaccctggacgagctcttcggtagcctcagaccgtccttgaagaggatgactgagacattatgggccacgcgctgtgtgtctgctctcggggaactgtcatcattgacaataagcgctacctcttcatccagaaactgggggagggtgggttcagctatgtggacctagtggaagggttacatgatggacacttctacgccctgaagcgaatcctgtgtcacgagcagcaggaccgggaggaggcccagcgagaagccgacatgcatcgcctcttcaatcaccccaacatccttcgcctcgtggcttactgtctgagggaacggggtgctaagcatgaggcctggctgctgctaccattcttcaagagaggtacgctgtggaatgagatagaaaggctgaaggacaaaggcaacttcctgaccgaggatcaaatcctttggctgctgctggggatctgcagaggccttgaggccattcatgccaagggttatgcccacagagacttgaagcccaccaatatattgcttggagatgaggggcagccagttttaatggacttgggttccatgtctcagtcctgcatcttttcttctgctttcttcctccaaatctgggagcaggagaatgtgtaaacaagaataaagtggaagcaggttggtgtagaacttagtctcagtgttcctggagtgagagaagaggtgcaaggggcccaaagtcaggttgccatattcaggcgaactgcctgggaaggaggaatggtgcagagtcggcaatggtgtgacttcattctacaggaggttggttagcagtggacagttctagcttgtcttagatcaaaacttaaagctgcttgggctcaagc

SEQ ID NO: 283299 - DNA, 668 bp, Homo sapiens
ggagatgattattatccctcactgatggagttgtgaggattaaatgagataatgtgtataaaatgtctcacccaatgcggggttgacaagtacttgataagtgttggctattatttatttagcatctgtcaagtgcagaggtctctattacgaccataggacctcaaagatttctatatctctgctcctgaggagctcacggtgtaatattcttcagatttctcttagagccacatcttgggaaggtttctgctaaatgggaaggacaccccactccccaccaggaaatttctctaggtccaagccatgtgggagatgaccatggccctttattgacccctttggcccacagtgggttcagctatgtggacctagtggaagggttacatgatggacacttctacgccctgaagcgaatcctgtgtcacgagcagcaggaccgggaggaggcccagcgagaagccgacatgcatcgcctcttcaatcaccccaacatccttcgcctcgtggcttactgtctgagggaacggggtgctaagcatgaggcctggctgctgctaccattcttcaaggtcagaaagactcctggttatggagggggttgcagcagagccacctactcaagggctgtgtgagcagtccagcatgttaggaagcagggaccatgt

SEQ ID NO: 283300 - DNA, 1698 bp, Homo sapiens
tgatgatgtcagcactgcttccggtcggtggcgcttctctctggcccgagccaggtcagtccggcagtgcagatggcccatcccgggctctgggctcctagaccggggtgggccctgccaggagtgggcctgagcctcgcacgtcctctgaaactacgctatgctctgcttttgcggcgcgatgggcgtgggagcgggggctgcccaaagatgggctggggttggaggaagtggcccggtagccgctgtgtgtcctgaggccgtaaggcgcctgaccccacccctgaagctggcgacggagcagggcctgttttctctacactatagtcatgatccgctgggcccccagcgcatctcctggaagagcccactcaccctggacgagctcttcggtagcctcagaccgtccttgaagaggatgactgagacattatgggccacgcgctgtgtgtctgctctcggggaactgtcatcattgacaataagcgctacctcttcatccagaaactgggggagggtgggttcagctatgtggacctagtggaagggttacatgatggacacttctacgccctgaagcgaatcctgtgtcacgagcagcaggaccgggaggaggcccagcgagaagccgacatgcatcgcctcttcaatcaccccaacatccttcgcctcgtggcttactgtctgagggaacggggtgctaagcatgaggcctggctgctgctaccattcttcaagagaggtacgctgtggaatgagatagaaaggctgaaggacaaaggcaacttcctgaccgaggatcaaatcctttggctgctgctggggatctgcagaggccttgaggccattcatgccaagggttatgcccacagagacttgaagcccaccaatatattgcttggagatgaggggcagccagttttaatggacttgggttccatgaatcaagcatgcatccatgtggagggctcccgccaggctctgaccctgcaggactgggcagcccagcggtgcaccatctcctaccgagccccagagctcttctctgtgcagagtcactgtgtcatcgatgagcggactgatgtctggtccctaggctgcgtgctatatgccatgatgtttggggaaggcccttatgacatggtgttccaaaagggtgacagtgtggcccttgctgtgcagaaccaactcagcatcccacaaagccccaggcattcttcagcattgcggcagctcctgaactcgatgatgaccgtggacccgcatcagcgtcctcacattcctctcctcctcagtcagctggaggcgctgcagcccccagctcctggccaacatactacccaaatctgaaaaagcagcatgttgagaagatggccccttgtgccttggaaagaggttcccatccctcattggaatcaccacccattccatccaggacttctcttacacttgggggtagcggggtcaggacaatcatctcagtcctgcatcttttcttctgctttcttccctccaagagcaaaacctgggcaaggggacttactgagtgggggtgggtgggggttgggaaaagggaaactggtgggatatggaacatggctctgagcaggactgttgagctcacatagtgttctgactccaaatctgggagcaggagaatgtgtaaacaagaataaagtggaagcaggttggtgtaga

SEQ ID NO: 283301 - DNA, 1566 bp, Homo sapiens
aacgcgatccattcggctagtacgagccgcaggttaatcggcacgagggcttctctctggcccgagccagcatgatccgctgggcccccagcgcatctcctggaagagcccactcaccctggacgagctcttcggtagcctcagaccgtccttgaagaggatgactgagacattatgggccacgcgctgtgtgtctgctctcggggaactgtcatcattgacaataagcgctacctcttcatccagaaactgggggagggtgggttcagctatgtggacctagtggaagggttacatgatggacacttctacgccctgaagcgaatcctgtgtcacgagcagcaggaccgggaggaggcccagcgagaagccgacatgcatcgcctcttcaatcaccccaacatccttcgcctcgtggcttactgtctgagggaacggggtgctaagcatgaggcctggctgctgctaccattcttcaagagaggtacgctgtggaatgagatagaaaggctgaaggacaaaggcaacttcctgaccgaggatcaaatcctttggctgctgctggggatctgcagaggccttgaggccattcatgccaagggttatgcccacagagacttgaagcccaccaatatattgcttggagatgaggggcagccagttttaatggacttgggttccatgaatcaagcatgcatccatgtggagggctcccgccaggctctgaccctgcaggtaaaagagtctccaggttccttttctcacctgttccccattcccaccccttctggtgcatgtcccagtttggtcacatgaccatgacctgtgccccacttttgagctctgggatcactgttccaggactgggcagcccagcggtgcaccatctcctaccgagccccagagctcttctctgtgcagagtcactgtgtcatcgatgagcggactgatgtctggtccctaggctgcgtgctatatgccatgatgtttggggaaggcccttatgacatggtgttccaaaagggtgacagtgtggcccttgctgtgcagaaccaactcagcatcccacaaagccccaggcattcttcagcattgcggcagctcctgaactcgatgatgaccgtggacccgcatcagcgtcctcacattcctctcctcctcagtcagctggaggcgctgcagcccccagctcctggccaacatactacccaaatctgaaaaagcagcatgttgagaagatggccccttgtgccttggaaagaggttcccatccctcattggaatcaccacccattccatccaggacttctcttacacttgggggtagcggggtcaggacaatcatctcagtcctgcatcttttcttctgctttcttccctccaagagcaaaacctgggcaaggggacttactgagtgggggtgggtgggggttgggaaaagggaaactggtgggatatggaacatggctctgagcaggactgttgagctcacatagtgttctgactccaaatctgggagcaggagaatgtgtaaacaagaataaagtggaagcaggttggtgtaga

SEQ ID NO: 283302 - DNA, 1575 bp, Homo sapiens
aacgcgatccattcggctagtacgagccgcaggttaatcggcacgagggcttctctctggcccgagccagcatgatccgctgggcccccagcgcatctcctggaagagcccactcaccctggacgagctcttcggtagcctcagaccgtccttgaagaggatgactgagacattatgggccacgcgctgtgtgtctgctctcggggaactgtcatcattgacaataagcgctacctcttcatccagaaactgggggagggatttctcttagagccacatcttgggaaggtttctgctaaatgggaaggacaccccactccccaccaggaaatttctctaggtccaagccatgtgggagatgaccatggccctttattgacccctttggcccacagtgggttcagctatgtggacctagtggaagggttacatgatggacacttctacgccctgaagcgaatcctgtgtcacgagcagcaggaccgggaggaggcccagcgagaagccgacatgcatcgcctcttcaatcaccccaacatccttcgcctcgtggcttactgtctgagggaacggggtgctaagcatgaggcctggctgctgctaccattcttcaagagaggtacgctgtggaatgagatagaaaggctgaaggacaaaggcaacttcctgaccgaggatcaaatcctttggctgctgctggggatctgcagaggccttgaggccattcatgccaagggttatgcccacagagacttgaagcccaccaatatattgcttggagatgaggggcagccagttttaatggacttgggttccatgaatcaagcatgcatccatgtggagggctcccgccaggctctgaccctgcaggactgggcagcccagcggtgcaccatctcctaccgagccccagagctcttctctgtgcagagtcactgtgtcatcgatgagcggactgatgtctggtccctaggctgcgtgctatatgccatgatgtttggggaaggcccttatgacatggtgttccaaaagggtgacagtgtggcccttgctgtgcagaaccaactcagcatcccacaaagccccaggcattcttcagcattgcggcagctcctgaactcgatgatgaccgtggacccgcatcagcgtcctcacattcctctcctcctcagtcagctggaggcgctgcagcccccagctcctggccaacatactacccaaatctgaaaaagcagcatgttgagaagatggccccttgtgccttggaaagaggttcccatccctcattggaatcaccacccattccatccaggacttctcttacacttgggggtagcggggtcaggacaatcatctcagtcctgcatcttttcttctgctttcttccctccaagagcaaaacctgggcaaggggacttactgagtgggggtgggtgggggttgggaaaagggaaactggtgggatatggaacatggctctgagcaggactgttgagctcacatagtgttctgactccaaatctgggagcaggagaatgtgtaaacaagaataaagtggaagcaggttggtgtaga

SEQ ID NO: 283303 - DNA, 1306 bp, Homo sapiens
aacgcgatccattcggctagtacgagccgcaggttaatcggcacgagggcttctctctggcccgagccagcatgatccgctgggcccccagcgcatctcctggaagagcccactcaccctggacgagctcttcggtagcctcagaccgtccttgaagaggatgactgagacattatgggccacgcgctgtgtgtctgctctcggggaactgtcatcattgacaataagcgctacctcttcatccagaaactgggggagggtgggttcagctatgtggacctagtggaagggttacatgatggacacttctacgccctgaagcgaatcctgtgtcacgagcagcaggaccgggaggaggcccagcgagaagccgacatgcatcgcctcttcaatcaccccaacatccttcgcctcgtggcttactgtctgagggaacggggtgctaagcatgaggcctggctgctgctaccattcttcaagagacttgaagcccaccaatatattgcttggagatgaggggcagccagttttaatggacttgggttccatgaatcaagcatgcatccatgtggagggctcccgccaggctctgaccctgcaggactgggcagcccagcggtgcaccatctcctaccgagccccagagctcttctctgtgcagagtcactgtgtcatcgatgagcggactgatgtctggtccctaggctgcgtgctatatgccatgatgtttggggaaggcccttatgacatggtgttccaaaagggtgacagtgtggcccttgctgtgcagaaccaactcagcatcccacaaagccccaggcattcttcagcattgcggcagctcctgaactcgatgatgaccgtggacccgcatcagcgtcctcacattcctctcctcctcagtcagctggaggcgctgcagcccccagctcctggccaacatactacccaaatctgaaaaagcagcatgttgagaagatggccccttgtgccttggaaagaggttcccatccctcattggaatcaccacccattccatccaggacttctcttacacttgggggtagcggggtcaggacaatcatctcagtcctgcatcttttcttctgctttcttccctccaagagcaaaacctgggcaaggggacttactgagtgggggtgggtgggggttgggaaaagggaaactggtgggatatggaacatggctctgagcaggactgttgagctcacatagtgttctgactccaaatctgggagcaggagaatgtgtaaacaagaataaagtggaagcaggttggtgtaga

SEQ ID NO: 283304 - DNA, 1138 bp, Homo sapiens
aacgcgatccattcggctagtacgagccgcaggttaatcggcacgagggcttctctctggcccgagccagcatgatccgctgggcccccagcgcatctcctggaagagcccactcaccctggacgagctcttcggtagcctcagaccgtccttgaagaggatgactgagacattatgggccacgcgctgtgtgtctgctctcggggaactgtcatcattgacaataagcgctacctcttcatccagaaactgggggagggtgggttcagctatgtggacctagtggaagggttacatgatggacacttctacgccctgaagcgaatcctgtgtcacgagcagcaggaccgggaggaggcccagcgagaagccgacatgcatcgcctcttcaatcaccccaacatccttcgcctcgtggcttactgtctgagggaacggggtgctaagcatgaggcctggctgctgctaccattcttcaagagaggtacgctgtggaatgagatagaaaggctgaaggacaaaggcaacttcctgaccgaggatcaaatcctttggctgctgctggggatctgcagaggccttgaggccattcatgccaagggttatgcccacagagacttgaagcccaccaatatattgcttggagatgaggggcagccagttttaatggacttgggttccatgaatcaagcatgcatccatgtggagggctcccgccaggctctgaccctgcaggactgggcagcccagcggtgcaccatctcctaccgagccccagagctcttctctgtgcagagtcactgtgtcatcgatgagcggactgatgtctggtccctaggctgcgtgctatatgccatgatgtttggggaaggcccttatgacatggtgttccaaaagggtgacagtgtggcccttgctgtgcagaaccaactcagcatcccacaaagccccaggcattcttcagcattgcggcagctcctgaactcgatgatgaccgtggacccgcatcagcgtcctcacattcctctcctcctcagtcagctggaggcgctgcagcccccagctcctggccaacatactacccaaaatttgcttatttggatacccaccaattcaattaggaccttttttacacttg

SEQ ID NO: 283305 - DNA, 1369 bp, Homo sapiens
aacgcgatccattcggctagtacgagccgcaggttaatcggcacgagggcttctctctggcccgagccagcatgatccgctgggcccccagcgcatctcctggaagagcccactcaccctggacgagctcttcggtagcctcagaccgtccttgaagaggatgactgagacattatgggccacgcgctgtgtgtctgctctcggggaactgtcatcattgacaataagcgctacctcttcatccagaaactgggggagggtgggttcagctatgtggacctagtggaagggttacatgatggacacttctacgccctgaagcgaatcctgtgtcacgagcagcaggaccgggaggaggcccagcgagaagccgacatgcatcgcctcttcaatcaccccaacatccttcgcctcgtggcttactgtctgagggaacggggtgctaagcatgaggcctggctgctgctaccattcttcaagagaggtacgctgtggaatgagatagaaaggctgaaggacaaaggcaacttcctgaccgaggatcaaatcctttggctgctgctggggatctgcagaggccttgaggccattcatgccaagggttatgcccacagagacttgaagcccaccaatatattgcttggagatgaggggcagccagttttaatggacttgggttccatgaatcaagcatgcatccatgtggagggctcccgccaggctctgaccctgcaggactgggcagcccagcggtgcaccatctcctaccgagccccagagctcttctctgtgcagagtcactgtgtcatcgatgagcggactgatgtctggtccctaggctgcgtgctatatgccatgatgtttggggaaggcccttatgacatggtgttccaaaagggtgacagtgtggcccttgctgtgcagaaccaactcagcatcccacaaagccccaggcattcttcagcattgcggcagctcctgaactcgatgatgaccgtggacccgcatcagcgtcctcacattcctctcctcctcagtcagctggaggcgctgcagcccccagctcctggccaacatactacccaaatctgaaaaagcagcatgttgagaagatggccccttgtgccttggaaagaggttcccatcctctcagtcctgcatcttttcttctgctttcttccctccaagagcaaaacctgggcaaggggacttactgagtgggggtgggtgggggttgggaaaagggaaactggtgggatatggaacatggctctgagcaggactgttgagctcacatagtgttctgactccaaatctgggagcaggagaatgtgtaaacaagaataaagtggaagcaggttggtgtaga

SEQ ID NO: 283306 - DNA, 1064 bp, Homo sapiens
aacgcgatccattcggctagtacgagccgcaggttaatcggcacgagggcttctctctggcccgagccagcatgatccgctgggcccccagcgcatctcctggaagagcccactcaccctggacgagctcttcggtagcctcagaccgtccttgaagaggatgactgagacattatgggccacgcgctgtgtgtctgctctcggggaactgtcatcattgacaataagcgctacctcttcatccagaaactgggggagggtgggttcagctatgtggacctagtggaagggttacatgatggacacttctacgccctgaagcgaatcctgtgtcacgagcagcaggaccgggaggaggcccagcgagaagccgacatgcatcgcctcttcaatcaccccaacatccttcgcctcgtggcttactgtctgagggaacggggtgctaagcatgaggcctggctgctgctaccattcttcaagagaggtacgctgtggaatgagatagaaaggctgaaggacaaaggcaacttcctgaccgaggatcaaatcctttggctgctgctggggatctgcagaggccttgaggccattcatgccaagggttatgcccacagagacttgaagcccaccaatatattgcttggagatgaggggcagccagttttaatggacttgggttccatgaatcaagcatgcatccatgtggagggctcccgccaggctctgaccctgcaggactgggcagcccagcggtgcaccatctcctaccgagccccagagctcttctctgtgcagagtcactgtgtcatcgatgagcggactgatgtctggtccctaggctgcgtgctatatgccatgatgtttggggaaggcccttatgacatggtgttccaaaagggtgacagtgtggcccttgctgtgcagaaccaactcagcatcccacaaagccccaggattttttcacaatgggggggggttccggaatccaatgaagaaccggggacccgcataaagggggcttaaaatatcttttctccttgaggaaactgggagggcctgcaccc

SEQ ID NO: 283307 - DNA, 809 bp, Homo sapiens
catttactcttcctagtcatcagagggagattttgttgttatctccctctaaagatcacggaacttaggcacagaaaagtaattagtccaggtttgacgaataagtgactagtagatgctgaattcagatactggtagtctggcttctaactacttctctagttagatacttcaaaaaaagagaaagaaacagcctatattttatttaactcagcaaaaagtccttcttatttcatcattttgttcttacccctttttgtttgagttttagatactttctaggcatattcctgcaaatataatacctattaggggaactctgcatgatactaatgatgctcaatttttttctgttgacaggggagccttagcatcatcaaatctaaaattccaacatactgctccatatgctgttgaagaagggagccaacaaaaattgttttttctacctgttgacgtgtcaagcactaactgatttctgttgtgtgtctaggtgacgagttctaatttaatgcaattttctgctcaataaaagacaagataattatgtcctaaaaatcaatggtccttctgatggagtttggatttcttctggcaagcacttgaagacagtggaaagttttaaagaagaggagtgaagccactggctttgactgggtgagagaaagaagcaaaggcaaaggaatgtccagctaggcagaaaactggataaaatgacgaaaagagaaactgtctacaaaagcatctatggttctggttttactcaactgtgttcttaagcactcaataaatatttgttaaaagagtga

SEQ ID NO: 283308 - DNA, 527 bp, Homo sapiens
ctaagtttaaatgagacactatttgcaaagtgtttagaaataatcctatatacttattaaaatttcagtaaatattagctattattatttcctaggcaagccacttttatttcaactaccttaaacacatgtgatcaaatcttttacaaacgtaacatcttttcaccttaaataacttgctgtttttgtaggatttctgttgtgtgtctaggtgacgagttctaatttaatgcaattttctgctcaataaaagacaagataattatgtcctaaaaatcaatggtccttctgatggagtttggatttcttctggcaagcacttgaagacagtggaaagttttaaagaagaggagtgaagccactggctttgactgggtgagagaaagaagcaaaggcaaaggaatgtccagctaggcagaaaactggataaaatgacgaaaagagaaactgtctacaaaagcatctatggttctggttttactcaactgtgttcttaagcactcaataaatatttgttaaaagagtga

SEQ ID NO: 283309 - DNA, 783 bp, Homo sapiens
tctggtactggtcccggaatccttatgatggcgctcggtggcggtagccgcggttgttggccgaccgagtgccggtcataagccccccccggtggggggcagctggtgtgcggatcgcggcgggagagaggcgcggtaggaacgggtccccggagccgtgaaccgcgggtacaggtgtcctgtctgcgctctctgccaagccggcttgcttcctgatctgttgctagggccgctggaccccgttgctaaggacccttgagatcgtgagcgcttggagtgtacccctcctttcctggggtagagggtcagtcgagagtagccttcgttaaccttaattgaaactggtaaactcctccctcggcccctttaaaaaatctctgttttttctttattttttttctgtgtcttcctcttttgctgactttgatagcatcctggctctggactggtctttaagtatctagaagtgagtgtaggaggggtggctgggaaggtggaaaatagattctaagacccctaagcagattgtgcgaccctaatactggccctttgaatttactttctggtaaaaaagggactgggataagtgactattgggctctgggtcttttagaatttgacagagctttacaaatggaacatggtttctttagtggggctcttacttacacgtttggaactttctagacctggattagaaagcagggctctgctgactgagaattgttttagttcagtggtcttaaagctgagtacgggagaaagtacatacagggaaagaaa

SEQ ID NO: 283310 - DNA, 2132 bp, Homo sapiens
ccaggttcaggggcgggccgcgcggagctcattttccccaaacgcaggcgctcggtggcggtagccgcggttgttggccgaccgagtgccggtcataagccccccccggtggggggcagctggtgtgcggatcgcggcgggagagaggcgcggagtgaaagggaagcaatgcagaaatcagagggctctggaggtacacagttgaaaaacagagcaacaggtaactatgatcaaaggacatcatcaagcacacagttaaaacacaggaatgcagttcagggaagcaaatcctcattgtcaaccagttctccagagtctgcaagaaaacttcatcctagaccaagtgataaactgaaccctaaaacaattaatccgtttggtgaacagtcacgagtgccttctgcatttgcagctatttactctaaaggaggtattccttgcagattggtacatggttcagtaaaacacagattacagtgggaatgtcctcctgaaagtctttcatttgatccacttcttattactttagctgagggtctgagagagactaagcatccatacacttttgtgtcaaaggagggttttagagaattacttttggtcaaaggtgctcctgaaaaagctattcctttgctacctagactgattcctgtgctaaaggcagctctggtccattcggatgatgaagtgtttgaaagaggattgaatgctctagttcagctaagtgtcgttgttggtccttctctaaacgaccatctgaagcatctgcttacaagcgggagccttagcatcatcaaatctaaaattccaacatactgctccatatgctgttgaagaagggagccaacaaaaattgttttttctacctgttgacgtgtcaagcactaactgtgggtactcatttattttattcttttgtaaatcacagccaccattcattatttactaggttaagatgaatagacactgaatcaaagttattcatcaacaaaaaagaacagttactaatggaaagttattaaaataagttctataagagtacaattttgaggtttattttttgtatttttattatttgtgcgaagaaccattattgagtttgcaagataagatgtatttgtattttctagtgtctttttatttataacaacacttttttggcaatcagtttgtagctgtgcccttatttttatagatagtttgccatttcttgggtttaatgtttaacaaggctatagaagtttaaaatagtggacaaatgtttgtgaatacacttttaaaaaattgttttaaaagagaaaagcggtcttgctttgttgcccagactggagtgcagtggcataatcatagctcaccgcaagcctcaaatttttgtgctcagatgatccttttcatctcagcctcctgattagctgggactataggcgtgtgccaccatgcccagctaattttgaaatttgcttgtagagatgggatctcactctgttgtccaggctggtctcagaattctggtgagtgatcctcccacagtggacttccaaagtgctgggattacaggtgtgagccaccatgcctggccccatgaatacactactaatattatttgtaaatatgtattttataatgtacaatgcttggaaaattttcagagtattctagtttaaaaaattttttctaattctgtaaattctattacaagtatgttgtttattacaactcattacaactacctaaattttaggtgttaactgtatttaagtaaatgtgttatttttgcatttcatagccagaaaatactgatgttcacttaaagatattcagcaattaaaatgttaaaacttgtacatgcattcattgattttgttgtgcttatgtttagcaatttttaagaagcttttaaaatataatatagacatagttcagaattttgatgtaatagaagcaattccctctggctacaacagctgcctgcctgctggccttgcttttacctgttttcattgcattgagcaccatccagagctatctgccatctagaaagtactgtaagatttaattaattacaaaatttcttggaaaagacctgtaacatagacagtagagttataaacattttattttgcttttatttt

SEQ ID NO: 283311 - DNA, 2324 bp, Homo sapiens
tctggtactggtcccggaatccttatgatggcgctcggtggcggtagccgcggttgttggccgaccgagtgccggtcataagccccccccggtggggggcagctggtgtgcggatcgcggcgggagagaggcgcggtaggaacgggtccccggagccgtgaaccgcgggtacaggtgtcctgtctgcgctctctgccaagccggcttgcttcctgatctgttgctagggccgctggaccccgttgctaaggacccttgagatcgtgagcgcttggagtgtacccctcctttcctggggtagagggtcagtcgagagtagccttcgttaaccttaattgaaactggagtgaaagggaagcaatgcagaaatcagagggctctggaggtacacagttgaaaaacagagcaacaggtaactatgatcaaaggacatcatcaagcacacagttaaaacacaggaatgcagttcagggaagcaaatcctcattgtcaaccagttctccagagtctgcaagaaaacttcatcctagaccaagtgataaactgaaccctaaaacaattaatccgtttggtgaacagtcacgagtgccttctgcatttgcagctatttactctaaaggaggtattccttgcagattggtacatggttcagtaaaacacagattacagtgggaatgtcctcctgaaagtctttcatttgatccacttcttattactttagctgagggtctgagagagactaagcatccatacacttttgtgtcaaaggagggttttagagaattacttttggtcaaaggtgctcctgaaaaagctattcctttgctacctagactgattcctgtgctaaaggcagctctggtccattcggatgatgaagtgtttgaaagaggattgaatgctctagttcagctaagtgtcgttgttggtccttctctaaacgaccatctgaagcatctgcttacaagcgggagccttagcatcatcaaatctaaaattccaacatactgctccatatgctgttgaagaagggagccaacaaaaattgttttttctacctgttgacgtgtcaagcactaactgtgggtactcatttattttattcttttgtaaatcacagccaccattcattatttactaggttaagatgaatagacactgaatcaaagttattcatcaacaaaaaagaacagttactaatggaaagttattaaaataagttctataagagtacaattttgaggtttattttttgtatttttattatttgtgcgaagaaccattattgagtttgcaagataagatgtatttgtattttctagtgtctttttatttataacaacacttttttggcaatcagtttgtagctgtgcccttatttttatagatagtttgccatttcttgggtttaatgtttaacaaggctatagaagtttaaaatagtggacaaatgtttgtgaatacacttttaaaaaattgttttaaaagagaaaagcggtcttgctttgttgcccagactggagtgcagtggcataatcatagctcaccgcaagcctcaaatttttgtgctcagatgatccttttcatctcagcctcctgattagctgggactataggcgtgtgccaccatgcccagctaattttgaaatttgcttgtagagatgggatctcactctgttgtccaggctggtctcagaattctggtgagtgatcctcccacagtggacttccaaagtgctgggattacaggtgtgagccaccatgcctggccccatgaatacactactaatattatttgtaaatatgtattttataatgtacaatgcttggaaaattttcagagtattctagtttaaaaaattttttctaattctgtaaattctattacaagtatgttgtttattacaactcattacaactacctaaattttaggtgttaactgtatttaagtaaatgtgttatttttgcatttcatagccagaaaatactgatgttcacttaaagatattcagcaattaaaatgttaaaacttgtacatgcattcattgattttgttgtgcttatgtttagcaatttttaagaagcttttaaaatataatatagacatagttcagaattttgatgtaatagaagcaattccctctggctacaacagctgcctgcctgctggccttgcttttacctgttttcattgcattgagcaccatccagagctatctgccatctagaaagtactgtaagatttaattaattacaaaatttcttggaaaagacctgtaacatagacagtagagttataaacattttattttgcttttatttt

SEQ ID NO: 283312 - DNA, 2698 bp, Homo sapiens
ccaggttcaggggcgggccgcgcggagctcattttccccaaacgcaggcgctcggtggcggtagccgcggttgttggccgaccgagtgccggtcataagccccccccggtggggggcagctggtgtgcggatcgcggcgggagagaggcgcggtaggaacgggtccccggagccgtgaaccgcgggtacaggtgtcctgtctgcgctctctgccaagccggcttgcttcctgatctgttgctagggccgctggaccccgttgctaaggacccttgagatcgtgagcgcttggagtgtacccctcctttcctggggtagagggtcagtcgagagtagccttcgttaaccttaattgaaactggttcgcttctccccatcactgcccctttacaccatcctctacatgttatttaatgaaaaaccacttgaaagggttaccaaggataagatttttaaagcttgctttcacaaacaactcatgctccaggcttgtcagtggcatgcttccagtctctttcagatacccaaatccacccatgccaaagtcctccagtctgctctccgtatccgtggttgggtcaaatctatagatgtggaacccgcatatacggagagccaactgtaatttgtcgttaagtttgttacaggaacaactttttgacgtgaaggaagatagaaatttagccataaaattccatccaaaacttccactgaattggagtgaaagggaagcaatgcagaaatcagagggctctggaggtacacagttgaaaaacagagcaacaggtaactatgatcaaaggacatcatcaagcacacagttaaaacacaggaatgcagttcagggaagcaaatcctcattgtcaaccagttctccagagtctgcaagaaaacttcatcctagaccaagtgataaactgaaccctaaaacaattaatccgtttggtgaacagtcacgagtgccttctgcatttgcagctatttactctaaaggaggtattccttgcagattggtacatggttcagtaaaacacagattacagtgggaatgtcctcctgaaagtctttcatttgatccacttcttattactttagctgagggtctgagagagactaagcatccatacacttttgtgtcaaaggagggttttagagaattacttttggtcaaaggtgctcctgaaaaagctattcctttgctacctagactgattcctgtgctaaaggcagctctggtccattcggatgatgaagtgtttgaaagaggattgaatgctctagttcagctaagtgtcgttgttggtccttctctaaacgaccatctgaagcatctgcttacaagcgggagccttagcatcatcaaatctaaaattccaacatactgctccatatgctgttgaagaagggagccaacaaaaattgttttttctacctgttgacgtgtcaagcactaactgtgggtactcatttattttattcttttgtaaatcacagccaccattcattatttactaggttaagatgaatagacactgaatcaaagttattcatcaacaaaaaagaacagttactaatggaaagttattaaaataagttctataagagtacaattttgaggtttattttttgtatttttattatttgtgcgaagaaccattattgagtttgcaagataagatgtatttgtattttctagtgtctttttatttataacaacacttttttggcaatcagtttgtagctgtgcccttatttttatagatagtttgccatttcttgggtttaatgtttaacaaggctatagaagtttaaaatagtggacaaatgtttgtgaatacacttttaaaaaattgttttaaaagagaaaagcggtcttgctttgttgcccagactggagtgcagtggcataatcatagctcaccgcaagcctcaaatttttgtgctcagatgatccttttcatctcagcctcctgattagctgggactataggcgtgtgccaccatgcccagctaattttgaaatttgcttgtagagatgggatctcactctgttgtccaggctggtctcagaattctggtgagtgatcctcccacagtggacttccaaagtgctgggattacaggtgtgagccaccatgcctggccccatgaatacactactaatattatttgtaaatatgtattttataatgtacaatgcttggaaaattttcagagtattctagtttaaaaaattttttctaattctgtaaattctattacaagtatgttgtttattacaactcattacaactacctaaattttaggtgttaactgtatttaagtaaatgtgttatttttgcatttcatagccagaaaatactgatgttcacttaaagatattcagcaattaaaatgttaaaacttgtacatgcattcattgattttgttgtgcttatgtttagcaatttttaagaagcttttaaaatataatatagacatagttcagaattttgatgtaatagaagcaattccctctggctacaacagctgcctgcctgctggccttgcttttacctgttttcattgcattgagcaccatccagagctatctgccatctagaaagtactgtaagatttaattaattacaaaatttcttggaaaagacctgtaacatagacagtagagttataaacattttattttgcttttatttt

SEQ ID NO: 283313 - DNA, 2620 bp, Homo sapiens
ccaggttcaggggcgggccgcgcggagctcattttccccaaacgcaggcgctcggtggcggtagccgcggttgttggccgaccgagtgccggtcataagccccccccggtggggggcagctggtgtgcggatcgcggcgggagagaggcgcggtaggaacgggtccccggagccgtgaaccgcgggtacaggtgtcctgtctgcgctctctgccaagccggcttgcttcctgatctgttgctagggccgctggaccccgttgctaaggacccttgagatcgtgagcgcttggagtgtacccctcctttcctggggtagagggtcagtcgagagtagccttcgttaaccttaattgaaactggttcgcttctccccatcactgcccctttacaccatcctctacatgttatttaatgaaaaaccacttgaaagggttaccaaggataagatttttaaagcttgctttcacaaacaactcatgctccaggcttgtcagtggcatgcttccagtctctttcagatacccaaatccacccatgccaaagtcctccagtctgctctccgtatccgtggttgggtcaaatctatagatgtggaacccgcatatacggagagccaactgtaatttgtcgttaagtttgttacaggaacaactttttgacgtgaaggaagatagaaatttagccataaaattccatccaaaacttccactgaattggagtgaaagggaagcaatgcagaaatcagagggctctggaggtacacagttgaaaaacagagcaacaggtaactatgatcaaaggacatcatcaagcacacagttaaaacacaggaatgcagttcagggaagcaaatcctcattgtcaaccagttctccagagtctgcaagaaaacttcatcctagaccaagtgataaactgaaccctaaaacaattaatccgggtctgagagagactaagcatccatacacttttgtgtcaaaggagggttttagagaattacttttggtcaaaggtgctcctgaaaaagctattcctttgctacctagactgattcctgtgctaaaggcagctctggtccattcggatgatgaagtgtttgaaagaggattgaatgctctagttcagctaagtgtcgttgttggtccttctctaaacgaccatctgaagcatctgcttacaagcctttccaagagattaatggacaagaaattcaaagagccaatcaccagcgcattacaaaagctagagcaacatggtggaagtgggagccttagcatcatcaaatctaaaattccaacatactgctccatatgctgttgaagaagggagccaacaaaaattgttttttctacctgttgacgtgtcaagcactaactgtgggtactcatttattttattcttttgtaaatcacagccaccattcattatttactaggttaagatgaatagacactgaatcaaagttattcatcaacaaaaaagaacagttactaatggaaagttattaaaataagttctataagagtacaattttgaggtttattttttgtatttttattatttgtgcgaagaaccattattgagtttgcaagataagatgtatttgtattttctagtgtctttttatttataacaacacttttttggcaatcagtttgtagctgtgcccttatttttatagatagtttgccatttcttgggtttaatgtttaacaaggctatagaagtttaaaatagtggacaaatgtttgtgaatacacttttaaaaaattgttttaaaagagaaaagcggtcttgctttgttgcccagactggagtgcagtggcataatcatagctcaccgcaagcctcaaatttttgtgctcagatgatccttttcatctcagcctcctgattagctgggactataggcgtgtgccaccatgcccagctaattttgaaatttgcttgtagagatgggatctcactctgttgtccaggctggtctcagaattctggtgagtgatcctcccacagtggacttccaaagtgctgggattacaggtgtgagccaccatgcctggccccatgaatacactactaatattatttgtaaatatgtattttataatgtacaatgcttggaaaattttcagagtattctagtttaaaaaattttttctaattctgtaaattctattacaagtatgttgtttattacaactcattacaactacctaaattttaggtgttaactgtatttaagtaaatgtgttatttttgcatttcatagccagaaaatactgatgttcacttaaagatattcagcaattaaaatgttaaaacttgtacatgcattcattgattttgttgtgcttatgtttagcaatttttaagaagcttttaaaatataatatagacatagttcagaattttgatgtaatagaagcaattccctctggctacaacagctgcctgcctgctggccttgcttttacctgttttcattgcattgagcaccatccagagctatctgccatctagaaagtactgtaagatttaattaattacaaaatttcttggaaaagacctgtaacatagacagtagagttataaacattttattttgcttttatttt

SEQ ID NO: 283314 - DNA, 2314 bp, Homo sapiens
tctggtactggtcccggaatccttatgatggcgctcggtggcggtagccgcggttgttggccgaccgagtgccggtcataagccccccccggtggggggcagctggtgtgcggatcgcggcgggagagaggcgcggtaggaacgggtccccggagccgtgaaccgcgggtacaggtgtcctgtctgcgctctctgccaagccggcttgcttcctgatctgttgctagggccgctggaccccgttgctaaggacccttgagatcgtgagcgcttggagtgtacccctcctttcctggggtagagggtcagtcgagagtagccttcgttaaccttaattgaaactggagtgaaagggaagcaatgcagaaatcagagggctctggaggtacacagttgaaaaacagagcaacaggtaactatgatcaaaggacatcatcaagcacacagttaaaacacaggaatgcagttcagggaagcaaatcctcattgtcaaccagttctccagagtctgcaagaaaacttcatcctagaccaagtgataaactgaaccctaaaacaattaatccgtttggtgaacagtcacgagtgccttctgcatttgcagctatttactctaaaggaggtattccttgcagggtctgagagagactaagcatccatacacttttgtgtcaaaggagggttttagagaattacttttggtcaaaggtgctcctgaaaaagctattcctttgctacctagactgattcctgtgctaaaggcagctctggtccattcggatgatgaagtgtttgaaagaggattgaatgctctagttcagctaagtgtcgttgttggtccttctctaaacgaccatctgaagcatctgcttacaagcctttccaagagattaatggacaagaaattcaaagagccaatcaccagcgcattacaaaagctagagcaacatggtggaagtgggagccttagcatcatcaaatctaaaattccaacatactgctccatatgctgttgaagaagggagccaacaaaaattgttttttctacctgttgacgtgtcaagcactaactgtgggtactcatttattttattcttttgtaaatcacagccaccattcattatttactaggttaagatgaatagacactgaatcaaagttattcatcaacaaaaaagaacagttactaatggaaagttattaaaataagttctataagagtacaattttgaggtttattttttgtatttttattatttgtgcgaagaaccattattgagtttgcaagataagatgtatttgtattttctagtgtctttttatttataacaacacttttttggcaatcagtttgtagctgtgcccttatttttatagatagtttgccatttcttgggtttaatgtttaacaaggctatagaagtttaaaatagtggacaaatgtttgtgaatacacttttaaaaaattgttttaaaagagaaaagcggtcttgctttgttgcccagactggagtgcagtggcataatcatagctcaccgcaagcctcaaatttttgtgctcagatgatccttttcatctcagcctcctgattagctgggactataggcgtgtgccaccatgcccagctaattttgaaatttgcttgtagagatgggatctcactctgttgtccaggctggtctcagaattctggtgagtgatcctcccacagtggacttccaaagtgctgggattacaggtgtgagccaccatgcctggccccatgaatacactactaatattatttgtaaatatgtattttataatgtacaatgcttggaaaattttcagagtattctagtttaaaaaattttttctaattctgtaaattctattacaagtatgttgtttattacaactcattacaactacctaaattttaggtgttaactgtatttaagtaaatgtgttatttttgcatttcatagccagaaaatactgatgttcacttaaagatattcagcaattaaaatgttaaaacttgtacatgcattcattgattttgttgtgcttatgtttagcaatttttaagaagcttttaaaatataatatagacatagttcagaattttgatgtaatagaagcaattccctctggctacaacagctgcctgcctgctggccttgcttttacctgttttcattgcattgagcaccatccagagctatctgccatctagaaagtactgtaagatttaattaattacaaaatttcttggaaaagacctgtaacatagacagtagagttataaacattttattttgcttttatttt

SEQ ID NO: 283315 - DNA, 1778 bp, Homo sapiens
aaatttttgatttttgtttaagcaagtaaagactcaatttttctgttattagcataatgaaatgggtagtaaatcatgtttcctcttggtctttgtcagggtctgagagagactaagcatccatacacttttgtgtcaaaggagggttttagagaattacttttggtcaaaggtgctcctgaaaaagctattcctttgctacctagactgattcctgtgctaaaggcagctctggtccattcggatgatgaagtgtttgaaagaggattgaatgctctagttcagctaagtgtcgttgttggtccttctctaaacgaccatctgaagcatctgcttacaagcctttccaagagattaatggacaagaaattcaaagagccaatcaccagcgcattacaaaagctagagcaacatggtggaagtgggagccttagcatcatcaaatctaaaattccaacatactgctccatatgctgttgaagaagggagccaacaaaaattgttttttctacctgttgacgtgtcaagcactaactgtgggtactcatttattttattcttttgtaaatcacagccaccattcattatttactaggttaagatgaatagacactgaatcaaagttattcatcaacaaaaaagaacagttactaatggaaagttattaaaataagttctataagagtacaattttgaggtttattttttgtatttttattatttgtgcgaagaaccattattgagtttgcaagataagatgtatttgtattttctagtgtctttttatttataacaacacttttttggcaatcagtttgtagctgtgcccttatttttatagatagtttgccatttcttgggtttaatgtttaacaaggctatagaagtttaaaatagtggacaaatgtttgtgaatacacttttaaaaaattgttttaaaagagaaaagcggtcttgctttgttgcccagactggagtgcagtggcataatcatagctcaccgcaagcctcaaatttttgtgctcagatgatccttttcatctcagcctcctgattagctgggactataggcgtgtgccaccatgcccagctaattttgaaatttgcttgtagagatgggatctcactctgttgtccaggctggtctcagaattctggtgagtgatcctcccacagtggacttccaaagtgctgggattacaggtgtgagccaccatgcctggccccatgaatacactactaatattatttgtaaatatgtattttataatgtacaatgcttggaaaattttcagagtattctagtttaaaaaattttttctaattctgtaaattctattacaagtatgttgtttattacaactcattacaactacctaaattttaggtgttaactgtatttaagtaaatgtgttatttttgcatttcatagccagaaaatactgatgttcacttaaagatattcagcaattaaaatgttaaaacttgtacatgcattcattgattttgttgtgcttatgtttagcaatttttaagaagcttttaaaatataatatagacatagttcagaattttgatgtaatagaagcaattccctctggctacaacagctgcctgcctgctggccttgcttttacctgttttcattgcattgagcaccatccagagctatctgccatctagaaagtactgtaagatttaattaattacaaaatttcttggaaaagacctgtaacatagacagtagagttataaacattttattttgcttttatttt

SEQ ID NO: 283316 - DNA, 2030 bp, Homo sapiens
tctggtactggtcccggaatccttatgatggcgctcggtggcggtagccgcggttgttggccgaccgagtgccggtcataagccccccccggtggggggcagctggtgtgcggatcgcggcgggagagaggcgcggtaggaacgggtccccggagccgtgaaccgcgggtacaggtgtcctgtctgcgctctctgccaagccggcttgcttcctgatctgttgctagggccgctggaccccgttgctaaggacccttgagatcgtgagcgcttggagtgtacccctcctttcctggggtagagggtcagtcgagagtagccttcgttaaccttaattgaaactggagtgaaagggaagcaatgcagaaatcagagggctctggaggtacacagttgaaaaacagagcaacaggtaactatgatcaaaggacatcatcaagcacacagttaaaacacaggaatgcagttcagggaagcaaatcctcattgtcaaccagttctccagagtctgcaagaaaacttcatcctagaccaagtgataaactgaaccctaaaacaattaatccggtccattcggatgatgaagtgtttgaaagaggattgaatgctctagttcagctaagtgtcgttgttggtccttctctaaacgaccatctgaagcatctgcttacaagcgggagccttagcatcatcaaatctaaaattccaacatactgctccatatgctgttgaagaagggagccaacaaaaattgttttttctacctgttgacgtgtcaagcactaactgtgggtactcatttattttattcttttgtaaatcacagccaccattcattatttactaggttaagatgaatagacactgaatcaaagttattcatcaacaaaaaagaacagttactaatggaaagttattaaaataagttctataagagtacaattttgaggtttattttttgtatttttattatttgtgcgaagaaccattattgagtttgcaagataagatgtatttgtattttctagtgtctttttatttataacaacacttttttggcaatcagtttgtagctgtgcccttatttttatagatagtttgccatttcttgggtttaatgtttaacaaggctatagaagtttaaaatagtggacaaatgtttgtgaatacacttttaaaaaattgttttaaaagagaaaagcggtcttgctttgttgcccagactggagtgcagtggcataatcatagctcaccgcaagcctcaaatttttgtgctcagatgatccttttcatctcagcctcctgattagctgggactataggcgtgtgccaccatgcccagctaattttgaaatttgcttgtagagatgggatctcactctgttgtccaggctggtctcagaattctggtgagtgatcctcccacagtggacttccaaagtgctgggattacaggtgtgagccaccatgcctggccccatgaatacactactaatattatttgtaaatatgtattttataatgtacaatgcttggaaaattttcagagtattctagtttaaaaaattttttctaattctgtaaattctattacaagtatgttgtttattacaactcattacaactacctaaattttaggtgttaactgtatttaagtaaatgtgttatttttgcatttcatagccagaaaatactgatgttcacttaaagatattcagcaattaaaatgttaaaacttgtacatgcattcattgattttgttgtgcttatgtttagcaatttttaagaagcttttaaaatataatatagacatagttcagaattttgatgtaatagaagcaattccctctggctacaacagctgcctgcctgctggccttgcttttacctgttttcattgcattgagcaccatccagagctatctgccatctagaaagtactgtaagatttaattaattacaaaatttcttggaaaagacctgtaacatagacagtagagttataaacattttattttgcttttatttt

SEQ ID NO: 283317 - DNA, 1607 bp, Homo sapiens
ccaggttcaggggcgggccgcgcggagctcattttccccaaacgcaggcgctcggtggcggtagccgcggttgttggccgaccgagtgccggtcataagccccccccggtggggggcagctggtgtgcggatcgcggcgggagagaggcgcggagtgaaagggaagcaatgcagaaatcagagggctctggaggtacacagttgaaaaacagagcaacaggtaactatgatcaaaggacatcatcaagcacacagttaaaacacaggaatgcagttcagggaagcaaatcctcattgtcaaccagttctccagagtctgcaagaaaacttcatcctagaccaagtgataaactgaaccctaaaacaattaatccgtttggtgaacagtcacgagtgccttctgcatttgcagctatttactctaaaggaggtattccttgcagattggtacatggttcagtaaaacacagattacagtgggaatgtcctcctgaaagtctttcatttgatccacttcttattactttagctgagggtctgagagagactaagcatccatacacttttgtgtcaaaggagggttttagagaattacttttggtcaaaggtgctcctgaaaaagctattcctttgctacctagactgattcctgtgctaaaggcagctctggtccattcggatgatgaagtgtttgaaagaggattgaatgctctagttcagctaagtgtcgttgttggtccttctctaaacgaccatctgaagcatctgcttacaagcgggagccttagcatcatcaaatctaaaattccaacatactgctccatatgctgttgaagaagggagccaacaaaaattgttttttctacctgttgacgtgtcaagcactaactgaccaccgcggataccaaaatccatgcacattcaagtcccacacttggcactgcagaacctgcagataagagaagttggtccttcctatcctgtatctttgatctgcatttggcagtggatgctgaagctgcaaattcagaggggcgactatatttattgacaaaaatccacatataagtggacccacacacttccaactagtgttgttcaagagtcaactgcacattgactgaaaacatagtctcctggagagtcatctgtggaaatccttcttctgggaagatgtacacggtgtatttgtacccagaggcacccatcacagctgcgttggagagaggcatgtgcaaagggaagccatttcaatcaaaattgggatcaccgattaaaatttattgtgcattgtagcttgagagatttgaggaaagcaatctttttctttttagaaatctttggttttagtgtaacaagaacctccccaccttcctgtgtgccacatactctttactgtcattgtaaatggctagatagtaatgggctgaggaaaatgttctggtttttaggaccagtcaaatgaactgctccatccagtatttaggagctggaggtctctggttctgctggctggtatacttatctatgatgaccattgcatttctttcattgcctgtgaaacccttcactgtgatatgatcacaacacaataaaagtagaatgag

SEQ ID NO: 283318 - DNA, 1429 bp, Homo sapiens
ccaggttcaggggcgggccgcgcggagctcattttccccaaacgcaggcgctcggtggcggtagccgcggttgttggccgaccgagtgccggtcataagccccccccggtggggggcagctggtgtgcggatcgcggcgggagagaggcgcggagtgaaagggaagcaatgcagaaatcagagggctctggaggtacacagttgaaaaacagagcaacaggtaactatgatcaaaggacatcatcaagcacacagttaaaacacaggaatgcagttcagggaagcaaatcctcattgtcaaccagttctccagagtctgcaagaaaacttcatcctagaccaagtgataaactgaaccctaaaacaattaatccgtttggtgaacagtcacgagtgccttctgcatttgcagctatttactctaaaggaggtattccttgcagattggtacatggttcagtaaaacacagattacagtgggaatgtcctcctgaaagtctttcatttgatccacttcttattactttagctgagggtctgagagagactaagcatccatacacttttgtgtcaaaggagggttttagagaattacttttggtcaaaggtgctcctgaaaaagctattcctttgctacctagactgattcctgtgctaaaggcagctctggtccattcggatgatgaagtgtttgaaagaggattgaatgctctagttcagctaagtgtcgttgttggtccttctctaaacgaccatctgaagcatctgcttacaagcgggagccttagcatcatcaaatctaaaattccaacatactgctccatatgctgttgaagaagggagccaacaaaaattgttttttctacctgttgacgtgtcaagcactaactgatttctgttgtgtgtctaggtgacgagttctaatttaatgcaattttctgctcaataaaagacaagataattatgtcctaaaaatcaatggtccttctgatggagtttggatttcttctggcaagcacttgaagacagtggaaagttttaaagaagaggagtgaagccactggctttgactgggtgagagaaagaagcaaaggcaaaggaatgtccagctaggcagaaaactggataaaatgacgaaaagagaaactgtctacaaaagcatctatggttctggttttactcaactgtgttcttaagcactcaataaatatttgttaaaagagtgattaactgacttcttggaatctagatttcagtacagtccagggcttaaaagatataacaatgatctcccttctccgtctatgacctcttcgtgatcacattcctttacataacaaaaatagttactgagtttgttaagctgggattgcctcagtttcttataattttacttgtgaagctgaaaaataaatgttgagattttata

SEQ ID NO: 283319 - DNA, 939 bp, Homo sapiens
tctggtactggtcccggaatccttatgatggcgctcggtggcggtagccgcggttgttggccgaccgagtgccggtcataagccccccccggtggggggcagctggtgtgcggatcgcggcgggagagaggcgcggtaggaacgggtccccggagccgtgaaccgcgggtacaggtgtcctgtctgcgctctctgccaagccggcttgcttcctgatctgttgctagggccgctggaccccgttgctaaggacccttgagatcgtgagcgcttggagtgtacccctcctttcctggggtagagggtcagtcgagagtagccttcgttaaccttaattgaaactggagtgaaagggaagcaatgcagaaatcagagggctctggaggtacacagttgaaaaacagagcaacaggtaactatgatcaaaggacatcatcaagcacacagttaaaacacaggaatgcagttcagggaagcaaatcctcattgtcaaccagttctccagagtctgcaagaaaacttcatcctagaccaagtgataaactgaaccctaaaacaattaatccggtccattcggatgatgaagtgtttgaaagaggattgaatgctctagttcagctaagtgtcgttgttggtccttctctaaacgaccatctgaagcatctgcttacaagcgggagccttagcatcatcaaatctaaaattccaacatactgctccatatgctgttgaagaagggagccaacaaaaattgttttttctacctgttgacgtgtcaagcactaactgtgggtactcatttattttattcttttgtaaatcacagccaccattcattatttactaggttaagatgaatagacactgaatcaaagttattcatcaacaaaaaagaacagttactaatggaaagttattaaaataagttctataagagta

SEQ ID NO: 283320 - DNA, 499 bp, Homo sapiens
cactgcagaacctgcagataagagaagttggtccttcctatcctgtatctttgatctgcatttggcagtggatgctgaagctgcaaattcagaggggcgactatatttattgacaaaaatccacatataagtggacccacacacttccaactagtgttgttcaagagtcaactgcacattgtaagtggagaagtggtaagttctgtttagtctcttttagtagattctcatgaacagtcccatgtgatcagagctcccctgactctagttgtcacagcactcccacgccacctaacgtccacccaggactaagttcactggggaaggatgaatggtgtgctaactccccaacagacctgactttagacatgaatattctgtgtactctaaatttgatactgtttccagcatctttatcaatcacctatggtagtatttaaaacatcacttaacccttaaaatcattgttccctcactaataaacttactttctttattc

SEQ ID NO: 283321 - DNA, 932 bp, Homo sapiens
ccaggttcaggggcgggccgcgcggagctcattttccccaaacgcaggcgctcggtggcggtagccgcggttgttggccgaccgagtgccggtcataagccccccccggtggggggcagctggtgtgcggatcgcggcgggagagaggcgcgggccgctggaccccgttgctaaggacccttgagatcgtgagcgcttggagtgtacccctcctttcctggggtagagggtcagtcgagagtagccttcgttaaccttaattgaaactgtctctttcagatacccaaatccacccatgccaaagtcctccagtctgctctccgtatccgtggttgggtcaaatctatagatgtggaacccgcatatacggagagccaactgtaatttgtcgttaagtttgttacaggaacaactttttgacgtgaaggaagatagaaatttagccataaaattccatccaaaacttccactgaattggagtgaaagggaagcaatgcagaaatcagagggctctggaggtacacagttgaaaaacagagcaacaggtaactatgatcaaaggacatcatcaagcacacagttaaaacacaggaatgcagttcagggaagcaaatcctcattgtcaaccagttctccagagtctgcaagaaaacttcatcctagaccaagtgataaactgaaccctaaaacaattaatccgtttggtgaacagtcacgagtgccttctgcatttgcagctatttactctaaaggaggtattccttgcagattggtacatggttcagtaaaacacagattacagtgggaatgtcctcctgaaagtctttcatttgatccacttcttattactttagctgaggtaaatatgccatctcttgaatatttatcagaaaataaacattaaaaattgcattaaatgctactttgtagct

SEQ ID NO: 283322 - DNA, 2213 bp, Homo sapiens
ccaggttcaggggcgggccgcgcggagctcattttccccaaacgcaggcgctcggtggcggtagccgcggttgttggccgaccgagtgccggtcataagccccccccggtggggggcagctggtgtgcggatcgcggcgggagagaggcgcggagtgaaagggaagcaatgcagaaatcagagggctctggaggtacacagttgaaaaacagagcaacaggtaactatgatcaaaggacatcatcaagcacacagttaaaacacaggaatgcagttcagggaagcaaatcctcattgtcaaccagttctccagagtctgcaagaaaacttcatcctagaccaagtgataaactgaaccctaaaacaattaatccgtttggtgaacagtcacgagtgccttctgcatttgcagctatttactctaaaggaggtattccttgcagattggtacatggttcagtaaaacacagattacagtgggaatgtcctcctgaaagtctttcatttgatccacttcttattactttagctgagggtctgagagagactaagcatccatacacttttgtgtcaaaggagggttttagagaattacttttggtcaaaggtgctcctgaaaaagctattcctttgctacctagactgattcctgtgctaaaggcagctctggtccattcggatgatgaagtgtttgaaagaggattgaatgctctagttcagctaagtgtcgttgttggtccttctctaaacgaccatctgaagcatctgcttacaagcctttccaagagattaatggacaagaaattcaaagagccaatcaccagcgcattacaaaagctagagcaacatggtggaagtgggagccttagcatcatcaaatctaaaattccaacatactgctccatatgctgttgaagaagggagccaacaaaaattgttttttctacctgttgacgtgtcaagcactaactgtgggtactcatttattttattcttttgtaaatcacagccaccattcattatttactaggttaagatgaatagacactgaatcaaagttattcatcaacaaaaaagaacagttactaatggaaagttattaaaataagttctataagagtacaattttgaggtttattttttgtatttttattatttgtgcgaagaaccattattgagtttgcaagataagatgtatttgtattttctagtgtctttttatttataacaacacttttttggcaatcagtttgtagctgtgcccttatttttatagatagtttgccatttcttgggtttaatgtttaacaaggctatagaagtttaaaatagtggacaaatgtttgtgaatacacttttaaaaaattgttttaaaagagaaaagcggtcttgctttgttgcccagactggagtgcagtggcataatcatagctcaccgcaagcctcaaatttttgtgctcagatgatccttttcatctcagcctcctgattagctgggactataggcgtgtgccaccatgcccagctaattttgaaatttgcttgtagagatgggatctcactctgttgtccaggctggtctcagaattctggtgagtgatcctcccacagtggacttccaaagtgctgggattacaggtgtgagccaccatgcctggccccatgaatacactactaatattatttgtaaatatgtattttataatgtacaatgcttggaaaattttcagagtattctagtttaaaaaattttttctaattctgtaaattctattacaagtatgttgtttattacaactcattacaactacctaaattttaggtgttaactgtatttaagtaaatgtgttatttttgcatttcatagccagaaaatactgatgttcacttaaagatattcagcaattaaaatgttaaaacttgtacatgcattcattgattttgttgtgcttatgtttagcaatttttaagaagcttttaaaatataatatagacatagttcagaattttgatgtaatagaagcaattccctctggctacaacagctgcctgcctgctggccttgcttttacctgttttcattgcattgagcaccatccagagctatctgccatctagaaagtactgtaagatttaattaattacaaaatttcttggaaaagacctgtaacatagacagtagagttataaacattttattttgcttttatttt

SEQ ID NO: 283323 - DNA, 2252 bp, Homo sapiens
ccaggttcaggggcgggccgcgcggagctcattttccccaaacgcaggcgctcggtggcggtagccgcggttgttggccgaccgagtgccggtcataagccccccccggtggggggcagctggtgtgcggatcgcggcgggagagaggcgcggtaggaacgggtccccggagccgtgaaccgcgggtacagtttgttacaggaacaactttttgacgtgaaggaagatagaaatttagccataaaattccatccaaaacttccactgaattggagtgaaagggaagcaatgcagaaatcagagggctctggaggtacacagttgaaaaacagagcaacaggtaactatgatcaaaggacatcatcaagcacacagttaaaacacaggaatgcagttcagggaagcaaatcctcattgtcaaccagttctccagagtctgcaagaaaacttcatcctagaccaagtgataaactgaaccctaaaacaattaatccgtttggtgaacagtcacgagtgccttctgcatttgcagctatttactctaaaggaggtattccttgcagattggtacatggttcagtaaaacacagattacagtgggaatgtcctcctgaaagtctttcatttgatccacttcttattactttagctgagggtctgagagagactaagcatccatacacttttgtgtcaaaggagggttttagagaattacttttggtcaaaggtgctcctgaaaaagctattcctttgctacctagactgattcctgtgctaaaggcagctctggtccattcggatgatgaagtgtttgaaagaggattgaatgctctagttcagctaagtgtcgttgttggtccttctctaaacgaccatctgaagcatctgcttacaagcgggagccttagcatcatcaaatctaaaattccaacatactgctccatatgctgttgaagaagggagccaacaaaaattgttttttctacctgttgacgtgtcaagcactaactgtgggtactcatttattttattcttttgtaaatcacagccaccattcattatttactaggttaagatgaatagacactgaatcaaagttattcatcaacaaaaaagaacagttactaatggaaagttattaaaataagttctataagagtacaattttgaggtttattttttgtatttttattatttgtgcgaagaaccattattgagtttgcaagataagatgtatttgtattttctagtgtctttttatttataacaacacttttttggcaatcagtttgtagctgtgcccttatttttatagatagtttgccatttcttgggtttaatgtttaacaaggctatagaagtttaaaatagtggacaaatgtttgtgaatacacttttaaaaaattgttttaaaagagaaaagcggtcttgctttgttgcccagactggagtgcagtggcataatcatagctcaccgcaagcctcaaatttttgtgctcagatgatccttttcatctcagcctcctgattagctgggactataggcgtgtgccaccatgcccagctaattttgaaatttgcttgtagagatgggatctcactctgttgtccaggctggtctcagaattctggtgagtgatcctcccacagtggacttccaaagtgctgggattacaggtgtgagccaccatgcctggccccatgaatacactactaatattatttgtaaatatgtattttataatgtacaatgcttggaaaattttcagagtattctagtttaaaaaattttttctaattctgtaaattctattacaagtatgttgtttattacaactcattacaactacctaaattttaggtgttaactgtatttaagtaaatgtgttatttttgcatttcatagccagaaaatactgatgttcacttaaagatattcagcaattaaaatgttaaaacttgtacatgcattcattgattttgttgtgcttatgtttagcaatttttaagaagcttttaaaatataatatagacatagttcagaattttgatgtaatagaagcaattccctctggctacaacagctgcctgcctgctggccttgcttttacctgttttcattgcattgagcaccatccagagctatctgccatctagaaagtactgtaagatttaattaattacaaaatttcttggaaaagacctgtaacatagacagtagagttataaacattttattttgcttttatttt

SEQ ID NO: 283324 - DNA, 2243 bp, Homo sapiens
tctggtactggtcccggaatccttatgatggcgctcggtggcggtagccgcggttgttggccgaccgagtgccggtcataagccccccccggtggggggcagctggtgtgcggatcgcggcgggagagaggcgcggtaggaacgggtccccggagccgtgaaccgcgggtacaggtgtcctgtctgcgctctctgccaagccggcttgcttcctgatctgttgctagggccgctggaccccgttgctaaggacccttgagatcgagtgaaagggaagcaatgcagaaatcagagggctctggaggtacacagttgaaaaacagagcaacaggtaactatgatcaaaggacatcatcaagcacacagttaaaacacaggaatgcagttcagggaagcaaatcctcattgtcaaccagttctccagagtctgcaagaaaacttcatcctagaccaagtgataaactgaaccctaaaacaattaatccgtttggtgaacagtcacgagtgccttctgcatttgcagctatttactctaaaggaggtattccttgcagattggtacatggttcagtaaaacacagattacagtgggaatgtcctcctgaaagtctttcatttgatccacttcttattactttagctgagggtctgagagagactaagcatccatacacttttgtgtcaaaggagggttttagagaattacttttggtcaaaggtgctcctgaaaaagctattcctttgctacctagactgattcctgtgctaaaggcagctctggtccattcggatgatgaagtgtttgaaagaggattgaatgctctagttcagctaagtgtcgttgttggtccttctctaaacgaccatctgaagcatctgcttacaagcgggagccttagcatcatcaaatctaaaattccaacatactgctccatatgctgttgaagaagggagccaacaaaaattgttttttctacctgttgacgtgtcaagcactaactgtgggtactcatttattttattcttttgtaaatcacagccaccattcattatttactaggttaagatgaatagacactgaatcaaagttattcatcaacaaaaaagaacagttactaatggaaagttattaaaataagttctataagagtacaattttgaggtttattttttgtatttttattatttgtgcgaagaaccattattgagtttgcaagataagatgtatttgtattttctagtgtctttttatttataacaacacttttttggcaatcagtttgtagctgtgcccttatttttatagatagtttgccatttcttgggtttaatgtttaacaaggctatagaagtttaaaatagtggacaaatgtttgtgaatacacttttaaaaaattgttttaaaagagaaaagcggtcttgctttgttgcccagactggagtgcagtggcataatcatagctcaccgcaagcctcaaatttttgtgctcagatgatccttttcatctcagcctcctgattagctgggactataggcgtgtgccaccatgcccagctaattttgaaatttgcttgtagagatgggatctcactctgttgtccaggctggtctcagaattctggtgagtgatcctcccacagtggacttccaaagtgctgggattacaggtgtgagccaccatgcctggccccatgaatacactactaatattatttgtaaatatgtattttataatgtacaatgcttggaaaattttcagagtattctagtttaaaaaattttttctaattctgtaaattctattacaagtatgttgtttattacaactcattacaactacctaaattttaggtgttaactgtatttaagtaaatgtgttatttttgcatttcatagccagaaaatactgatgttcacttaaagatattcagcaattaaaatgttaaaacttgtacatgcattcattgattttgttgtgcttatgtttagcaatttttaagaagcttttaaaatataatatagacatagttcagaattttgatgtaatagaagcaattccctctggctacaacagctgcctgcctgctggccttgcttttacctgttttcattgcattgagcaccatccagagctatctgccatctagaaagtactgtaagatttaattaattacaaaatttcttggaaaagacctgtaacatagacagtagagttataaacattttattttgcttttatttt

SEQ ID NO: 283325 - DNA, 1226 bp, Homo sapiens
ccaggttcaggggcgggccgcgcggagctcattttccccaaacgcaggcgctcggtggcggtagccgcggttgttggccgaccgagtgccggtcataagccccccccggtggggggcagctggtgtgcggatcgcggcgggagagaggcgcggagtgaaagggaagcaatgcagaaatcagagggctctggaggtacacagttgaaaaacagagcaacaggtaactatgatcaaaggacatcatcaagcacacagttaaaacacaggaatgcagttcagggaagcaaatcctcattgtcaaccagttctccagagtctgcaagaaaacttcatcctagaccaagtgataaactgaaccctaaaacaattaatccgtttggtgaacagtcacgagtgccttctgcatttgcagctatttactctaaaggaggtattccttgcagattggtacatggttcagtaaaacacagattacagtgggaatgtcctcctgaaagtctttcatttgatccacttcttattactttagctgagggtctgagagagactaagcatccatacacttttgtgtcaaaggagggttttagagaattacttttggtcaaaggtgctcctgaaaaagctattcctttgctacctagactgattcctgtgctaaaggcagctctggtccattcggatgatgaagtgtttgaaagaggattgaatgctctagttcagctaagtgtcgttgttggtccttctctaaacgaccatctgaagcatctgcttacaagcgggagccttagcatcatcaaatctaaaattccaacatactgctccatatgctgttgaagaagggagccaacaaaaattgttttttctacctgttgacgtgtcaagcactaactgatttctgttgtgtgtctaggtgacgagttctaatttaatgcaattttctgctcaataaaagacaagataattatgtcctaaaaatcaatggtccttctgatggagtttggatttcttctggcaagcacttgaagacagtggaaagttttaaagaagaggagtgaagccactggctttgactgggtgagagaaagaagcaaaggcaaaggaatgtccagctaggcagaaaactggataaaatgacgaaaagagaaactgtctacaaaagcatctatggttctggttttactcaactgtgttcttaagcactcaataaatatttgttaaaagagtga

SEQ ID NO: 283326 - DNA, 2198 bp, Homo sapiens
tctggtactggtcccggaatccttatgatggcgctcggtggcggtagccgcggttgttggccgaccgagtgccggtcataagccccccccggtggggggcagctggtgtgcggatcgcggcgggagagaggcgcgtttgttacaggaacaactttttgacgtgaaggaagatagaaatttagccataaaattccatccaaaacttccactgaattggagtgaaagggaagcaatgcagaaatcagagggctctggaggtacacagttgaaaaacagagcaacaggtaactatgatcaaaggacatcatcaagcacacagttaaaacacaggaatgcagttcagggaagcaaatcctcattgtcaaccagttctccagagtctgcaagaaaacttcatcctagaccaagtgataaactgaaccctaaaacaattaatccgggtctgagagagactaagcatccatacacttttgtgtcaaaggagggttttagagaattacttttggtcaaaggtgctcctgaaaaagctattcctttgctacctagactgattcctgtgctaaaggcagctctggtccattcggatgatgaagtgtttgaaagaggattgaatgctctagttcagctaagtgtcgttgttggtccttctctaaacgaccatctgaagcatctgcttacaagcgttttggtatcagcatgatgctggcctcataaaatgagttagggaggattccctctttttctattgattggaatagtttcagaagaatggtacaagctcctccttgtacctctggtggaattcagctgtgaatccatctggtcctggactttttttggttggggagccttagcatcatcaaatctaaaattccaacatactgctccatatgctgttgaagaagggagccaacaaaaattgttttttctacctgttgacgtgtcaagcactaactgtgggtactcatttattttattcttttgtaaatcacagccaccattcattatttactaggttaagatgaatagacactgaatcaaagttattcatcaacaaaaaagaacagttactaatggaaagttattaaaataagttctataagagtacaattttgaggtttattttttgtatttttattatttgtgcgaagaaccattattgagtttgcaagataagatgtatttgtattttctagtgtctttttatttataacaacacttttttggcaatcagtttgtagctgtgcccttatttttatagatagtttgccatttcttgggtttaatgtttaacaaggctatagaagtttaaaatagtggacaaatgtttgtgaatacacttttaaaaaattgttttaaaagagaaaagcggtcttgctttgttgcccagactggagtgcagtggcataatcatagctcaccgcaagcctcaaatttttgtgctcagatgatccttttcatctcagcctcctgattagctgggactataggcgtgtgccaccatgcccagctaattttgaaatttgcttgtagagatgggatctcactctgttgtccaggctggtctcagaattctggtgagtgatcctcccacagtggacttccaaagtgctgggattacaggtgtgagccaccatgcctggccccatgaatacactactaatattatttgtaaatatgtattttataatgtacaatgcttggaaaattttcagagtattctagtttaaaaaattttttctaattctgtaaattctattacaagtatgttgtttattacaactcattacaactacctaaattttaggtgttaactgtatttaagtaaatgtgttatttttgcatttcatagccagaaaatactgatgttcacttaaagatattcagcaattaaaatgttaaaacttgtacatgcattcattgattttgttgtgcttatgtttagcaatttttaagaagcttttaaaatataatatagacatagttcagaattttgatgtaatagaagcaattccctctggctacaacagctgcctgcctgctggccttgcttttacctgttttcattgcattgagcaccatccagagctatctgccatctagaaagtactgtaagatttaattaattacaaaatttcttggaaaagacctgtaacatagacagtagagttataaacattttattttgcttttatttt

SEQ ID NO: 283327 - DNA, 1122 bp, Homo sapiens
ccaggttcaggggcgggccgcgcggagctcattttccccaaacgcaggcgctcggtggcggtagccgcggttgttggccgaccgagtgccggtcataagccccccccggtggggggcagctggtgtgcggatcgcggcgggagagaggcgcggagtgaaagggaagcaatgcagaaatcagagggctctggaggtacacagttgaaaaacagagcaacaggtaactatgatcaaaggacatcatcaagcacacagttaaaacacaggaatgcagttcagggaagcaaatcctcattgtcaaccagttctccagagtctgcaagaaaacttcatcctagaccaagtgataaactgaaccctaaaacaattaatccgtttggtgaacagtcacgagtgccttctgcatttgcagctatttactctaaaggaggtattccttgcagattggtacatggttcagtaaaacacagattacagtgggaatgtcctcctgaaagtctttcatttgatccacttcttattactttagctgagggtctgagagagactaagcatccatacacttttgtgtcaaaggagggttttagagaattacttttggtcaaaggtgctcctgaaaaagctattcctttgctacctagactgattcctgtgctaaaggcagctctggtccattcggatgatgaagtgtttgaaagaggattgaatgctctagttcagctaagtgtcgttgttggtccttctctaaacgaccatctgaagcatctgcttacaagcctttccaagagattaatggacaagaaattcaaagagccaatcaccagcgcattacaaaagctagagcaacatggtggaagtgggagccttagcatcatcaaatctaaaattccaacatactgctccatatgctgttgaagaagggagccaacaaaaattgttttttctacctgttgacgtgtcaagcactaactgtgggtactcatttattttattcttttgtaaatcacagccaccattcattatttactaggttaagatgaatagacactgaatcaaagttattcatcaacaaaaaagaacagttactaatggaaagttattaaaataagttctataagagta

SEQ ID NO: 283328 - DNA, 799 bp, Homo sapiens
aggcaaggagcatctcattcattcacagacaagactgagctgggccaaaggtctctgtactggatctcatcttctgtcttccaatccacatccttttgggcatgagcagaaagactgagtctcactctgtcgtccaggctggagtgtagtggtacaacctccacctcctgggttcaagtgattctcctgcctcagcctcccaagtatgtgggactacaggtgtgcactaccaggcccggctaattttttttttgtatttttagtagatactaggttttgccatgctggttgggctggtctcgaactcctgacctcaagtgatctgcctgcctcgaccccccaaagtgctgggattataggtgtgagccaccatggctggcctgaacttcagattttttatctgtaaggaggggttaggaggcctaaattaagtcacccataaaaaggccatgtcacatgcagtcagtgcttagcaaggggctattttaatcgtcacactcaccagtcagagacacaaatctcaatcctgccactatccagcagttctggccacagaccctcctcctctaggtccaagacctgcttcttgcaacaccagctgggaatgcaggagacagggtaatgagaacaggcaggcctttctcaacaaggggccggacctttggatagcaggggcattcacctgaatgaagtcacgaagcacgtttgagaaggggccccaggcacggttgtcctgttttcctccaccacccagccgtccccaacgtgttgcaccatccactttcggaggccttctgtg

SEQ ID NO: 283329 - DNA, 1785 bp, Homo sapiens
acttgcgctgtcactcagcctggacgcgcttcttcgggtcgcgggtgcactccggcccggctcccgcctcggccccgatggacgccgcgttcctcctcgtcctcgggctgttggcccagagcctctgcctgtctttgggggttcctggatggaggaggcccaccaccctgtacccctggcgccgggcgcctgccctgagccgcgtgcggagggcctgggtcatccccccgatcagcgtatccgagaaccacaagcgtctcccctaccccctggttcagatcaagtcggacaagcagcagctgggcagcgtcatctacagcatccagggacccggcgtggatgaggagccccggggcgtcttctctatcgacaagttcacagggaaggtcttcctcaatgccatgctggaccgcgagaagactgatcgcttcaggctaagagcgtttgccctggacctgggaggatccaccctggaggaccccacggacctggagattgtagttgtggatcagaatgacaaccggccagccttcctgcaggaggcgttcactggccgcgtgctggagggtgcagtcccaggcacctatgtgaccagggcagaggccacagatgccgacgaccccgagacggacaacgcagcgctgcggttctccatcctgcagcagggcagccccgagctcttcagcatcgacgagctcacaggagagatccgcacagtgcaagtggggctggaccgcgaggtggtcgcggtgtacaatctgaccctgcaggtggcggacatgtctggagacggcctcacagccactgcctcagccatcatcacccttgatgacatcaatgacaatgcccccgagttcaccagggatgagttcttcatggaggccatagaggccgtcagcggagtggatgtgggacgcctggaagtggaggacagggacctgccaggctccccaaactgggtggccaggttcaccatcctggaaggcgaccccgatgggcagttcaccatccgcacggaccccaagaccaacgagggtgttctgtccattgtgaaggccctggactatgagagctgtgaacactacgaactcaaagtgtcggtgcagaatgaggccccgctgcaggcggctgcccttagggctgagcggggccaggccaaggtccgcgtgcatgtgcaggacaccaacgagccccccgtgttccaggagaacccacttcggaccagcctagcagagggggcacccccaggcactctggtggccaccttctctgcccgggaccctgacacagagcagctgcagaggctcagctactccaaggactacgacccggaagactggctgcaagtggacgcagccactggccggatccagacccagcacgtgctcagcccggcgtcccccttcctcaagggcggctggtacagagccatcgtcctggcccaggatgacgcctcccagccccgcaccgccaccggcaccctgtccatcgagatcctggaggtgaacgaccatgcacctgtgctggccccgccgccgccgggcagcctgtgcagcgagcaaaccagccaggctctctggcggcagggtgagactgcccccagggccttcattcagtgagccggtccgattcgcggatgggtcaccggtagtggcagcgccgggcggacaagccaggtgcggtaactggctggaaggacgccagaacttagagggggagaagttgtccgcgactgggggcgcatggatgcctggtctcgggggggccacaagaaagagcgcgccc

SEQ ID NO: 283330 - DNA, 2859 bp, Homo sapiens
acttgcgctgtcactcagcctggacgcgcttcttcgggtcgcgggtgcactccggcccggctcccgcctcggccccgatggacgccgcgttcctcctcgtcctcgggctgttggcccagagcctctgcctgtctttgggggttcctggatggaggaggcccaccaccctgtacccctggcgccgggcgcctgccctgagccgcgtgcggagggcctgggtcatccccccgatcagcgtatccgagaaccacaagcgtctcccctaccccctggttcagatcaagtcggacaagcagcagctgggcagcgtcatctacagcatccagggacccggcgtggatgaggagccccggggcgtcttctctatcgacaagttcacagggaaggtcttcctcaatgccatgctggaccgcgagaagactgatcgcttcaggctaagagcgtttgccctggacctgggaggatccaccctggaggaccccacggacctggagattgtagttgtggatcagaatgacaaccggccagccttcctgcaggaggcgttcactggccgcgtgctggagggtgcagtcccaggcacctatgtgaccagggcagaggccacagatgccgacgaccccgagacggacaacgcagcgctgcggttctccatcctgcagcagggcagccccgagctcttcagcatcgacgagctcacaggagagatccgcacagtgcaagtggggctggaccgcgaggtggtcgcggtgtacaatctgaccctgcaggtggcggacatgtctggagacggcctcacagccactgcctcagccatcatcacccttgatgacatcaatgacaatgcccccgagttcaccagggatgagttcttcatggaggccatagaggccgtcagcggagtggatgtgggacgcctggaagtggaggacagggacctgccaggctccccaaactgggtggccaggttcaccatcctggaaggcgaccccgatgggcagttcaccatccgcacggaccccaagaccaacgagggtgttctgtccattgtgaaggccctggactatgagagctgtgaacactacgaactcaaagtgtcggtgcagaatgaggccccgctgcaggcggctgcccttagggctgagcggggccaggccaaggtccgcgtgcatgtgcaggacaccaacgagccccccgtgttccaggagaacccacttcggaccagcctagcagagggggcacccccaggcactctggtggccaccttctctgcccgggaccctgacacagagcagctgcagaggctcagctactccaaggactacgacccggaagactggctgcaagtggacgcagccactggccggatccagacccagcacgtgctcagcccggcgtcccccttcctcaagggcggctggtacagagccatcgtcctggcccaggatgacgcctcccagccccgcaccgccaccggcaccctgtccatcgagatcctggaggtgaacgaccatgcacctgtgctggccccgccgccgccgggcagcctgtgcagcgagccacaccaaggcccaggcctcctcctgggcgccacggatgaggacctgcccccccacggggcccccttccacttccagctgagccccaggctcccagagctcggccggaactggagcctcagccaggtcaacgtgagccacgcgcgcctgcggccgcgacaccaggtccccgaaggcctgcaccgcctcagcctgctgctccgggactcggggcagccgccccagcagcgcgagcagcctctgaacgtgaccgtgtgccgctgcggcaaggacggcgtctgcctgccgggggccgcagcgctgctggcggggggcacaggcctcagcctgggcgcactggtcatcgtgctggccagcgccctcctgctgctggtgctggtcctgctcgtggcactccgggcgcggttctggaagcagtctcggggcaaggggctgctgcacggcccccaggacgaccttcgagacaatgtcctcaactacgatgagcaaggaggcggggaggaggaccaggacgcctacgacatcagccagctgcgtcacccgacagcgctgagcctgcctctgggaccgccgccacttcgcagagatgccccgcagggccgcctgcacccccagccaccccgagtgctgcccaccagccccctggacatcgccgacttcatcaatgatggcttggaggctgcagatagtgaccccagtgtgccgccttacgacacagccctcatctatgactacgagggtgacggctcggtggcggggacgctgagctccatcctgtccagccagggcgatgaggaccaggactacgactacctcagagactgggggccccgcttcgcccggctggcagacatgtatgggcacccgtgcgggttggagtacggggccagatgggaccaccaggccagggagggtctttctcctggggcactgctacccagacacagaggccggacagcctgaccctggggcgcaactggacatgccactccccggcctcgtggcagtgatggcccctgcagaggcagcctgaggtcaccgggcccgacccccctgggcctggggcagcctccttcctgtaggcgagggcccaagtctgggggcagaacctgagtgtggatggggcggccaggaagaggccccttcctgccggggtgggaagagtttctctccatcggccccatgcgggtcacctccctagtcccacctttgcctcctaccagtgaacctcatctttgtatgaaagacagcaacctcctgggtaaatctgaatgaaaaacgtgctagtctctttcatgca

SEQ ID NO: 283331 - DNA, 899 bp, Homo sapiens
gcgcattagctgcccgcctcaccccagtcgtccaatctcaaagcaccgggatccacctttgccataacaaaaggacactgacatccaatcaggattgaggtcgctgtgggcgggacctggaacagcgacagccaatgacagtaaagaagcgaagctaagcggcgctggtgaagcggctcatcaggtctatcaggaaacctgagaattggagtgagaatcccagtgtggaaaatcaggaaagaggctggtatgagcgacagagaagtcattcaggaaagaggttattgaattcattggagaatgaatgctgttctgaatttgtatcttaagggaaatactacaaaatgtcgcagaaggtgctggatggatatctaaagttcaaaaaggaagagaaccacacgagctggagattcaggaagcatcagtagaagtcaatggccattaataaaaacattttttattaaaatattgaatctgaatagaaacctcctgtacttcatttcttaaatcccttgagggtagtaactgcatcttctccattgatatagcccctgccaagcacagtgcctgaaggcaggtccacagacattggctgaataaacgagtgctctgttcccagtccgtactttctctgtgtcataaaaaagctgacatgtctgtgctgcatttgaggatgacactggatttccacattgccttttcgcctcagagcttatattacttcctatcaagttatctctctgcccctcatcgcatcccagtgagaaagcagaaaatcctagaaagtcattttccttactgttccggtggtggctcttcacgcttacagaacgttaggtacactgggaacatcacctagagggacactgacatcacctcatcataacatatgtctctga

SEQ ID NO: 283332 - DNA, 482 bp, Homo sapiens
gcgcattagctgcccgcctcaccccagtcgtccaatctcaaagcaccgggatccacctttgccataacaaaaggacactgacatccaatcaggattgaggtcgctgtgggcgggacctggaacagcgacagccaatgacagtaaagaagcgaagctaagcggcgctggtgaagcggctcatcaggtctatcaggaaacctgagaattggagtgagaatcccagtgtggaaaatcaggaaagaggctggtatgagcgacagagaagtcattcaggaaagaggttattgaattcattggagaatgaatgctgttctgaatttgtatcttaagggaaatactacaaaatgtcgcagaaggtgctggatggatatctaaagttcaaaaaggaagagaaccacacgagctggagattcaggaagcatcagtagaagtcaatggccattaataaaaacattttttattaaaatattgaatctgaatag

SEQ ID NO: 283333 - DNA, 251 bp, Homo sapiens
caatatcgcttgttagtaacataaataccagaaccgaaggcacttttggggtaacgaattcattggattatgaatgctgctctgaatttgtatcttaagggaaatactacaaaatgtcgcagaaggtgctggatggatatctaaagttcaaaaaggaagagaaccacacgagctggagattcaggaagcatcagtagaagtcaatggccattaataaaaacattttttattaaaatattgaatctgaatag

SEQ ID NO: 283334 - DNA, 784 bp, Homo sapiens
gcgcattagctgcccgcctcaccccagtcgtccaatctcaaagcaccgggatccacctttgccataacaaaaggacactgacatccaatcaggattgaggtcgctgtgggcgggacctggaacagcgacagccaatgacagtaaagaagcgaagctaagcggcgctggtgaagcggctcatcaggtctatcaggaaacctgagaattggagtgagaatcccagtgtggaaaatcaggaaagaggctggtatgagcgacagagaagtcattcaggaaagaggttattgaattcattggagaatgaatgctgttctgaatttggtagagggaatgtaagaaattaccaatgtacttttagagttttttcaagcaagaattccaaaggatttcaaggtctttatggaatcaagctttggactttatcataaaaatggaaataattaggaatgattctgtgcagtctcggtgctgtgaaaggagaataaaaacgtgagactccagttcactctgccagaaggaaaaaaataagctgaaagctgagtcatgcaagaagctgccttttcttctgttcctaagcagatagctacagataaaaggttaaatatctccataggtagctactctatgttcaccctatttcatgtaaagtgctgatttgctgcacacaagatgaatgcatcattcaccattcccctacctgcgccttttctcctgcaacttagattactataccctcgctcttacctctccaacccacttttcccctttaaatactgaagctctc

SEQ ID NO: 283335 - DNA, 591 bp, Homo sapiens
gcgcattagctgcccgcctcaccccagtcgtccaatctcaaagcaccgggatccacctttgccataacaaaaggacactgacatccaatcaggattgaggtcgctgtgggcgggacctggaacagcgacagccaatgacagtaaagaagcgaagctaagcggcgctggtgaagcggctcatcaggtctatcaggaaacctgagaattggagtgagaatcccagtgtggaaaatcaggaaagaggctggtatgagcgacagagaagtcattcaggaaagaggttattgaattcattggagaatgaatgctgttctgaatttgtatcctaagggaaataccacaaaatgtctcagaaaatgttggttggatatctaaagtttaaaaaggaagagaaccacaccagctggagattaaagaagcatcagtagaatatcttaagggaaatactacaaaatgtcgcagaaggtgctggatggatatctaaagttcaaaaaggaagagaaccacacgagctggagattcaggaagcatcagtagaagtcaatggccattaataaaaacattttttattaaaatattgaatctgaatag

SEQ ID NO: 283336 - DNA, 241 bp, Homo sapiens
  misc_feature (40)..(40): n is a, c, g, or t
  misc_feature (43)..(43): n is a, c, g, or t
cgccccccccctgcccggaagcaaaagcgccccttcaggntanctgaattcattggattatgaatgctgctctgaatttgtatcttaagggaaatactacaaaatgtcgcagaaggtgctggatggatatctaaagttcaaaaaggaagagaaccacacgagctggagattcaggaagcatcagtagaagtcaatggccattaataaaaacattttttattaaaatattgaatctgaatag

SEQ ID NO: 283337 - DNA, 240 bp, Homo sapiens
  misc_feature (31)..(31): n is a, c, g, or t
aatgtaaagtttaaagacaggaagaaccccnttttcaggttactgaattcattggattatgaatgctgctctgaatttgtatcttaagggaaatactacaaaatgtcgcagaaggtgctggatggatatctaaagttcaaaaaggaagagaaccacacgagctggagattcaggaagcatcagtagaagtcaatggccattaataaaaacattttttattaaaatattgaatctgaatag

SEQ ID NO: 283338 - DNA, 212 bp, Homo sapiens
  misc_feature (20)..(20): n is a, c, g, or t
cacggtgttccgagttttgnaatcttgggataagaatgctgttctgatttgtatcttaagggaaatactacaaaatgtcgcagaaggtgctggatggatatctaaagttcaaaaaggaagagaaccacacgagctggagattcaggaagcatcagtagaagtcaatggccattaataaaaacattttttattaaaatattgaatctgaatag

SEQ ID NO: 283339 - DNA, 623 bp, Homo sapiens
gcgcattagctgcccgcctcaccccagtcgtccaatctcaaagcaccgggatccacctttgccataacaaaaggacactgacatccaatcaggattgaggtcgctgtgggcgggacctggaacagcgacagccaatgacagtaaagaagcgaagctaagcggcgctggtgaagcggctcatcaggtctatcaggaaacctgagaattggagtgagaatcccagtgtggaaaatcaggaaagaggctggtatgagcgacagagaagtcattcaggaaagaggttattgaattcattggagaatgaatgctgttctgaatttgtatcttaagggaaatactacaaaatgtcgcagaaggtgctggatggatatctaaagttcaaaaaggaagagaaccacacgagctggagattcaggaagcatcagtagaagtcaatggccattaataaaaacattttttattaaaatattgaatctgaatagaaacctcctgtacttcatttcttaaatcccttgagggtagtaactgcatcttctccattgatataaactagcccccatctcaatcataccccaaatctctccctcactaaacgtaagccttctcctcactctctcaatctt

SEQ ID NO: 283340 - DNA, 1769 bp, Homo sapiens
agcaaatgatcttaaaatttatagtttgccattaatttttacttttaatgcagctggatctagcatggggtgggacatgcttccgaagtaagctggtataaatctatcagataacctgtctcttatgtttcaaagttaaatattaaattcatatattgtggtcttcaaaaggtattgctaggacattttaaaatgaattttgactgcaagcagtggttgttcaactaacctctttttagcgatgacttttaaagaaacttaccttccaggtgtgaacctcaaatggactgaataaccctgagttggttgcagtcccaggagcctgatgttaatgaggctgccaggatgaaatactccagaactgttggggatccaaattcgggtctcaccctagcagaactgatccaagaacgtcacaacttttgaagtcgattggcacagatcaagaccaagatttggccctttgtctgtaataagtagaggaacttggtgtgagttaactttttttttcccccagccattggtgtctggagttcccatcatcaatagaaggattagagaattctaggaatgatttcttttgatttggcaagggagatttggtcaattaggggaactactggaactgtggctctcactctgtgacagtgtgacatgtaggtgtgttggaattgggtgaatgactggctgctccttgatatcctaccccttgtgaccatcatttctgaaagcttgtttactgtgaaagattaaaacaaaacacatttagaatagtgcaattcgccatatatgacatctcagcatcttctgcttttcctggactccaaaattaaattgcagttcttgaaaatgtatgtatgccctttgttacagcaacagtagccttctgtcacaggggttatcttgcctaaaagatggataagaaagatgtatttatcaccaacacattcttcagctagattgcatcttgtcctatatatatagccataagtggattcctatatatagctattgatagactcctaggtaattacatgggatatgagttagatccagtctgacttggttttgttttgttcttttttttccccccggaatacaggacaggacccagggcgcttgtacgcggagccaggctgctctccaggcattgtgtaagcctcttgtgttgtgctctctttcaggtaggataattgcggactgaaccctcgggctgcggtcatatatgagaacttgctccgcgcggtcccctttgccgggatgtttccattgcttcatgtttcagtaaacaaaaggagtttgtgaccaactatgttttctttcttaattcttctaagttgacttttctttcctcctgaaactagtctctgtagcctttcactctgttccttatattctcagcctctgagcagccctaggtaaggattatgctggcatcccctttttcctgtgcagtggaacccctcttatcttgctttccctaggagttgaatccttctccctgcctacctgcagcatctcctttccctttaaaatgaccatgtagtggcaagcagccttttactcttctgttagctctggactcttaacacttaagttactcttctgaaattgctaggaccattgggggttttgttgttttgtttgttttttatgtccgacctgtgatcgtggtacagcattagctgaaatttacccttgttttactccactcctcccttttttaaaaaaattttttgacaaataaatgtttctaacacttaaaaaac

SEQ ID NO: 283341 - DNA, 1790 bp, Homo sapiens
caggctgtaccggtcgcgagtgttagggataggctcgagcggccgtcgccattttgtaaggttctctctgacgtgggagccgccgtcgctgccgccacccggaggctcttgtcaggatggtgaagctgttcatcggaaaccttccccgggaggctacagagcaggagattcgctcactcttcgagcagtatgggaaggtgctggaatgtgacatcattaagaattacggctttgtgcacatagaagacaagacggcagctgaggatgccatacgcaacctgcaccattacaagcttcatggggtgaacatcaacgtggaagccagcaagaataagagcaaagcttcaaccaagttacacgtgggtaacatcagccccacttgtaccaaccaagagcttcgagccaagtttgaggagtatggtccggtcatcgaatgtgacatcgtgaaagattatgccttcgtacacatggagcgggcagaggatgcagtggaggccatcaggggccttgacaacacagagtttcaaggcaaaagaatgcatgtgcagttgtccacaagccggcttcggactgcccctggtatgggagaccagagtggctgctatcggtgtgggaaagaagggcactggtccaaagagtgcccagtagatcgtacgggtcgtgtggcagactttactgagcagtataatgaacaatatggagcagttcgaacaccttacaccatgggctacggggaatccatgtattacaacgatgcatatggagcactcgactactataagcgataccgggtccgctcttatgaggcagtagcagcggcggcagcggcttctgcatacaactacgcagagcagaccatgtcccatctgcctcaagtccaaagcacaactgtgaccagccacctcaactctacttctgttgatccctatgacagacacctattgccaaactctggcgctgctgccacttcagctgctatggctgctgctgcagccaccacttcctcctactatggaagggacaggagcccactgcgtcgtgctgcagccatgctccccacagttggagagggctacggttatgggccagagagtgaattatctcaggcttccgcagctacacggaattctctgtatgacatggcccggtatgaacgggagcagtatgtggaccgagcccggtactcagccttttaaaaactggaggtaggataattgcggactgaaccctcgggctgcggtcatatatgagaacttgctccgcgcggtcccctttgccgggatgtttccattgcttcatgtttcagtaaacaaaaggagtttgtgaccaactatgttttctttcttaattcttctaagttgacttttctttcctcctgaaactagtctctgtagcctttcactctgttccttatattctcagcctctgagcagccctaggtaaggattatgctggcatcccctttttcctgtgcagtggaacccctcttatcttgctttccctaggagttgaatccttctccctgcctacctgcagcatctcctttccctttaaaatgaccatgtagtggcaagcagccttttactcttctgttagctctggactcttaacacttaagttactcttctgaaattgctaggaccattgggggttttgttgttttgtttgttttttatgtccgacctgtgatcgtggtacagcattagctgaaatttacccttgttttactccactcctcccttttttaaaaaaattttttgacaaataaatgtttctaacacttaaaaaac

SEQ ID NO: 283342 - DNA, 2997 bp, Homo sapiens
  misc_feature (651)..(651): n is a, c, g, or t
  misc_feature (681)..(681): n is a, c, g, or t
  misc_feature (722)..(722): n is a, c, g, or t
  misc_feature (863)..(863): n is a, c, g, or t
  misc_feature (923)..(924): n is a, c, g, or t
  misc_feature (1022)..(1022): n is a, c, g, or t
  misc_feature (1025)..(1025): n is a, c, g, or t
  misc_feature (1029)..(1029): n is a, c, g, or t
  misc_feature (1033)..(1037): n is a, c, g, or t
  misc_feature (1042)..(1042): n is a, c, g, or t
gcaagctccgcctcccgggttcacgccattctcctgcctcagcctcccaagtagctgggactacaggcgcccgccactacgcccggctaatttttgtatttttagtagagacggggtttcaccgttttagccgggatggtctcgatctcctgacctcgtgatccgcccgcctcggcctcccaaagtgctgggattacaggcgtgagccaccgcgcccggcacgcctaagcttgtttttaccgccaggaggtgcccttggaccacagctgaattttgaatgctagacagtcgggaaactcagttgcctagacttccagcttggtgtgtacgaggagaccctgtcccacccagaactagggacctcgctgggcctctccaccaagtattcctctggcgtgctcaccacagaccaggactgtgatggacacacaatgagtgagagagaatcagaccacggatactcacgagcaaacaaaacatgactaagcgtagcctgggtagcaatgcctcttaggcctgtcccagttctgccaggttatctttctgccccttggttctcagtttccgtagcaataaataacacctctgcaatgacaaactttaaaataatgtttaaagcgctacaaaacaatgactagttttgcttaaaangtggcgcacctgtatttttgaaatgtgccncaagctgccacagaaccggccagcccgctacaaaagccccnttttagggccctcggggagattcctctgtcattagctccccgcccccctcaaagggcccaagagcaggacccattgtggtgagcgactccccaaggcctccgcttttctaggcagtggttgcgttcagagcccctctgacncagcatggcgaccctttccaggtggtgactggctggctgggctgggggtggctgacctcnnggcccgcgccaccaccacagccccgcccccgtgctgcgtggtcatttgtatgcagcctcgggattggtcactcggctcccgcgaggggaaggggaggnaancagngcgnnnnngcgcntgcgtgagctggcgcgcgagaaagggcccggtcgcgtccaggctcgagcggccgtcgccattttgtaaggttctctctgacgtgggagccgccgtcgctgccgccacccggaggctcttgtcaggatggtgaagctgttcatcggaaaccttccccgggaggctacagagcaggagattcgctcactcttcgagcagtatgggaaggtgctggaatgtgacatcattaagaattacggctttgtgcacatagaagacaagacggcagctgaggatgccatacgcaacctgcaccattacaagcttcatggggtgaacatcaacgtggaagccagcaagaataagagcaaagcttcaaccaagttacacgtgggtaacatcagccccacttgtaccaaccaagagcttcgagccaagtttgaggagtatggtccggtcatcgaatgtgacatcgtgaaagattatgccttcgtacacatggagcgggcagaggatgcagtggaggccatcaggggccttgacaacacagagtttcaaggcaaaagaatgcatgtgcagttgtccacaagccggcttcggactgcccctggtatgggagaccagagtggctgctatcggtgtgggaaagaagggcactggtccaaagagtgcccagtagatcgtacgggtcgtgtggcagactttactgagcagtataatgaacaatatggagcagttcgaacaccttacaccatgggctacggggaatccatgtattacaacgatgcatatggagcactcgactactataagcgataccgggtccgctcttatgaggcagtagcagcggcggcagcggcttctgcatacaactacgcagagcagaccatgtcccatctgcctcaagtccaaagcacaactgtgaccagccacctcaactctacttctgttgatccctatgacagacacctattgccaaactctggcgctgctgccacttcagctgctatggctgctgctgcagccaccacttcctcctactatggaagggacaggagcccactgcgtcgtgctgcagccatgctccccacagttggagagggctacggttatgggccagagagtgaattatctcaggcttccgcagctacacggaattctctgtatgacatggcccggtatgaacgggagcagtatgtggaccgagcccggtactcagccttttaaaaactggaggtgagagatgggtgggaatggttaaaagattccatttagttcccttgaaagagacccatgcttcataaaagtggctagagccacctgtgctctccggacagtatccaaaaggtgcaaattacatgttagtcttcaatatttctctagcttaggccacaagttccatttggcctgtcaaggtgttagtgtatgactccaaccaacttgttccttctgagagaacaacaaattcagtttgttagtgagaacattctttaatcagttgtaagcatatttgggttacagaaaaacatttgagagatctaacatttgttatgtgccctctgtatatcatctacacgataagactgaaatattttattcttttacagagaagggaactaaagctcagagaggttaagtactttgcccaaagtcatttgataaatgaaaggtagaaccagaattcaaatttggacctgtctgataccaaaacccatactcgctctactacagaagtactgtagtggtaagctgaagggtacaggttcaggggttagtaatgaatatcacagtgagaattttaactattactttaggcttatagtttgctaataaaattgctacctgaaggcagaggcagtggcttaaaattttattttataaaataagttttttgaggaggttttgcctcatttgcccaaggctggaagtgcacctttggactccacctagtgtcgacccttgcaagtgctgcgcaga

SEQ ID NO: 283343 - DNA, 2788 bp, Homo sapiens
  misc_feature (651)..(651): n is a, c, g, or t
  misc_feature (681)..(681): n is a, c, g, or t
  misc_feature (722)..(722): n is a, c, g, or t
  misc_feature (863)..(863): n is a, c, g, or t
  misc_feature (923)..(924): n is a, c, g, or t
  misc_feature (1022)..(1022): n is a, c, g, or t
  misc_feature (1025)..(1025): n is a, c, g, or t
  misc_feature (1029)..(1029): n is a, c, g, or t
  misc_feature (1033)..(1037): n is a, c, g, or t
  misc_feature (1042)..(1042): n is a, c, g, or t
gcaagctccgcctcccgggttcacgccattctcctgcctcagcctcccaagtagctgggactacaggcgcccgccactacgcccggctaatttttgtatttttagtagagacggggtttcaccgttttagccgggatggtctcgatctcctgacctcgtgatccgcccgcctcggcctcccaaagtgctgggattacaggcgtgagccaccgcgcccggcacgcctaagcttgtttttaccgccaggaggtgcccttggaccacagctgaattttgaatgctagacagtcgggaaactcagttgcctagacttccagcttggtgtgtacgaggagaccctgtcccacccagaactagggacctcgctgggcctctccaccaagtattcctctggcgtgctcaccacagaccaggactgtgatggacacacaatgagtgagagagaatcagaccacggatactcacgagcaaacaaaacatgactaagcgtagcctgggtagcaatgcctcttaggcctgtcccagttctgccaggttatctttctgccccttggttctcagtttccgtagcaataaataacacctctgcaatgacaaactttaaaataatgtttaaagcgctacaaaacaatgactagttttgcttaaaangtggcgcacctgtatttttgaaatgtgccncaagctgccacagaaccggccagcccgctacaaaagccccnttttagggccctcggggagattcctctgtcattagctccccgcccccctcaaagggcccaagagcaggacccattgtggtgagcgactccccaaggcctccgcttttctaggcagtggttgcgttcagagcccctctgacncagcatggcgaccctttccaggtggtgactggctggctgggctgggggtggctgacctcnnggcccgcgccaccaccacagccccgcccccgtgctgcgtggtcatttgtatgcagcctcgggattggtcactcggctcccgcgaggggaaggggaggnaancagngcgnnnnngcgcntgcgtgagctggcgcgcgagaaagggcccggtcgcgtccaggctcgagcggccgtcgccattttgtaaggttctctctgacgtgggagccgccgtcgctgccgccacccggaggctcttgtcaggatggtgaagctgttcatcggaaaccttccccgggaggctacagagcaggagattcgctcactcttcgagcagtatgggaaggtgctggaatgtgacatcattaagaattacggctttgtgcacatagaagacaagacggcagctgaggatgccatacgcaacctgcaccattacaagcttcatggggtgaacatcaacgtggaagccagcaagaataagagcaaagcttcaaccaagttacacgtgggtaacatcagccccacttgtaccaaccaagagcttcgagccaagtttgaggagtatggtccggtcatcgaatgtgacatcgtgaaagattatgccttcgtacacatggagcgggcagaggatgcagtggaggccatcaggggccttgacaacacagagtttcaaggcaaaagaatgcatgtgcagttgtccacaagccggcttcggactgcccctggtatgggagaccagagtggctgctatcggtgtgggaaagaagggcactggtccaaagagtgcccagtagatcgtacgggtcgtgtggcagactttactgagcagtataatgaacaatatggagcagttcgaacaccttacaccatgggctacggggaatccatgtattacaacgatgcatatggagcactcgactactataagcgataccgggtccgctcttatgaggcagtagcagcggcggcagcggcttctgcatacaactacgcagagcagaccatgtcccatctgcctcaagtccaaagcacaactgtgaccagccacctcaactctacttctgttgatccctatgacagacacctattgccaaactctggcgctgctgccacttcagctgctatggctgctgctgcagccaccacttcctcctactatggaagggacaggagcccactgcgtcgtgctgcagccatgctccccacagttggagagggctacggttatgggccagagagtgaattatctcaggcttccgcagctacacggaattctctgtatgacatggcccggtatgaacgggagcagtatgtggaccgagcccggtactcagccttttaaaaactggaggtaggataattgcggactgaaccctcgggctgcggtcatatatgagaacttgctccgcgcggtcccctttgccgggatgtttccattgcttcatgtttcagtaaacaaaaggagtttgtgaccaactatgttttctttcttaattcttctaagttgacttttctttcctcctgaaactagtctctgtagcctttcactctgttccttatattctcagcctctgagcagccctaggtaaggattatgctggcatcccctttttcctgtgcagtggaacccctcttatcttgctttccctaggagttgaatccttctccctgcctacctgcagcatctcctttccctttcttaacacttaagttactcttctgaaattgctaggaccattgggggttttgttgttttgtttgttttttatgtccgacctgtgatcgtggtacagcattagctgaaatttacccttgttttactccactcctcccttttttaaaaaaattttttgacaaataaatgtttctaacacttaaaaaac

SEQ ID NO: 283344 - DNA, 2710 bp, Homo sapiens
  misc_feature (651)..(651): n is a, c, g, or t
  misc_feature (681)..(681): n is a, c, g, or t
  misc_feature (722)..(722): n is a, c, g, or t
  misc_feature (863)..(863): n is a, c, g, or t
  misc_feature (923)..(924): n is a, c, g, or t
  misc_feature (1022)..(1022): n is a, c, g, or t
  misc_feature (1025)..(1025): n is a, c, g, or t
  misc_feature (1029)..(1029): n is a, c, g, or t
  misc_feature (1033)..(1037): n is a, c, g, or t
  misc_feature (1042)..(1042): n is a, c, g, or t
gcaagctccgcctcccgggttcacgccattctcctgcctcagcctcccaagtagctgggactacaggcgcccgccactacgcccggctaatttttgtatttttagtagagacggggtttcaccgttttagccgggatggtctcgatctcctgacctcgtgatccgcccgcctcggcctcccaaagtgctgggattacaggcgtgagccaccgcgcccggcacgcctaagcttgtttttaccgccaggaggtgcccttggaccacagctgaattttgaatgctagacagtcgggaaactcagttgcctagacttccagcttggtgtgtacgaggagaccctgtcccacccagaactagggacctcgctgggcctctccaccaagtattcctctggcgtgctcaccacagaccaggactgtgatggacacacaatgagtgagagagaatcagaccacggatactcacgagcaaacaaaacatgactaagcgtagcctgggtagcaatgcctcttaggcctgtcccagttctgccaggttatctttctgccccttggttctcagtttccgtagcaataaataacacctctgcaatgacaaactttaaaataatgtttaaagcgctacaaaacaatgactagttttgcttaaaangtggcgcacctgtatttttgaaatgtgccncaagctgccacagaaccggccagcccgctacaaaagccccnttttagggccctcggggagattcctctgtcattagctccccgcccccctcaaagggcccaagagcaggacccattgtggtgagcgactccccaaggcctccgcttttctaggcagtggttgcgttcagagcccctctgacncagcatggcgaccctttccaggtggtgactggctggctgggctgggggtggctgacctcnnggcccgcgccaccaccacagccccgcccccgtgctgcgtggtcatttgtatgcagcctcgggattggtcactcggctcccgcgaggggaaggggaggnaancagngcgnnnnngcgcntgcgtgagctggcgcgcgagaaagggcccggtcgcgtccaggctcgagcggccgtcgccattttgtaaggttctctctgacgtgggagccgccgtcgctgccgccacccggaggctcttgtcaggatggtgaagctgttcatcggaaaccttccccgggaggctacagagcaggagattcgctcactcttcgagcagtatgggaaggtgctggaatgtgacatcattaagaattacggctttgtgcacatagaagacaagacggcagctgaggatgccatacgcaacctgcaccattacaagcttcatggggtgaacatcaacgtggaagccagcaagaataagagcaaagcttcaaccaagttacacgtgggtaacatcagccccacttgtaccaaccaagagcttcgagccaagtttgaggagtatggtccggtcatcgaatgtgacatcgtgaaagattatgccttcgtacacatggagcgggcagaggatgcagtggaggccatcaggggccttgacaacacagagtttcaaggcaaaagaatgcatgtgcagttgtccacaagccggcttcggactgcccctggtatgggagaccagagtggctgctatcggtgtgggaaagaagggcactggtccaaagagtgcccagtagatcgtacgggtcgtgtggcagactttactgagcagtataatgaacaatatggagcagttcgaacaccttacaccatgggctacggggaatccatgtattacaacgatgcatatggagcactcgactactataagcgataccgggtccgctcttatgaggcagtagcagcggcggcagcggcttctgcatacaactacgcagagcagaccatgtcccatctgcctcaagtccaaagcacaactgtgaccagccacctcaactctacttctgttgatccctatgacagacacctattgccaaactctggcgctgctgccacttcagctgctatggctgctgctgcagccaccacttcctcctactatggaagggacaggagcccactgcgtcgtgctgcagccatgctccccacagttggagagggctacggttatgggccagagagtgaattatctcaggcttccgcagctacacggaattctctgtatgacatggcccggtatgaacgggagcagtatgtggaccgagcccggtactcagccttttaaaaactggaggtaggataattgcggactgaaccctcgggctgcggtcatatatgagaacttgctccgcgcggtcccctttgccgggatgtttccattgcttcatgtttcagtaaacaaaaggagtttgtgaccaactatgttttctttcttaattcttctaagttgacttttctttcctcctgaaactagtctctgtagcctttcactctgttccttatattctcagcctctgagcagccctaggtaaggattatgctggcatcccctttttcctgtgcagtggaacccctcttatcttgctttccctaggagttgaatccttctccctgcctacctgcagcatctcctttccctttcttaacacttaagttactcttctgaaattgctaggaccattgggggttttggtggtctgctcggctcttacctccgcacctcgaccgcgcgctccccttaccttact

SEQ ID NO: 283345 - DNA, 2151 bp, Homo sapiens
gattcctagatggtaacccgcttgtagtgtttgcaggttcacactattgaatgactcttggatgcggcctgtctcctagcagttggaggtataaagcctgagcacttttgtttctgctagaaactggagtgataggactctttgacattgggcagaaggaatttgactaaagtgatattgccacactaacccgctcccctctcaggatcagtgcatggcactgttctggctgccgtcctcaatagggctatttccaacaggatggtggagcacaaggcttcctctcgcatagctgcatccagaagaaggtctgttaaagagagagcaacttgctgattgcagaggggggatttgttctcagcagtccttaagagtaatgagaagccctgttctttttatctgtactgactgcgttttccatttttttttttttttaaaggaggttgctgaaatagggtcacaggtgtgtgcgtctatgtgtcttatgacaactaatttactttcatttggggaggagaggaaaaagaatgtcaagtgagttaaaataaatcttcttacatctgttccctcaaggcaaaagaatgcatgtgcagttgtccacaagccggcttcggactgcccctggtatgggagaccagagtggctgctatcggtgtgggaaagaagggcactggtccaaagagtgcccagtagatcgtacgggtcgtgtggcagactttactgagcagtataatgaacaatatggagcagttcgaacaccttacaccatgggctacggggaatccatgtattacaacgatgcatatggagcactcgactactataagcgataccgggtccgctcttatgaggcagtagcagcggcggcagcggcttctgcatacaactacgcagagcagaccatgtcccatctgcctcaagtccaaagcacaactgtgaccagccacctcaactctacttctgttgatccctatgacagacacctattgccaaactctggcgctgctgccacttcagctgctatggctgctgctgcagccaccacttcctcctactatggaagggacaggagcccactgcgtcgtgctgcagccatgctccccacagttggagagggctacggttatgggccagagagtgaattatctcaggcttccgcagctacacggaattctctgtatgacatggcccggtatgaacgggagcagtatgtggaccgagcccggtactcagccttttaaaaactggaggtgagagatgggtgggaatggttaaaagattccatttagttcccttgaaagagacccatgcttcataaaagtggctagagccacctgtgctctccggacagtatccaaaaggtgcaaattacatgttagtcttcaatatttctctagcttaggccacaagttccatttggcctgtcaaggtgttagtgtatgactccaaccaacttgttccttctgagagaacaacaaattcagtttgttagtgagaacattctttaatcagttgtaagcatatttgggttacagaaaaacatttgagagatctaacatttgttatgtgccctctgtatatcatctacacgataagactgaaatattttattcttttacagagaagggaactaaagctcagagaggttaagtactttgcccaaagtcatttgataaatgaaaggtagaaccagaattcaaatttggacctgtctgataccaaaacccatactcgctctactacagaagtactgtagtggtaagctgaagggtacaggttcaggggttagtaatgaatatcacagtgagaattttaactattactttaggcttatagtttgctaataaaattgctacctgaaggcagaggcagtggctcactcctgtaatcctaacactgggaggctgaggcgggaggatcacttgagcccaggagttcaagaccagcctaggcaacatagcaagaccctgtctctacaaagaaaattaaattagcagggtgtgatggggagcacctgtgatcccagctactcagaatgctgaggttggaaggattgcttgagcccaggagttaaaagaggctgcagtgagctatgatcacaccactgtattccagcctgggcaacagagtgagactgtctctcctttattt

SEQ ID NO: 283346 - DNA, 1690 bp, Homo sapiens
  misc_feature (12)..(12): n is a, c, g, or t
  misc_feature (105)..(105): n is a, c, g, or t
  misc_feature (112)..(112): n is a, c, g, or t
cgcactcgatcncaggggctctgggggggcatcttggctgcaagaaatgcggagcctggctccctgtcagtaagagcacgccaaaggtcagcaccgcagccatcntgaaggnccgtgggggacctccctcgtgccgaattcggcacgagctagtctcttatgtttcagagaaaatgaagactgcaagcagtggttgttcaactaacctctttttagcgatgacttttaaagaaacttaccttccaggtgtgaacctcaaatggactgaataaccctgagttggttgcagtcccaggagcctgatgttaatgaggctgccaggatgaaatactccagaactgttggggatccaaattcgggtctcaccctagcagaactgatccaagaacgtcacaacttttgaagtcgattggcacagatcaagaccaagatttggccctttgtctgtaataagtagaggaacttggtgtgagttaactttttttttcccccagccattggtgtctggagttcccatcatcaatagaaggattagagaattctaggaatgatttcttttgatttggcaagggagatttggtcaattaggggaactactggaactgtggctctcactctgtgacagtgtgacatgtaggtgtgttggaattgggtgaatgactggctgctccttgatatcctaccccttgtgaccatcatttctgaaagcttgtttactgtgaaagattaaaacaaaacacatttagaatagtgcaattcgccatatatgacatctcagcatcttctgcttttcctggactccaaaattaaattgcagttcttgaaaatgtatgtatgccctttgttacagcaacagtagccttctgtcacaggggttatcttgccatcttgtcctatatatatagccataagtggattcctatatatagctattgatagactcctaggtaattacatgggatatgagttagatccagtctgacttggttttgttttgttcttttttttccccccggaatacaggacaggacccagggcgcttgtacgcggagccaggctgctctccaggcattgtgtaagcctcttgtgttgtgctctctttcaggtaggataattgcggactgaaccctcgggctgcggtcatatatgagaacttgctccgcgcggtcccctttgccgggatgtttccattgcttcatgtttcagtaaacaaaaggagtttgtgaccaactatgttttctttcttaattcttctaagttgacttttctttcctcctgaaactagtctctgtagcctttcactctgttccttatattctcagcctctgagcagccctaggtaaggattatgctggcatcccctttttcctgtgcagtggaacccctcttatcttgctttccctaggagttgaatccttctccctgcctacctgcagcatctcctttccctttaaaatgaccatgtagtggcaagcagccttttactcttctgttagctctggactcttaacacttaagttactcttctgaaattgctaggaccattgggggttttgttgttttgtttgttttttatgtccgacctgtgatcgtggtacagcattagctgaaatttacccttgttttactccactcctcccttttttaaaaaaattttttgacaaataaatgtttctaacacttaaaaaac

SEQ ID NO: 283347 - DNA, 2319 bp, Homo sapiens
  misc_feature (651)..(651): n is a, c, g, or t
  misc_feature (681)..(681): n is a, c, g, or t
  misc_feature (722)..(722): n is a, c, g, or t
  misc_feature (863)..(863): n is a, c, g, or t
  misc_feature (923)..(924): n is a, c, g, or t
  misc_feature (1022)..(1022): n is a, c, g, or t
  misc_feature (1025)..(1025): n is a, c, g, or t
  misc_feature (1029)..(1029): n is a, c, g, or t
  misc_feature (1033)..(1037): n is a, c, g, or t
  misc_feature (1042)..(1042): n is a, c, g, or t
gcaagctccgcctcccgggttcacgccattctcctgcctcagcctcccaagtagctgggactacaggcgcccgccactacgcccggctaatttttgtatttttagtagagacggggtttcaccgttttagccgggatggtctcgatctcctgacctcgtgatccgcccgcctcggcctcccaaagtgctgggattacaggcgtgagccaccgcgcccggcacgcctaagcttgtttttaccgccaggaggtgcccttggaccacagctgaattttgaatgctagacagtcgggaaactcagttgcctagacttccagcttggtgtgtacgaggagaccctgtcccacccagaactagggacctcgctgggcctctccaccaagtattcctctggcgtgctcaccacagaccaggactgtgatggacacacaatgagtgagagagaatcagaccacggatactcacgagcaaacaaaacatgactaagcgtagcctgggtagcaatgcctcttaggcctgtcccagttctgccaggttatctttctgccccttggttctcagtttccgtagcaataaataacacctctgcaatgacaaactttaaaataatgtttaaagcgctacaaaacaatgactagttttgcttaaaangtggcgcacctgtatttttgaaatgtgccncaagctgccacagaaccggccagcccgctacaaaagccccnttttagggccctcggggagattcctctgtcattagctccccgcccccctcaaagggcccaagagcaggacccattgtggtgagcgactccccaaggcctccgcttttctaggcagtggttgcgttcagagcccctctgacncagcatggcgaccctttccaggtggtgactggctggctgggctgggggtggctgacctcnnggcccgcgccaccaccacagccccgcccccgtgctgcgtggtcatttgtatgcagcctcgggattggtcactcggctcccgcgaggggaaggggaggnaancagngcgnnnnngcgcntgcgtgagctggcgcgcgagaaagggcccggtcgcgtccaggctcgagcggccgtcgccattttgtaaggttctctctgacgtgggagccgccgtcgctgccgccacccggaggctcttgtcaggatggtgaagctgttcatcggaaaccttccccgggaggctacagagcaggagattcgctcactcttcgagcagtatgggaaggtgctggaatgtgacatcattaagaattacggctttgtgcacatagaagacaagacggcagctgaggatgccatacgcaacctgcaccattacaagcttcatggggtgaacatcaacgtggaagccagcaagaataagagcaaagcttcaaccaagttacacgtgggtaacatcagccccacttgtaccaaccaagagcttcgagccaagtttgaggagtatggtccggtcatcgaatgtgacatcgtgaaagattatgccttcgtacacatggagcgggcagaggatgcagtggaggccatcaggggccttgacaacacagagtttcaaggtgaactgctctgggcctgggtagtagcgccgagtggggtctagctcaaaacaggcaagaacacaagactatagaacttgctgggtggtctcttccattctgttttagctggaaataatagattatgtttaccgctcttaagcataatttacccctggggaagcaaacacttccccttttcaggtttgctaagatgttgctcaccgactgcatagaatcacaaactgtgggttactttaccctgcgggattcttgcattgattcgagtgctgttggaagtgtaatctgcttggggaaacgagtacctcatgagagaagggaggataaaggtccgtggcttacctgcttctttggtgatgatcaggaagccttatatttgagggtttaagtgcttaagatttatattctttactgctttgggtggatactggtgggaaagaagaaaaaagacatctagaggaagccctatattataaatctgggtggcaagtctggatctgcgggagtatctttttgttgatcaaagttgtgcagtctcttcaagcagagtcaaaaaaacatgccatggagtgttctgctccacctgttcatttcaccctcagaaaaggaaatttctaaatatatcagactcaatgggaatgatggtcccgcttctgaagaaatttcagtacaagcatcgtagagcatatcatactatttataccgataataaaggtacatatgttgtcattaataccaca

SEQ ID NO: 283348 - DNA, 1846 bp, Homo sapiens
  misc_feature (651)..(651): n is a, c, g, or t
  misc_feature (681)..(681): n is a, c, g, or t
  misc_feature (722)..(722): n is a, c, g, or t
  misc_feature (863)..(863): n is a, c, g, or t
  misc_feature (923)..(924): n is a, c, g, or t
  misc_feature (1022)..(1022): n is a, c, g, or t
  misc_feature (1025)..(1025): n is a, c, g, or t
  misc_feature (1029)..(1029): n is a, c, g, or t
  misc_feature (1033)..(1037): n is a, c, g, or t
  misc_feature (1042)..(1042): n is a, c, g, or t
gcaagctccgcctcccgggttcacgccattctcctgcctcagcctcccaagtagctgggactacaggcgcccgccactacgcccggctaatttttgtatttttagtagagacggggtttcaccgttttagccgggatggtctcgatctcctgacctcgtgatccgcccgcctcggcctcccaaagtgctgggattacaggcgtgagccaccgcgcccggcacgcctaagcttgtttttaccgccaggaggtgcccttggaccacagctgaattttgaatgctagacagtcgggaaactcagttgcctagacttccagcttggtgtgtacgaggagaccctgtcccacccagaactagggacctcgctgggcctctccaccaagtattcctctggcgtgctcaccacagaccaggactgtgatggacacacaatgagtgagagagaatcagaccacggatactcacgagcaaacaaaacatgactaagcgtagcctgggtagcaatgcctcttaggcctgtcccagttctgccaggttatctttctgccccttggttctcagtttccgtagcaataaataacacctctgcaatgacaaactttaaaataatgtttaaagcgctacaaaacaatgactagttttgcttaaaangtggcgcacctgtatttttgaaatgtgccncaagctgccacagaaccggccagcccgctacaaaagccccnttttagggccctcggggagattcctctgtcattagctccccgcccccctcaaagggcccaagagcaggacccattgtggtgagcgactccccaaggcctccgcttttctaggcagtggttgcgttcagagcccctctgacncagcatggcgaccctttccaggtggtgactggctggctgggctgggggtggctgacctcnnggcccgcgccaccaccacagccccgcccccgtgctgcgtggtcatttgtatgcagcctcgggattggtcactcggctcccgcgaggggaaggggaggnaancagngcgnnnnngcgcntgcgtgagctggcgcgcgagaaagggcccggtcgcgtccaggctcgagcggccgtcgccattttgtaaggttctctctgacgtgggagccgccgtcgctgccgccacccggaggctcttgtcaggatggtgaagctgttcatcggaaaccttccccgggaggctacagagcaggagattcgctcactcttcgagcagtatgggaaggtgctggaatgtgacatcattaagaattacggctttgtgcacatagaagacaagacggcagctgaggatgccatacgcaacctgcaccattacaagcttcatggggtgaacatcaacgtggaagccagcaagaataagagcaaagcttcaaccaagttacacgtgggtaacatcagccccacttgtaccaaccaagagcttcgagccaagtttgaggagattcgctcactcttcgagcagtatgggaaggtgctggaatgtgacatcattaagaattacggcagtggaacccctcttatcttgctttccctaggagttgaatccttctccctgcctacctgcagcatctcctttccctttaaaatgaccatgtagtggcaagcagccttttactcttctgttagctctggactcttaacacttaagttactcttctgaaattgctaggaccattgggggttttgttgttttgtttgttttttatgtccgacctgtgatcgtggtacagcattagctgaaatttacccttgttttactccactcctcccttttttaaaaaaattttttgacaaataaatgtttctaacacttaaaaaac

SEQ ID NO: 283349 - DNA, 1294 bp, Homo sapiens
  misc_feature (12)..(12): n is a, c, g, or t
  misc_feature (105)..(105): n is a, c, g, or t
  misc_feature (112)..(112): n is a, c, g, or t
cgcactcgatcncaggggctctgggggggcatcttggctgcaagaaatgcggagcctggctccctgtcagtaagagcacgccaaaggtcagcaccgcagccatcntgaaggnccgtgggggacctccctcgtgccgaattcggcacgagctagtctcttatgtttcagagaaaatgaagactgcaagcagtggttgttcaactaacctctttttagcgatgacttttaaagaaacttaccttccaggtgtgaacctcaaatggactgaataaccctgagttggttgcagtcccaggagcctgatgttaatgaggctgccaggatgaaatactccagaactgttggggatccaaattcgggtctcaccctagcagaactgatccaagaacgtcacaacttttgaagtcgattggcacagatcaagaccaagatttggccctttgtctgtaataagtagaggaacttggtgtgagttaactttttttttcccccagccattggtgtctggagttcccatcatcaatagaaggattagagaattctaggaatgatttcttttgatttggcaagggagatttggtcaattaggggaactactggaactgtggctctcactctgtgacagtgtgacatgtaggtgtgttggaattgggtgaatgactggctgctccttgatatcctaccccttgtgaccatcatttctgaaagcttgtttactgtgaaagattaaaacaaaacacatttagaatagtgcaattcgccatatatgacatctcagcatcttctgcttttcctggactccaaaattaaattgcagttcttgaaaatgtatgtatgccctttgttacagcaacagtagccttctgtcacaggggttatcttgccctctgtagttccagctacttggaaggttgagatgggaagaccgcttcagctcagaaggttgaggctgcattgagccatactcataccactgtactccagagaaatccctcacccttcctgccttgcaaactcaagacagaatccagacaccacgtctgccacggccttgatctcagctttcccagcctccgaaactgtgagaaataaaattctgttgtgtataagccatccagtcttacggtcttttgttacagcacctcaaacggactaaaaaaatcctcctgttggcggggcatggtggctcacacctgtaatcccatctgcttgggaggctgagggagaagaattgttgaagctgggaggagaggttgcagtgagctgagattggcattgaacggatagtgccggg

SEQ ID NO: 283350 - DNA, 1230 bp, Homo sapiens
  misc_feature (651)..(651): n is a, c, g, or t
  misc_feature (681)..(681): n is a, c, g, or t
  misc_feature (722)..(722): n is a, c, g, or t
  misc_feature (863)..(863): n is a, c, g, or t
  misc_feature (923)..(924): n is a, c, g, or t
  misc_feature (1022)..(1022): n is a, c, g, or t
  misc_feature (1025)..(1025): n is a, c, g, or t
  misc_feature (1029)..(1029): n is a, c, g, or t
  misc_feature (1033)..(1037): n is a, c, g, or t
  misc_feature (1042)..(1042): n is a, c, g, or t
gcaagctccgcctcccgggttcacgccattctcctgcctcagcctcccaagtagctgggactacaggcgcccgccactacgcccggctaatttttgtatttttagtagagacggggtttcaccgttttagccgggatggtctcgatctcctgacctcgtgatccgcccgcctcggcctcccaaagtgctgggattacaggcgtgagccaccgcgcccggcacgcctaagcttgtttttaccgccaggaggtgcccttggaccacagctgaattttgaatgctagacagtcgggaaactcagttgcctagacttccagcttggtgtgtacgaggagaccctgtcccacccagaactagggacctcgctgggcctctccaccaagtattcctctggcgtgctcaccacagaccaggactgtgatggacacacaatgagtgagagagaatcagaccacggatactcacgagcaaacaaaacatgactaagcgtagcctgggtagcaatgcctcttaggcctgtcccagttctgccaggttatctttctgccccttggttctcagtttccgtagcaataaataacacctctgcaatgacaaactttaaaataatgtttaaagcgctacaaaacaatgactagttttgcttaaaangtggcgcacctgtatttttgaaatgtgccncaagctgccacagaaccggccagcccgctacaaaagccccnttttagggccctcggggagattcctctgtcattagctccccgcccccctcaaagggcccaagagcaggacccattgtggtgagcgactccccaaggcctccgcttttctaggcagtggttgcgttcagagcccctctgacncagcatggcgaccctttccaggtggtgactggctggctgggctgggggtggctgacctcnnggcccgcgccaccaccacagccccgcccccgtgctgcgtggtcatttgtatgcagcctcgggattggtcactcggctcccgcgaggggaaggggaggnaancagngcgnnnnngcgcntgcgtgagctggcgcgcgagaaagggcccggtcgcgtccaggctcgagcggccgtcgccattttgtaaggttctctctgacgtgggagccgccgtcgctgccgccacccggaggtgcgagggggtcgtgtgtgtgtgatgtggggagctcggggcggtcgggccgggcctccggcagactgcacggcc

SEQ ID NO: 283351 - DNA, 2841 bp, Homo sapiens
  misc_feature (651)..(651): n is a, c, g, or t
  misc_feature (681)..(681): n is a, c, g, or t
  misc_feature (722)..(722): n is a, c, g, or t
  misc_feature (863)..(863): n is a, c, g, or t
  misc_feature (923)..(924): n is a, c, g, or t
  misc_feature (1022)..(1022): n is a, c, g, or t
  misc_feature (1025)..(1025): n is a, c, g, or t
  misc_feature (1029)..(1029): n is a, c, g, or t
  misc_feature (1033)..(1037): n is a, c, g, or t
  misc_feature (1042)..(1042): n is a, c, g, or t
gcaagctccgcctcccgggttcacgccattctcctgcctcagcctcccaagtagctgggactacaggcgcccgccactacgcccggctaatttttgtatttttagtagagacggggtttcaccgttttagccgggatggtctcgatctcctgacctcgtgatccgcccgcctcggcctcccaaagtgctgggattacaggcgtgagccaccgcgcccggcacgcctaagcttgtttttaccgccaggaggtgcccttggaccacagctgaattttgaatgctagacagtcgggaaactcagttgcctagacttccagcttggtgtgtacgaggagaccctgtcccacccagaactagggacctcgctgggcctctccaccaagtattcctctggcgtgctcaccacagaccaggactgtgatggacacacaatgagtgagagagaatcagaccacggatactcacgagcaaacaaaacatgactaagcgtagcctgggtagcaatgcctcttaggcctgtcccagttctgccaggttatctttctgccccttggttctcagtttccgtagcaataaataacacctctgcaatgacaaactttaaaataatgtttaaagcgctacaaaacaatgactagttttgcttaaaangtggcgcacctgtatttttgaaatgtgccncaagctgccacagaaccggccagcccgctacaaaagccccnttttagggccctcggggagattcctctgtcattagctccccgcccccctcaaagggcccaagagcaggacccattgtggtgagcgactccccaaggcctccgcttttctaggcagtggttgcgttcagagcccctctgacncagcatggcgaccctttccaggtggtgactggctggctgggctgggggtggctgacctcnnggcccgcgccaccaccacagccccgcccccgtgctgcgtggtcatttgtatgcagcctcgggattggtcactcggctcccgcgaggggaaggggaggnaancagngcgnnnnngcgcntgcgtgagctggcgcgcgagaaagggcccggtcgcgtccaggctcgagcggccgtcgccattttgtaaggttctctctgacgtgggagccgccgtcgctgccgccacccggaggctcttgtcaggatggtgaagctgttcatcggaaaccttccccgggaggctacagagcaggagattcgctcactcttcgagcagtatgggaaggtgctggaatgtgacatcattaagaattacggctttgtgcacatagaagacaagacggcagctgaggatgccatacgcaacctgcaccattacaagcttcatggggtgaacatcaacgtggaagccagcaagaataagagcaaagcttcaaccaagttacacgtgggtaacatcagccccacttgtaccaaccaagagcttcgagccaagtttgaggagtatggtccggtcatcgaatgtgacatcgtgaaagattatgccttcgtacacatggagcgggcagaggatgcagtggaggccatcaggggccttgacaacacagagtttcaaggcaaaagaatgcatgtgcagttgtccacaagccggcttcggactgcccctggtatgggagaccagagtggctgctatcggtgtgggaaagaagggcactggtccaaagagtgcccagtagatcgtacgggtcgtgtggcagactttactgagcagtataatgaacaatatggagcagttcgaacaccttacaccatgggctacggggaatccatgtattacaacgatgcatatggagcactcgactactataagcgataccgggtccgctcttatgaggcagtagcagcggcggcagcggcttctgcatacaactacgcagagcagaccatgtcccatctgcctcaagtccaaagcacaactgtgaccagccacctcaactctacttctgttgatccctatgacagacacctattgccaaactctggcgctgctgccacttcagctgctatggctgctgctgcagccaccacttcctcctactatggaagggacaggagcccactgcgtcgtgctgcagccatgctccccacagttggagagggctacggttatgggccagagagtgaattatctcaggcttccgcagctacacggaattctctgtatgacatggcccggtatgaacgggagcagtatgtggaccgagcccggtactcagccttttaaaaactggaggtaggataattgcggactgaaccctcgggctgcggtcatatatgagaacttgctccgcgcggtcccctttgccgggatgtttccattgcttcatgtttcagtaaacaaaaggagtttgtgaccaactatgttttctttcttaattcttctaagttgacttttctttcctcctgaaactagtctctgtagcctttcactctgttccttatattctcagcctctgagcagccctaggtaaggattatgctggcatcccctttttcctgtgcagtggaacccctcttatcttgctttccctaggagttgaatccttctccctgcctacctgcagcatctcctttccctttaaaatgaccatgtagtggcaagcagccttttactcttctgttagctctggactcttaacacttaagttactcttctgaaattgctaggaccattgggggttttgttgttttgtttgttttttatgtccgacctgtgatcgtggtacagcattagctgaaatttacccttgttttactccactcctcccttttttaaaaaaattttttgacaaataaatgtttctaacacttaaaaaac

SEQ ID NO: 283352 - DNA, 3157 bp, Homo sapiens
  misc_feature (651)..(651): n is a, c, g, or t
  misc_feature (681)..(681): n is a, c, g, or t
  misc_feature (722)..(722): n is a, c, g, or t
  misc_feature (863)..(863): n is a, c, g, or t
  misc_feature (923)..(924): n is a, c, g, or t
  misc_feature (1022)..(1022): n is a, c, g, or t
  misc_feature (1025)..(1025): n is a, c, g, or t
  misc_feature (1029)..(1029): n is a, c, g, or t
  misc_feature (1033)..(1037): n is a, c, g, or t
  misc_feature (1042)..(1042): n is a, c, g, or t
gcaagctccgcctcccgggttcacgccattctcctgcctcagcctcccaagtagctgggactacaggcgcccgccactacgcccggctaatttttgtatttttagtagagacggggtttcaccgttttagccgggatggtctcgatctcctgacctcgtgatccgcccgcctcggcctcccaaagtgctgggattacaggcgtgagccaccgcgcccggcacgcctaagcttgtttttaccgccaggaggtgcccttggaccacagctgaattttgaatgctagacagtcgggaaactcagttgcctagacttccagcttggtgtgtacgaggagaccctgtcccacccagaactagggacctcgctgggcctctccaccaagtattcctctggcgtgctcaccacagaccaggactgtgatggacacacaatgagtgagagagaatcagaccacggatactcacgagcaaacaaaacatgactaagcgtagcctgggtagcaatgcctcttaggcctgtcccagttctgccaggttatctttctgccccttggttctcagtttccgtagcaataaataacacctctgcaatgacaaactttaaaataatgtttaaagcgctacaaaacaatgactagttttgcttaaaangtggcgcacctgtatttttgaaatgtgccncaagctgccacagaaccggccagcccgctacaaaagccccnttttagggccctcggggagattcctctgtcattagctccccgcccccctcaaagggcccaagagcaggacccattgtggtgagcgactccccaaggcctccgcttttctaggcagtggttgcgttcagagcccctctgacncagcatggcgaccctttccaggtggtgactggctggctgggctgggggtggctgacctcnnggcccgcgccaccaccacagccccgcccccgtgctgcgtggtcatttgtatgcagcctcgggattggtcactcggctcccgcgaggggaaggggaggnaancagngcgnnnnngcgcntgcgtgagctggcgcgcgagaaagggcccggtcgcgtccaggctcgagcggccgtcgccattttgtaaggttctctctgacgtgggagccgccgtcgctgccgccacccggaggctcttgtcaggatggtgaagctgttcatcggaaaccttccccgggaggctacagagcaggagattcgctcactcttcgagcagtatgggaaggtgctggaatgtgacatcattaagaattacggctttgtgcacatagaagacaagacggcagctgaggatgccatacgcaacctgcaccattacaagcttcatggggtgaacatcaacgtggaagccagcaagaataagagcaaagcttcaaccaagttacacgtgggtaacatcagccccacttgtaccaaccaagagcttcgagccaagtttgaggagtatggtccggtcatcgaatgtgacatcgtgaaagattatgccttcgtacacatggagcgggcagaggatgcagtggaggccatcaggggccttgacaacacagagtttcaaggcaaaagaatgcatgtgcagttgtccacaagccggcttcggactgcccctggtatgggagaccagagtggctgctatcggtgtgggaaagaagggcactggtccaaagagtgcccagtagatcgtacgggtcgtgtggcagactttactgagcagtataatgaacaatatggagcagttcgaacaccttacaccatgggctacggggaatccatgtattacaacgatgcatatggagcactcgactactataagcgataccgggtccgctcttatgaggcagtagcagcggcggcagcggcttctgcatacaactacgcagagcagaccatgtcccatctgcctcaagtccaaagcacaactgtgaccagccacctcaactctacttctgttgatccctatgacagacacctattgccaaactctggcgctgctgccacttcagctgctatggctgctgctgcagccaccacttcctcctactatggaagggacaggagcccactgcgtcgtgctgcagccatgctccccacagttggagagggctacggttatgggccagagagtgaattatctcaggcttccgcagctacacggaattctctgtatgacatggcccggtatgaacgggagcagtatgtggaccgagcccggtactcagccttttaaaaactggaggtgagagatgggtgggaatggttaaaagattccatttagttcccttgaaagagacccatgcttcataaaagtggctagagccacctgtgctctccggacagtatccaaaaggtgcaaattacatgttagtcttcaatatttctctagcttaggccacaagttccatttggcctgtcaaggtgttagtgtatgactccaaccaacttgttccttctgagagaacaacaaattcagtttgttagtgagaacattctttaatcagttgtaagcatatttgggttacagaaaaacatttgagagatctaacatttgttatgtgccctctgtatatcatctacacgataagactgaaatattttattcttttacagagaagggaactaaagctcagagaggttaagtactttgcccaaagtcatttgataaatgaaaggtagaaccagaattcaaatttggacctgtctgataccaaaacccatactcgctctactacagaagtactgtagtggtaagctgaagggtacaggttcaggggttagtaatgaatatcacagtgagaattttaactattactttaggcttatagtttgctaataaaattgctacctgaaggcagaggcagtggctcactcctgtaatcctaacactgggaggctgaggcgggaggatcacttgagcccaggagttcaagaccagcctaggcaacatagcaagaccctgtctctacaaagaaaattaaattagcagggtgtgatggggagcacctgtgatcccagctactcagaatgctgaggttggaaggattgcttgagcccaggagttaaaagaggctgcagtgagctatgatcacaccactgtattccagcctgggcaacagagtgagactgtctctcctttattt

SEQ ID NO: 283353 - DNA, 2574 bp, Homo sapiens
  misc_feature (651)..(651): n is a, c, g, or t
  misc_feature (681)..(681): n is a, c, g, or t
  misc_feature (722)..(722): n is a, c, g, or t
  misc_feature (863)..(863): n is a, c, g, or t
  misc_feature (923)..(924): n is a, c, g, or t
  misc_feature (1022)..(1022): n is a, c, g, or t
  misc_feature (1025)..(1025): n is a, c, g, or t
  misc_feature (1029)..(1029): n is a, c, g, or t
  misc_feature (1033)..(1037): n is a, c, g, or t
  misc_feature (1042)..(1042): n is a, c, g, or t
  misc_feature (2574)..(2574): n is a, c, g, or t
gcaagctccgcctcccgggttcacgccattctcctgcctcagcctcccaagtagctgggactacaggcgcccgccactacgcccggctaatttttgtatttttagtagagacggggtttcaccgttttagccgggatggtctcgatctcctgacctcgtgatccgcccgcctcggcctcccaaagtgctgggattacaggcgtgagccaccgcgcccggcacgcctaagcttgtttttaccgccaggaggtgcccttggaccacagctgaattttgaatgctagacagtcgggaaactcagttgcctagacttccagcttggtgtgtacgaggagaccctgtcccacccagaactagggacctcgctgggcctctccaccaagtattcctctggcgtgctcaccacagaccaggactgtgatggacacacaatgagtgagagagaatcagaccacggatactcacgagcaaacaaaacatgactaagcgtagcctgggtagcaatgcctcttaggcctgtcccagttctgccaggttatctttctgccccttggttctcagtttccgtagcaataaataacacctctgcaatgacaaactttaaaataatgtttaaagcgctacaaaacaatgactagttttgcttaaaangtggcgcacctgtatttttgaaatgtgccncaagctgccacagaaccggccagcccgctacaaaagccccnttttagggccctcggggagattcctctgtcattagctccccgcccccctcaaagggcccaagagcaggacccattgtggtgagcgactccccaaggcctccgcttttctaggcagtggttgcgttcagagcccctctgacncagcatggcgaccctttccaggtggtgactggctggctgggctgggggtggctgacctcnnggcccgcgccaccaccacagccccgcccccgtgctgcgtggtcatttgtatgcagcctcgggattggtcactcggctcccgcgaggggaaggggaggnaancagngcgnnnnngcgcntgcgtgagctggcgcgcgagaaagggcccggtcgcgtccaggctcgagcggccgtcgccattttgtaaggttctctctgacgtgggagccgccgtcgctgccgccacccggaggctcttgtcaggatggtgaagctgttcatcggaaaccttccccgggaggctacagagcaggagattcgctcactcttcgagcagtatgggaaggtgctggaatgtgacatcattaagaattacggctttgtgcacatagaagacaagacggcagctgaggatgccatacgcaacctgcaccattacaagcttcatggggtgaacatcaacgtggaagccagcaagaataagagcaaagcttcaaccaagttacacgtgggtaacatcagccccacttgtaccaaccaagagcttcgagccaagtttgaggagtatggtccggtcatcgaatgtgacatcgtgaaagattatgccttcgtacacatggagcgggcagaggatgcagtggaggccatcaggggccttgacaacacagagtttcaaggcaaaagaatgcatgtgcagttgtccacaagccggcttcggactgcccctggtatgggagaccagagtggctgctatcggtgtgggaaagaagggcactggtccaaagagtgcccagtagatcgtacgggtcgtgtggcagactttactgagcagtataatgaacaatatggagcagttcgaacaccttacaccatgggctacggggaatccatgtattacaacgatgcatatggagcactcgactactataagcgataccgggtccgctcttatgaggcagtagcagcggcggcagcggcttctgcatacaactacgcagagcagaccatgtcccatctgcctcaagtccaaagcacaactgtgaccagccacctcaactctacttctgttgatccctatgacagacacctattgccaaactctggcgctgctgccacttcagctgctatggctgctgctgcagccaccacttcctcctactatggaagggacaggagcccactgcgtcgtgctgcagccatgctccccacagttggagagggctacggttatgggccagagagtgaattatctcaggcttccgcagctacacggaattctctgtatgacatggcccggtatgaacgggagcagtatgtggaccgagcccggtactcagccttttaaaaactggaggtgagagatgggtgggaatggttaaaagattccatttagttcccttgaaagagacccatgcttcataaaagtggctagagccacctgtgctctccggacagtatccaaaaggtgcaaattacatgttagtcttcaatatttctctagcttaggccacaagttccatttggcctgtcaaggtgttagtgtatgactccaaccaacttgttccttctgagagaacaacaaattcagtttgttagtgagaacattctttaatcagttgtaagcatatttgggttacaggcaagtcaggaatttggcaatgacgaacagggn

SEQ ID NO: 283354 - DNA, 2164 bp, Homo sapiens
  misc_feature (651)..(651): n is a, c, g, or t
  misc_feature (681)..(681): n is a, c, g, or t
  misc_feature (722)..(722): n is a, c, g, or t
  misc_feature (863)..(863): n is a, c, g, or t
  misc_feature (923)..(924): n is a, c, g, or t
  misc_feature (1022)..(1022): n is a, c, g, or t
  misc_feature (1025)..(1025): n is a, c, g, or t
  misc_feature (1029)..(1029): n is a, c, g, or t
  misc_feature (1033)..(1037): n is a, c, g, or t
  misc_feature (1042)..(1042): n is a, c, g, or t
gcaagctccgcctcccgggttcacgccattctcctgcctcagcctcccaagtagctgggactacaggcgcccgccactacgcccggctaatttttgtatttttagtagagacggggtttcaccgttttagccgggatggtctcgatctcctgacctcgtgatccgcccgcctcggcctcccaaagtgctgggattacaggcgtgagccaccgcgcccggcacgcctaagcttgtttttaccgccaggaggtgcccttggaccacagctgaattttgaatgctagacagtcgggaaactcagttgcctagacttccagcttggtgtgtacgaggagaccctgtcccacccagaactagggacctcgctgggcctctccaccaagtattcctctggcgtgctcaccacagaccaggactgtgatggacacacaatgagtgagagagaatcagaccacggatactcacgagcaaacaaaacatgactaagcgtagcctgggtagcaatgcctcttaggcctgtcccagttctgccaggttatctttctgccccttggttctcagtttccgtagcaataaataacacctctgcaatgacaaactttaaaataatgtttaaagcgctacaaaacaatgactagttttgcttaaaangtggcgcacctgtatttttgaaatgtgccncaagctgccacagaaccggccagcccgctacaaaagccccnttttagggccctcggggagattcctctgtcattagctccccgcccccctcaaagggcccaagagcaggacccattgtggtgagcgactccccaaggcctccgcttttctaggcagtggttgcgttcagagcccctctgacncagcatggcgaccctttccaggtggtgactggctggctgggctgggggtggctgacctcnnggcccgcgccaccaccacagccccgcccccgtgctgcgtggtcatttgtatgcagcctcgggattggtcactcggctcccgcgaggggaaggggaggnaancagngcgnnnnngcgcntgcgtgagctggcgcgcgagaaagggcccggtcgcgtccaggctcgagcggccgtcgccattttgtaaggttctctctgacgtgggagccgccgtcgctgccgccacccggaggctcttgtcaggatggtgaagctgttcatcggaaaccttccccgggaggctacagagcaggagattcgctcactcttcgagcagtatgggaaggtgctggaatgtgacatcattaagaattacggctttgtgcacatagaagacaagacggcagctgaggatgccatacgcaacctgcaccattacaagcttcatggggtgaacatcaacgtggaagccagcaagaataagagcaaagcttcaaccaagttacacgtgggtaacatcagccccacttgtaccaaccaagagcttcgagccaagtttgaggagtatggtccggtcatcgaatgtgacatcgtgaaagattatgccttcgtacacatggagcgggcagaggatgcagtggaggccatcaggggccttgacaacacagagtttcaaggtaggataattgcggactgaaccctcgggctgcggtcatatatgagaacttgctccgcgcggtcccctttgccgggatgtttccattgcttcatgtttcagtaaacaaaaggagtttgtgaccaactatgttttctttcttaattcttctaagttgacttttctttcctcctgaaactagtctctgtagcctttcactctgttccttatattctcagcctctgagcagccctaggtaaggattatgctggcatcccctttttcctgtgcagtggaacccctcttatcttgctttccctaggagttgaatccttctccctgcctacctgcagcatctcctttccctttaaaatgaccatgtagtggcaagcagccttttactcttctgttagctctggactcttaacacttaagttactcttctgaaattgctaggaccattgggggttttgttgttttgtttgttttttatgtccgacctgtgatcgtggtacagcattagctgaaatttacccttgttttactccactcctcccttttttaaaaaaattttttgacaaataaatgtttctaacacttaaaaaac

SEQ ID NO: 283355 - DNA, 1746 bp, Homo sapiens
  misc_feature (12)..(12): n is a, c, g, or t
  misc_feature (105)..(105): n is a, c, g, or t
  misc_feature (112)..(112): n is a, c, g, or t
cgcactcgatcncaggggctctgggggggcatcttggctgcaagaaatgcggagcctggctccctgtcagtaagagcacgccaaaggtcagcaccgcagccatcntgaaggnccgtgggggacctccctcgtgccgaattcggcacgagctagtctcttatgtttcagagaaaatgaagactgcaagcagtggttgttcaactaacctctttttagcgatgacttttaaagaaacttaccttccaggtgtgaacctcaaatggactgaataaccctgagttggttgcagtcccaggagcctgatgttaatgaggctgccaggatgaaatactccagaactgttggggatccaaattcgggtctcaccctagcagaactgatccaagaacgtcacaacttttgaagtcgattggcacagatcaagaccaagatttggccctttgtctgtaataagtagaggaacttggtgtgagttaactttttttttcccccagccattggtgtctggagttcccatcatcaatagaaggattagagaattctaggaatgatttcttttgatttggcaagggagatttggtcaattaggggaactactggaactgtggctctcactctgtgacagtgtgacatgtaggtgtgttggaattgggtgaatgactggctgctccttgatatcctaccccttgtgaccatcatttctgaaagcttgtttactgtgaaagattaaaacaaaacacatttagaatagtgcaattcgccatatatgacatctcagcatcttctgcttttcctggactccaaaattaaattgcagttcttgaaaatgtatgtatgccctttgttacagcaacagtagccttctgtcacaggggttatcttgcctaaaagatggataagaaagatgtatttatcaccaacacattcttcagctagattgcatcttgtcctatatatatagccataagtggattcctatatatagctattgatagactcctaggtaattacatgggatatgagttagatccagtctgacttggttttgttttgttcttttttttccccccggaatacaggacaggacccagggcgcttgtacgcggagccaggctgctctccaggcattgtgtaagcctcttgtgttgtgctctctttcaggtaggataattgcggactgaaccctcgggctgcggtcatatatgagaacttgctccgcgcggtcccctttgccgggatgtttccattgcttcatgtttcagtaaacaaaaggagtttgtgaccaactatgttttctttcttaattcttctaagttgacttttctttcctcctgaaactagtctctgtagcctttcactctgttccttatattctcagcctctgagcagccctaggtaaggattatgctggcatcccctttttcctgtgcagtggaacccctcttatcttgctttccctaggagttgaatccttctccctgcctacctgcagcatctcctttccctttaaaatgaccatgtagtggcaagcagccttttactcttctgttagctctggactcttaacacttaagttactcttctgaaattgctaggaccattgggggttttgttgttttgtttgttttttatgtccgacctgtgatcgtggtacagcattagctgaaatttacccttgttttactccactcctcccttttttaaaaaaattttttgacaaataaatgtttctaacacttaaaaaac

SEQ ID NO: 283356 - DNA, 1135 bp, Homo sapiens
  misc_feature (12)..(12): n is a, c, g, or t
  misc_feature (105)..(105): n is a, c, g, or t
  misc_feature (112)..(112): n is a, c, g, or t
cgcactcgatcncaggggctctgggggggcatcttggctgcaagaaatgcggagcctggctccctgtcagtaagagcacgccaaaggtcagcaccgcagccatcntgaaggnccgtgggggacctccctcgtgccgaattcggcacgagctagtctcttatgtttcagagaaaatgaagactgcaagcagtggttgttcaactaacctctttttagcgatgacttttaaagaaacttaccttccaggtgtgaacctcaaatggactgaataaccctgagttggttgcagtcccaggagcctgatgttaatgaggctgccaggatgaaatactccagaactgttggggatccaaattcgggtctcaccctagcagaactgatccaagaacgtcacaacttttgaagtcgattggcacagatcaagaccaagatttggccctttgtctgtaataagtagaggaacttggtgacaggacccagggcgcttgtacgcggagccaggctgctctccaggcattgtgtaagcctcttgtgttgtgctctctttcaggtaggataattgcggactgaaccctcgggctgcggtcatatatgagaacttgctccgcgcggtcccctttgccgggatgtttccattgcttcatgtttcagtaaacaaaaggagtttgtgaccaactatgttttctttcttaattcttctaagttgacttttctttcctcctgaaactagtctctgtagcctttcactctgttccttatattctcagcctctgagcagccctaggtaaggattatgctggcatcccctttttcctgtgcagtggaacccctcttatcttgctttccctaggagttgaatccttctccctgcctacctgcagcatctcctttccctttaaaatgaccatgtagtggcaagcagccttttactcttctgttagctctggactcttaacacttaagttactcttctgaaattgctaggaccattgggggttttgttgttttgtttgttttttatgtccgacctgtgatcgtggtacagcattagctgaaatttacccttgttttactccactcctcccttttttaaaaaaattttttgacaaataaatgtttctaacacttaaaaaac

SEQ ID NO: 283357 - DNA, 1491 bp, Homo sapiens
  misc_feature (12)..(12): n is a, c, g, or t
  misc_feature (105)..(105): n is a, c, g, or t
  misc_feature (112)..(112): n is a, c, g, or t
cgcactcgatcncaggggctctgggggggcatcttggctgcaagaaatgcggagcctggctccctgtcagtaagagcacgccaaaggtcagcaccgcagccatcntgaaggnccgtgggggacctccctcgtgccgaattcggcacgagctagtctcttatgtttcagagaaaatgaagactgcaagcagtggttgttcaactaacctctttttagcgatgacttttaaagaaacttaccttccaggtgtgaacctcaaatggactgaataaccctgagttggttgcagtcccaggagcctgatgttaatgaggctgccaggatgaaatactccagaactgttggggatccaaattcgggtctcaccctagcagaactgatccaagaacgtcacaacttttgaagtcgattggcacagatcaagaccaagatttggccctttgtctgtaataagtagaggaacttggtgtgagttaactttttttttcccccagccattggtgtctggagttcccatcatcaatagaaggattagagaattctaggaatgatttcttttgatttggcaagggagatttggtcaattaggggaactactggaactgtggctctcactctgtgacagtgtgacatgtaggtgtgttggaattgggtgaatgactggctgctccttgatatcctaccccttgtgaccatcatttctgaaagcttgtttactgtgaaagattaaaacaaaacacatttagaatagtgcaattcgccatatatgacatctcagcatcttctgcttttcctggactccaaaattaaattgcagttcttgaaaatgtatgtatgccctttgttacagcaacagtagccttctgtcacaggggttatcttgcctaaaagatggataagaaagatgtatttatcaccaacacattcttcagctagattgcatcttgtcctatatatatagccataagtggattcctatatatagctattgatagactcctaggtaattacatgggatatgagttagatccagtctgacttggttttgttttgttcttttttttccccccggaatacaggacaggacccagggcgcttgtacgcggagccaggctgctctccaggcattgtgtaagcctcttgtgttgtgctctctttcaggtaggataattgcggactgaaccctcgggctgcggtcatatatgagaacttgctccgcgcggtcccctttgccgggatgtttccattgcttcatgtttcagtaaacaaaaggagtttgtgaccaactatgttttctttcttaattcttctaagttgacttttctttcctcctgaaactagtctctgtagcctttcactctgttccttatattctcagcctctgagcagccctaggtaaggattatgctggcatcccctttttcctgtgcagtggaacccctcttatcttctagtaacccccctatcttctagtaacccggaccgagcgtc

SEQ ID NO: 283358 - DNA, 458 bp, Homo sapiens
aaagtcatgcacagtttcactcaagtgtctgactccagatccgcttgcctctaatctctcatagtaacttgttgacacattttctccagttgtcctgtcttgcttaaaaagctgtggggaagactcagcctggctcaggtagtattagaccagcagtccctggtgtggcatactcagttttggcattgccttcctggtatgttttaaagaaaactcatcagaacctttgtatcttttttattttctccagcctgggtgactgagactccgtttcaaaaaaaaaaaaaaaaagaaataatcagttcataagtcttaaattacatggttttgcagtgcttgtgttcatgtcacccttatatttaataatggccccaaagcaaaagatgctggcaatttggatattgtaaagagaagctgtaaagtgtttccttttactgaaaaggtgaaagatctcaatt

SEQ ID NO: 283359 - DNA, 862 bp, Homo sapiens
agtctcactcgcccaggctggagtacagtggcacgatctcggcttactgcagtggccgcctcccagttcaagtcattctcctgcttcagccccccgagcagcttggattacagccagccacatccagaaggaggaagtgagacgtacctggtgattgttgctggcagccgacgaactggcctgagctgtgctggctgagagagaatcaaggaaggcttggtcagccactgaatttccacaagaaaattgatcttttccatcactgggtaaaatctgaataggagaaagagccgcaattattttcatagattacggtcacttcagggagtcttcgagggcaagcaagaattgtcaaaaagggtttatattcttcaatgctacaaatttctcttgtgattccattgtggtctcagggcagacactgtatgatttctttcaaacatgttgagagaacaccgttcaaaatcttaaattcttaagccttctctttacttcagaaaatgatgtaacctaaaaacaagaaaaatcaaacttcaataataagtgatcaaagattgaaaacagctgatgattagatgaccctcatcttgtctgtgtactggtctgcggcagataataaaagtggcttgcagctctgaatgtgaagcggtgggatgcgcatcccaggcctggaatctgccctctgccacctcgctggtcaacagaatcaagtggaaatcctccagggaatccagaaccttgcctcaagggcttctgcacacttcagctgactcttctggcacccaagtcgctatacgaattaatgtgggttgctagatgatgacagagacccagtctccctgttgccccattcaaagccagc

SEQ ID NO: 283360 - DNA, 450 bp, Homo sapiens
tagttcaaactattttttaatttctcgagatttcttctttgatccatgcattatttagaagtggattgttcaatctctaagtatttacagattttccatctatctttctgttttgatttctagtgtgattccattgtggtctcagggcagacactgtatgatttctttcaaacatgttgaggtatgttttatggctcagaatatgtggtctgtcttagagaatgttccatgtaagcttgaaaagaatgtgtatgctgctgtggtttgatgaagcagtctatagatgtccctaagtggacatcaatttattgatggtgctgagttcaaccacgtccttactgattttctgcctgcaggatctatttctaatagagggggttttatattcttaaaggtaagcaaacccaagaatatctgtaatcactattcctttatataagcagaatccta

SEQ ID NO: 283361 - DNA, 367 bp, Homo sapiens
caactgacagactaaacttcccttgcacttcatctattaccgacagatatagtcagagacagctctaaaaaaacaacaaccaatccatatgtcctcatggtgttgtacaaagataaagtttacaacatccagatccgttatcagaaggaaagtcaagtttacttgttgggaactggactccgagggaaagaggtaaggatttcaaatttcgacattttcccaaagtctttatttatgccactctgcatgccttcatggagcgatctttgagagtccgtgctgtatggcaaatttaggattaaatcacatgagtgaagcccttcatttattggaagagaaataaagcaaaatctttacaatggttact

SEQ ID NO: 283362 - DNA, 1544 bp, Homo sapiens
ccccttccagtccctgctccttcaatagacagaagcacgaaacctcctctagatcgttcattagctccgtttgatagagaacccttcacactaggaaagaaaccaccattttctgacaagccctcgattccagcgggaaggtcactcggggagcatttacccaagattcaaaagcctcctttaccaccgaccacggaaagacatgaaaggagcagccccctgccagggaagaagccacctgtgccaaagcatggatggggaccagacagaagagagaatgatgaagatgatgtgcatcaaagacctttgccccagccagcactacttcctatgagctccaacactttcccttcaagatctactaagccaagtcccatgaaccctctcccatcctctcacatgcctggagcattctcagaaagtaacagcagttttccacagagtgcctccctgccaccatacttctctcaaggccctagcaacagaccacctatcagagccgaaggcagaaacttccccttgccacttccaaacaaacctcggcccccatcccccgcggaggaagagaattcattaaatgaagagtggtacgtttcttatattacccgaccagaggcagaagctgctcttagaaagataaaccaggatggcacatttctggtcagagacagctctaaaaaaacaacaaccaatccatatgtcctcatggtgttgtacaaagataaagtttacaacatccagatccgttatcagaaggaaagtcaagtttacttgttgggaactggactccgagggaaagaggactttctgtctgtgtcagatattattgactacttcaggaaaatgccacttctgctcattgatgggaaaaaccgaggttccagataccagtgcacattaacgcatgctgcagggtacccatagcaagttatagccgagcaaatgaaccgtcctcctgcctctgttgccaacacgagatcaatcagccttggtcaatggacaaacacttaggactgaactgaacccctccccatgaacacaagggttttatcctttcctttaaaaacagtgtttgaaatgaagactgtcaactatcccataatttatttattcttcttcaatgtttgtaaagtgcatgagtcatgttcacacttgaagtctagtagtgcactgtaataattcattttttaaaagattatttaatgcccatttcaaaatacagtagtttacacagctacagaaacaatttggggcaagttttaaaacactgaaacagtaatagttattggtgtcacataaaactgatttgttttttacagccaaacctctgtcagtcagaggcattcattagttttatacatgtaatttgaaaatcactaaacctcgttttctcagcagcaataatttaagaggcttcaaaaatataatttcactcttatttagtattttttcctgggggcatttttacgtaatttttttatgaaaagacaaatgcatgttgagataacttctgggattaaaatagtcttttgctttaaaaaaat

SEQ ID NO: 283363 - DNA, 1829 bp, Homo sapiens
ttcccccccccccccccctctaacgacgccatgatcgagctcgtacccggggttgttggttagattaccgaagaagactaaattcatgtgtaacagtgcagattatttaattgtatcacaaaatgtaaaattgcatgcatggtttgatggaaacatttctcacatttatgtcttctaacacacgtgggtaaagaatcagtaactgccaatgaatgagatagcataaaattttgactttcataaaacaaaacttgtaaatcatttctgaaatttataaggtttccagctgacaattttctgccaagttaacatttcaaaaatgaaaaacaaaatcaatgtgtattttagagtatcatctagatctgcgcccctttgtaaatggattctatggtggttaagtcatctagaaacaccctgggagcaaggttccatcctactacttcctaattacatctgatctgctttatttttgtgtcctctttatactagctgtttctaactggggggcggttatggaatgtttcttagtgacagctggggcctgccaatctcattcattgttttctacttctgcacgtgcatcaaagacctttgccccagccagcactacttcctatgagctccaacactttcccttcaagatctactaagccaagtcccatgaaccctctcccatcctctcacatgcctggagcattctcagaaagtaacagcagttttccacagagtgcctccctgccaccatacttctctcaaggccctagcaacagaccacctatcagagccgaaggcagaaacttccccttgccacttccaaacaaacctcggcccccatcccccgcggaggaagagaattcattaaatgaagagtggtacgtttcttatattacccgaccagaggcagaagctgctcttagaaagataaaccaggatggcacatttctggtcagagacagctctaaaaaaacaacaaccaatccatatgtcctcatggtgttgtacaaagataaagtttacaacatccagatccgttatcagaaggaaagtcaagtttacttgttgggaactggactccgagggaaagaggactttctgtctgtgtcagatattattgactacttcaggaaaatgccacttctgctcattgatgggaaaaaccgaggttccagataccagtgcacattaacgcatgctgcagggtacccatagcaagttatagccgagcaaatgaaccgtcctcctgcctctgttgccaacacgagatcaatcagccttggtcaatggacaaacacttaggactgaactgaacccctccccatgaacacaagggttttatcctttcctttaaaaacagtgtttgaaatgaagactgtcaactatcccataatttatttattcttcttcaatgtttgtaaagtgcatgagtcatgttcacacttgaagtctagtagtgcactgtaataattcattttttaaaagattatttaatgcccatttcaaaatacagtagtttacacagctacagaaacaatttggggcaagttttaaaacactgaaacagtaatagttattggtgtcacataaaactgatttgttttttacagccaaacctctgtcagtcagaggcattcattagttttatacatgtaatttgaaaatcactaaacctcgttttctcagcagcaataatttaagaggcttcaaaaatataatttcactcttatttagtattttttcctgggggcatttttacgtaatttttttatgaaaagacaaatgcatgttgagataacttctgggattaaaatagtcttttgctttaaaaaaat

SEQ ID NO: 283364 - DNA, 976 bp, Homo sapiens
ccccttccagtccctgctccttcaatagacagaagcacgaaacctcctctagatcgttcattagctccgtttgatagagaacccttcacactaggaaagaaaccaccattttctgacaagccctcgattccagcgggaaggtcactcggggagcatttacccaagattcaaaagcctcctttaccaccgaccacggaaagacatgaaaggagcagccccctgccagggaagaagccacctgtgccaaagcatggatggggaccagacagaagagagaatgatgaagatgatgtgcatcaaagacctttgccccagccagcactacttcctatgagctccaacactttcccttcaagatctactaagccaagtcccatgaaccctctcccatcctctcacatgcctggagcattctcagaaagtaacagcagttttccacagagtgcctccctgccaccatacttctctcaaggccctagcaacagaccacctatcagagccgaaggcagaaacttccccttgccacttccaaacaaacctcggcccccatcccccgcggaggaagagaattcattaaatgaagagtggtacgtttcttatattacccgaccagaggcagaagctgctcttagaaagataaaccaggatggcacatttctggtcagagacagctctaaaaaaacaacaaccaatccatatgtcctcatggtgttgtacaaagataaagtttacaacatccagatccgttatcagaaggaaagtcaagtttacttgttgggaactggactccgagggaaagaggtaaggatttcaaatttcgacattttcccaaagtctttatttatgccactctgcatgccttcatggagcgatctttgagagtccgtgctgtatggcaaatttaggattaaatcacatgagtgaagcccttcatttattggaagagaaataaagcaaaatctttacaatggttact

SEQ ID NO: 283365 - DNA, 914 bp, Homo sapiens
ttcccccccccccccccctctaacgacgccatgatcgagctcgtacccggggttgttggttagattaccgaagaagactaaattcatgtgtaacagtgcagattatttaattgtatcacaaaatgtaaaattgcatgcatggtttgatggaaacatttctcacatttatgtcttctaacacacgtgggtaaagaatcagtaactgccaatgaatgagatagcataaaattttgactttcataaaacaaaacttgtaaatcatttctgaaatttataaggtttccagctgacaattttctgccaagttaacatttcaaaaatgaaaaacaaaatcaatgtgtattttagagtatcatctagatctgcgcccctttgtaaatggattctatggtggttaagtcatctagaaacaccctgggagcaaggttccatcctactacttcctaattacatctgatctgctttatttttgtgtcctctttatactagctgtttctaactggggggcggttatggaatgtttcttagtgacagctggggcctgccaatctcattcattgttttctacttctgcacgtgcatcaaagacctttgccccagccagcactacttcctatgagctccaacactttcccttcaagatctactaagccaagtcccatgaaccctctcccatcctctcacatgcctggagcattctcagaaagtaacaggagttttccacaaagggccttccttgcaccatacttctctcaggccctaacaaacgccacctattaaaggccctaagggccagaacacttttcccctttgccaacttttcaaaccaaaccttcgtgccccccaatttcccccctcactcggcaaaccgcaattttcattcaatgtacgggcggccccgctttttttttctc

SEQ ID NO: 283366 - DNA, 679 bp, Homo sapiens
cagactgcatttcagggccctctgggcccgcctccccaccccagccctgcaaatgctatcaccgtctgctgcagagcccacctaacatgcacttcccttctcacctggcttactctctccttgcagaccctaagccctggggattcactgctcaccaaagacaagcccattaatataatttcctagcaaaagggaagtcttctgagaagaggacttctgtattctcccaactcaaagagctcaagttgcagccaatttttaaagtaactgttaagtgccctttacacagttgaatgttgttgctgttctgctttataaagcttgttagactttggcatggtccacagcggaatgtagttccattccctgtgtgctgtgttctgtccctgtgcccagcccccatggttttgggggcagcagggaaagtgataccaaatcaagaagcatttgcagcctggcttccctaacccagctcccctgtctggccccatcaccccaatccaaataaattttgttctttttctgtctcctcagtaacagcagttttccacagagtgcctccctgccaccatacttctctcaaggtttgtactctgggcttttgtgacgtgcttcagccatcaagcctttatgactggatccctaacctgtcccaaaagctttcgacaaaggttttatt

SEQ ID NO: 283367 - DNA, 444 bp, Homo sapiens
ttttcttttcacttacatctgtaactgtaaaatttattcagtttctaaaaatttacattttcagaattcattaaatgaagagtggtacgtttcttatattacccgaccagaggcagaagctgctcttagaaagataaaccaggtattgtgctatagtttattttaacatagttgtaaatattaatggcagagaagggaactgacctgtcctgagtaccaattacaagctaggaattctgctaggtgctgttgctttctgtaatacctaggagacccattagtgccagcttcacaactaccagcacccatagcagggattcctaggctcgggaatcattaggctggcagaagaatctcaaggcagtcatttggttggcagcatcttaggagattttattaatgaaagagtctgtcttgtcataggaatcacatggtgtcagaagg

SEQ ID NO: 283368 - DNA, 714 bp, Homo sapiens
ccccttccagtccctgctccttcaatagacagaagcacgaaacctcctctagatcgttcattagctccgtttgatagagaacccttcacactaggaaagaaaccaccattttctgacaagccctcgattccagcgggaaggtcactcggggagcatttacccaagattcaaaagcctcctttaccaccgaccacggaaagacatgaaaggagcagccccctgccagggaagaagccacctgtgccaaagcatggatggggaccagacagaagagagaatgatgaagatgatgtgcatcaaagacctttgccccagccagcactacttcctatgagctccaacactttcccttcaagatctactaagccaagtcccatgaaccctctcccatcctctcacatgcctggagcattctcagaaagtaacagcagttttccacagagtgcctccctgccaccatacttctctcaaggccctagcaacagaccacctatcagagccgaaggcagaaacttccccttgccacttccaaacaaacctcggcccccatcccccgcggaggaagagaattcattaaatgaagagtggtacgtttcttatattacccgaccagaggcagaagctgctcttagaaagataaaccaggatgccattctggcagaacgtctaaaaaaacaccatctattctctgtgtgcaagtaatccactcgacga

SEQ ID NO: 283369 - DNA, 935 bp, Homo sapiens
caactgacagactaaacttcccttgcacttcatctattaccgacagatatagtcagagacagctctaaaaaaacaacaaccaatccatatgtcctcatggtgttgtacaaagataaagtttacaacatccagatccgttatcagaaggaaagtcaagtttacttgttgggaactggactccgagggaaagaggactttctgtctgtgtcagatattattgactacttcaggaaaatgccacttctgctcattgatgggaaaaaccgaggttccagataccagtgcacattaacgcatgctgcagggtacccatagcaagttatagccgagcaaatgaaccgtcctcctgcctctgttgccaacacgagatcaatcagccttggtcaatggacaaacacttaggactgaactgaacccctccccatgaacacaagggttttatcctttcctttaaaaacagtgtttgaaatgaagactgtcaactatcccataatttatttattcttcttcaatgtttgtaaagtgcatgagtcatgttcacacttgaagtctagtagtgcactgtaataattcattttttaaaagattatttaatgcccatttcaaaatacagtagtttacacagctacagaaacaatttggggcaagttttaaaacactgaaacagtaatagttattggtgtcacataaaactgatttgttttttacagccaaacctctgtcagtcagaggcattcattagttttatacatgtaatttgaaaatcactaaacctcgttttctcagcagcaataatttaagaggcttcaaaaatataatttcactcttatttagtattttttcctgggggcatttttacgtaatttttttatgaaaagacaaatgcatgttgagataacttctgggattaaaatagtcttttgctttaaaaaaat

SEQ ID NO: 283370 - DNA, 595 bp, Homo sapiens
ccccttccagtccctgctccttcaatagacagaagcacgaaacctcctctagatcgttcattagctccgtttgatagagaacccttcacactaggaaagaaaccaccattttctgacaagccctcgattccagcgggaaggtcactcggggagcatttacccaagattcaaaagcctcctttaccaccgaccacggaaagacatgaaaggagcagccccctgccagggaagaagccacctgtgccaaagcatggatggggaccagacagaagagagaatgatgaagatgatgtgcatcaaagacctttgccccagccagcactacttcctatgagctccaacactttcccttcaagatctactaagccaagtcccatgaaccctctcccatcctctcacatgcctggagcattctcagaaagtaacagcagttttccacagagtgcctccctgccaccatacttctctcaaggccctagcaacagaccacctatcagagccgaaggcagaaacttccccttgccacttccaaacaaacctcggcccccatcccccgcggaggaagagggttaggtgaggttcgcgggtaggagac

SEQ ID NO: 283371 - DNA, 310 bp, Homo sapiens
taaaatgatatatctgatgcatttattaatagaaaaagatctgtagctcgaagtgatcctctctaggcaggatatagtgagtaagggaccccatcacttcttccattgtacatatctgtgttgaattttttatagtgaacattttttacttttgtgatcagaagaaaaatttctaaatgttatatttgtataaccatagtcatgttatttctttgaataacctatcagtgatttatatttctgtgaggtttatatgtgtgtattcttaaaacattattttcctttgcctccttcaaatttatacaggtcc

SEQ ID NO: 283372 - DNA, 326 bp, Homo sapiens
tgaggttctgagaagcaaggcctggccaggcctcctggcctagggaggcttagggccaggctgcccccaaggccaggccacaggattgtctggggcacagggcctgctgctgggctaatacccctcttcctgcccgccagcatcgagggggagtacgtgccagtggagggcgacgaggtgacctacaagatgtgccctatccctcccaagaaccagaagttccaggccgtggaggtggtgctcactcagctggccccccacactccccacgagacgtggtctggccaggtcgtgggctcctaggctgagtggttcacaggccagct

SEQ ID NO: 283373 - DNA, 2781 bp, Homo sapiens
tcagcagctgccctcactgggcagggcaaattataccgtggcccgaccataaaagccactttccaaaaaaagaagctttaaggcccccgagagacgcagctgagcctctcacctggcagtgcctgactcaggaggtgatgtctgggccatgagccacagagcctggtgtccctttaagcagggagtacaaattctcatccctccctcctgctctccctgacgtcagctggaaggcgtgtgagtgagtgaggggctgaggtaccgcccgcgcgagcacacacagacacacagacacacacacacacacacacacacacacaatcttccagacccatcccctgcctgccagctccacgagccagagagagacagagcgcggacgccgcaggaggcagtgcctggaccccagctgcccaggagagacggagcccgtggctggtgaggccgcagagcagggccaggccgggccctgcccgcaaggacgaccaaacccctcaccggcccctgggccccagagcccaccaggctctcctgctggccccaccatgacttcagagtcgacgtcaccgcccagttgtgccccgcgctccactcccccaagtccccagtctggcccacgcttccccttccacagggagggcagcagggtctgggagcggggtggtgtcccacctcgggacctacccagccctctgcccaccaagcggaccaggacctattcagcgacagcccgggcctcagctggccccgtgttcaagggcgtctgtaagcagttctcacgctcacagggccatggcttcatcacccccgagaacgggtccgaggacatcttcgtacatgtgtctgacatcgagggggagtacgtgccagtggagggcgacgaggtgacctacaagatgtgccctatccctcccaagaaccagaagttccaggccgtggaggtggtgctcactcagctggccccccacactccccacgagacgtggtctggccaggtcgtgggctcctaggctgagtggttcacaggccagctggcggggggttggggagccacacagggtgaacgggcagcagccggctccatgccccactgccctggctgatgagtccttcggtggcctcagtgtgcacgtctgtctgtccgtctgtgcttgtggctatgagcgtgtgcctccacccaccccacgacccgtgactactgtgcaagctggccaggaggtaggtggagggcaaggccaccagacctggcttcgcgctgtccactgcctctctcctcccctccctgccgcagacacgcaggacccgctcgccctcctgcttacccgtccccacggtgactgagctgcgagagcctgcgctgggctcactccctggcctccgcccctgagctgtcccgtgtcagtccctggcccggagccaggctctctgtgctacttacatctccctcccttggctgaggtcccccgccacagcctggacccttccctcagaagcctggccgatgggtgcttttggggagcctctcagcctctggcaggggaggaggactgacacggaggcacacaggcctctcactgccgaggccagccttccttcctgctctgctctctcagtgccatggagaggcaggaagaggggcctgagggcggaaggggtttggggctcccatttcgccggccagtccctcctcctcagcctggcagtggcgctgggctccttcccctgggctgtactgagccgagcccaggggtttgcagagggtgggggtccatctctccagcttggctgcagacctcctttaccctgactcacaagccccactgatgctctgggccatgcccggctgacggctgctgtggatgccgcgagggacggacacacgtccggggcacccacgaggagggcccccagcctgggagactggccctgcggcctccacgtcaaactctcttcccaaagccctaacagaccagtggccgaggtgtggctcttattgcatccatccctgaagatgtgtggctgttgctgtcacctggagtccttttggggccaagatgtgtgtgcacccggggtcgtggccattcactcccaggcaggggtgagggtggcctggcccaggaggccaggaaggagggccctgtctgcctccacctctgggtgcaccccctgcctaccaccctcccttctagagagcacatcgcctgaccggggagaagtggggccgtggttcgagggagggctggccaggggtgggacccttatgagactcagtctgtgagtaaaactgggggctcaaatgcccaggatgaggggatcagtgactgtctaggaggatcccttgccttgtaggtgccccaagaccgcagggtagaaatcagccgggatgcctgcatcccacccccggccccagggcccaccacataaaatctgggagcccagagctgctgaggtgtggtcagctcccctaaaatgggcacggcccagcctgtcccatgaggaataaaggcccctggcccccttgagagagggcttgttggtgagggctgactcctgggggcccccaaggctcccctcctgtggggaggccaccttttaaggcaccactagcagtcaggatatggtggcatcagccctggggcctcctgggtggcaggggggcagcagctctcctccccactcacaggccctgcagtgctcatttggaattcctcccaagacccctggccacccagaccccccattcttcctaacactggcaataaaccctcaactgtgacccac

SEQ ID NO: 283374 - DNA, 629 bp, Homo sapiens
aggtacccacaaggcaggcatattagcaacgtggcaatcctgagcaacagtgctcacaccattgaggtctgtgaacagtcacttttggcattcaccctgagtgaaagatggaatggcttaagtgcaaatgcaccatattataaacaatttcttacaaaaaaagtcccggattctcgtgccgaattcggcacgaggagagaactagtctcgagtttttttttttttttttttttgtttttttttttttttttttttttcaactccggcgaggtcgggaagtccgttcatgcagagttaccaaggttgtcacgttgagatgctggacttgaaatctggagtcctgcttcctgtggctagataatcctgggtctgtgcgtcttataaatggaaatgaaaggacctgcctttcctgttgttgaggtcatcgggaagatcaaatatttgagaagtacttcagttcatggaagcagctatctccttcacttactagcagtaagactttgttttcatcttcgagtttcaaattcttcactgtaaaatcttggtgattaaacacaatgcagttgctgcaaagattatataaaaaaccaaaaaaaaaactcgagactagttctctctctctctctctc

SEQ ID NO: 283375 - DNA, 2341 bp, Homo sapiens
aaaaaaaaaaacaaaacttagttgtgttctctttatctgaaaatatactatttacctatttgttaattttattgtctttctctgccatttagaatggagtctagaatgcagggatttctctgtcctgttcctgctgtctcttcagcatctagaatagtactgggtatatagtatgctcctgataaatgttttgaacatatgaataaacattattcactttctttttataagacctaactgttacattctttttactttacttttaaatgtaaattattacatttttgtaataatttttattttaatagttatgcaaatagatagcctcaaccatatccaggataaaaacgagaaggatgattctcagaaagacacctccaaaaaggttcaaactatctcagactgtgaaaaacaagcccttgcacagtcagaacctggccagttggctgacagcaaggaagaaacaccaaaaattgagaaagaagacggacttacatcccagccaggtaatgaacagtggaagagttcagacactttgccagtgtatgacaccttaatgttctgtgcaagtaggaatactgaccggattcacatctatactaaggatggaaaacagatgagctgtaatttcattcctctggatataaaattagacctttgggaagatttaccagcaagctttcagctgaaacaatatcgctcactgattttgagatttgttcgagaatggagtagtctaactgccatgaagcaaaggataatcaggaaaagtggacagctattctgtagcccaattcttgctttggaagagatcacaaagcaacaaaccaaacaaaattgcaccaaaagatacataaccaaagaagatgttgccgtagcctcaatggacaaagtgaagaatgttgggggccatgtccgtctgatcacaaaggagtccaggccacgggatcctttcacaaaaaaacttcttgaagatggagcctgtgtcccatttctaaatccatacacagtccaggcagatctcactgtgaagccctctacatccaaaggctatttgcaagctgtggataatgaaggaaatccactttgccttcgctgtcagcaacccacttgccagactaagcaagcatgtaaagcgaactcttgggattcacggttttgctctctgaaatgtcaggaagagttttggattcgatctaataacagttacctgagagccaaagtatttgaaactgaacatggtgtgtgtcagctctgtaatgtgaacgcacaagaactctttttacgtctgagagatgcccctaaaagtcagaggaagaatcttctgtatgctacctggacttcaaagctcccattagaacagctaaatgaaatgataagaaacccaggggaaggacatttctggcaggtggatcacatcaagccagtgtatgggggaggaggacagtgttccctggacaacctgcagactctctgcacagtctgtcacaaagagagaactgccagacaagctaaggaaagaagccaggtgagaagacaatctctagcatcaaagcatggatcagacatcacacgatttttggtaaacctgtaaagtagaaaaatatatgaatgaatgacaaatggtttacatgtggaagactttaatacagaagttttccatgtttgtttaatatatcgagagtaaaaattttcagaacaaaaatcaagaattcaaattctcttctactaattacttttagtattaaatacattttgaaagtacttaacagaaactaagatacaatactgaatatttctgtggtctttttgatttgattcagactcgcaattatgtttcagcaatgttttgtaaagctctttacccctaatatgcctaatcactgtattgtgcatagattgtgtttaaaaaatgtactctcaattacctaaaaatgcttctggattagtattgttctggactgtcataggtatgagtggaacattgcaaaaccttatgggaaatttcagacgcaaatcattatttgggaattctgggccaagcatgaccagcctgcttaggattcaagagagactgtccactaaatacctccagaatgagctaggggcacacattttgggtgttgcttttcttgctttatttcttagctagtcatctttatcaaaaatatccttttcaaaatgaggtacctatggtgtttgtggacaatttgggggttctgtgtaaagtaattgttaaaactattaaataactgaaaacataaaatgtaaaatgccacttaagcttgattttttagatctttttttaaaaaatgaataaaactaggcttactgttggctg

SEQ ID NO: 283376 - DNA, 269 bp, Homo sapiens
taactattttatttctacactgtgatctgtgtttactatttatccgtattgaaactttgataacctttatatgaagcaattactatttagcctaatcattcattagttacctattcagtgtttttatcaattgtagaaaacttcttgaagatggagcctgtgtcccatttctaaatccatacacagtccaggcagatctcactgtgaagccctctacatccaaaggctatttgcaagctgtggataatgaaggaaatccactttgcctt

SEQ ID NO: 283377 - DNA, 2578 bp, Homo sapiens
gtcacctgggggcttttctggggctgtcaactggaacaccgcaggatttctccatgtggcctgggtttcctcataccaatggtggctaggttcccaagttcgaaaaagaaaaacagcatgatattcgatcattttttgtaccacaacctaaaaaaagacagttgatgacctcctgtgacgaatcaaagagattccgggaggaaaatactgtagtgtcatcagaccctacaaaaacagctgcaagagatatcatcgattatgaaagtgatgttgaacctgaaacgaaaagattgaaattggctgcctcggaagaccactgcagtccgtcggaagagacaccatcccagtccaagcaaatccgaactccactcgtggaaagtgtacaggaggccaaggcccagttaaccaccccagcctttcctgtagagggctggcaatgtagtctctgcacctatatcaataattcagagttaccttattgtgaaatgtgtgagactcctcaaggcagtgctgttatgcaaatagatagcctcaaccatatccaggataaaaacgagaaggatgattctcagaaagacacctccaaaaaggttcaaactatctcagactgtgaaaaacaagcccttgcacagtcagaacctggccagttggctgacagcaaggaagaaacaccaaaaattgagaaagaagacggacttacatcccagccaggtaatgaacagtggaagagttcagacactttgccagtgtatgacaccttaatgttctgtgcaagtaggaatactgaccggattcacatctatactaaggatggaaaacagatgagctgtaatttcattcctctggatataaaattagacctttgggaagatttaccagcaagctttcagctgaaacaatatcgctcactgattttgagatttgttcgagaatggagtagtctaactgccatgaagcaaaggataatcaggaaaagtggacagctattctgtagcccaattcttgctttggaagagatcacaaagcaacaaaccaaacaaaattgcaccaaaagatacataaccaaagaagatgttgccgtagcctcaatggacaaagtgaagaatgttgggggccatgtccgtctgatcacaaaggagtccaggccacgggatcctttcacaaaaaaacttcttgaagatggagcctgtgtcccatttctaaatccatacacagtccaggcagatctcactgtgaagccctctacatccaaaggctatttgcaagctgtggataatgaaggaaatccactttgccttcgctgtcagcaacccacttgccagactaagcaagcatgtaaagcgaactcttgggattcacggttttgctctctgaaatgtcaggaagagttttggattcgatctaataacagttacctgagagccaaagtatttgaaactgaacatggtgtgtgtcagctctgtaatgtgaacgcacaagaactctttttacgtctgagagatgcccctaaaagtcagaggaagaatcttctgtatgctacctggacttcaaagctcccattagaacagctaaatgaaatgataagaaacccaggggaaggacatttctggcaggtggatcacatcaagccagtgtatgggggaggaggacagtgttccctggacaacctgcagactctctgcacagtctgtcacaaagagagaactgccagacaagctaaggaaagaagccaggtgagaagacaatctctagcatcaaagcatggatcagacatcacacgatttttggtaaacctcaaagctgcatgaatcacacaaggtaacaggtgccgagcaaggtctgcaggtttctggattgccagatagtgcagcacctgaaggaggtgcagcgcacacaaatgatcagcgcaggtgtcaaaggatgaagcagccacttacagaagtgcaaatcctcagccactcatcttaatccttaacaagacagcactccagataggcagccacgaccccaaaggcttctggaaccaaactgattaaagttttactcagtggatagttctatagaattaatgatgatgtatgccaaaaacctttcagtgattctaacttcaagcttggaaaaaaagacgaggcttcccagtgtttgtggtggtggatctgcctggttctcaatttgacaccctaagcgatcatactcaagaatagtacagatgtgtggaatacgccaatacctttaactacagacatcatgttctcaagataaaagcctttaaaacaaaaagccatcgtaggtatcaagtcaacatgaaattggaatgcaaaattaatactgctgaggatttccttcatatcccatgctgtttaactatctcttccacagtcctagaatcaatcttttttaattaagagacagggtctgtctttgttacccaggctggagtacagtggtgtcatcaaagctcagtgcagcctccaactcctgggctcaatactcttgcctcagcctcctcttcctgagtagctgcaactacagacacatgccccaatactcagctaatttttaaatttttgtggagatg

SEQ ID NO: 283378 - DNA, 1361 bp, Homo sapiens
taggcagaacaggatcaggaagcgatcaaacctaccaaggcagtctcacttctcaatgactggactgtgtgggtactctgctccagacatgcgtggcctcagactcatcatgataccagttgagctgctactttgctacctcctgctgcaccctgtggatgccacttcatatggaaagcagacaaatgtcttgatgcactttcccttgtccttggaatcccagacaccctcctcagaccccttgtcctgccaatttctgcacccaaagtcactgcctggtttcagccacatggcccctctacccaagttcttggtaagcctggctctaaggaatgccctggaggaagctggttgtcaggctgatgtttgggctctacagctacagctctaccgccagggtggtgtgaatgctacacaggtcctcatccagcatcttcgagggctccagaaaggcagaagcacagagaggaacgtgtcagtggaagccctggcctctgctctgcagctgttagccagggagcagcaaagcacaggaagggtcgggcgctccctcccgacagaggactgtgagaatgagaaggagcaagctgtgcacaatgtagtccagctgctgccaggagtgggaaccttctacaacctgggcacagctttgtattatgctactcaaaactgcctgggcaaggccagggaacgaggccgagatggggccatagatctgggatatgaccttctgatgaccatggctgggatgtcaggggggcctatgggtctagcgatcagtgctgcacttaaacctgcattaaggtctggggttcagcagttgatccagtattaccaagatcagaaagacgcaaacatctctcagccggagaccaccaaggagggtttgagggccatctcagatgtgagtgacttggaagaaacaactactctggcttctttcatatcagaagtagtaagttcagctccctactgggggtgggccataatcaagagctatgacttagatcctggggctgggagtcttgagatataaaagaatgtggtaaccacagaattaataactgtactaccctgacaagctatatacatgtcttcaaaattttaatctgatttatccaggaggaaggctgtacagtaaaacgtaagaacgtaaatgtttgggtgttgaagtcacagggtttggtttcgaatctaggctccacttgttagagcctcggtgatcactgaatagtaacttctttcttgaactaagatcagttttgaagtttctaaaggagatagaatgattttaacctcaatgagttgccctgtaaatttaaaatgatacaatgaatctaaaatgcttatcacagtacttt

SEQ ID NO: 283379 - DNA, 1474 bp, Homo sapiens
aaaaattagctgggcatggtgtcacgcacctgtagtcccagctgcttgggaggctgaggcaggaggatccctcgagcccaggaattcaaggcagcagtgatttgtgatcccatcactgcactctagtctgggcaacagagcaagaccctgtctctaaaaagaaagtacaaaagcttggaagcagggtactctgctccagacatgcgtggcctcagactcatcatgataccagttgagctgctactttgctacctcctgctgcaccctgtggatgccacttcatatggaaagcagacaaatgtcttgatgcactttcccttgtccttggaatcccagacaccctcctcagaccccttgtcctgccaatttctgcacccaaagtcactgcctggtttcagccacatggcccctctacccaagttcttggtaagcctggctctaaggaatgccctggaggaagctggttgtcaggctgatgtttgggctctacagctacagctctaccgccagggtggtgtgaatgctacacaggtcctcatccagcatcttcgagggctccagaaaggcagaagcacagagaggaacgtgtcagtggaagccctggcctctgctctgcagctgttagccagggagcagcaaagcacaggaagggtcgggcgctccctcccgacagaggactgtgagaatgagaaggagcaagctgtgcacaatgtagtccagctgctgccaggagtgggaaccttctacaacctgggcacagctttgtattatgctactcaaaactgcctgggcaaggccagggaacgaggccgagatggggccatagatctgggatatgaccttctgatgaccatggctgggatgtcaggggggcctatgggtctagcgatcagtgctgcacttaaacctgcattaaggtctggggttcagcagttgatccagtattaccaagatcagaaagacgcaaacatctctcagccggagaccaccaaggagggtttgagggccatctcagatgtgagtgacttggaagaaacaactactctggcttctttcatatcagaagtagtaagttcagctccctactgggggtgggccataatcaagagctatgacttagatcctggggctgggagtcttgagatataaaagaatgtggtaaccacagaattaataactgtactaccctgacaagctatatacatgtcttcaaaattttaatctgatttatccaggaggaaggctgtacagtaaaacgtaagaacgtaaatgtttgggtgttgaagtcacagggtttggtttcgaatctaggctccacttgttagagcctcggtgatcactgaatagtaacttctttcttgaactaagatcagttttgaagtttctaaaggagatagaatgattttaacctcaatgagttgccctgtaaatttaaaatgatacaatgaatctaaaatgcttatcacagtacttt

SEQ ID NO: 283380 - DNA, 605 bp, Homo sapiens
cagtccgtggcaccgcaatcaggggtggcgccaccccgccccgggcctcagcgaagacctccgcccggccaacatggctggcgccgcctctgccacgtcaagaggaggggacggggcgtgagggcaggaagggggcaggaaggggcgggcgcagagttaccagggcaggccaccggacccctgagcttgcttaataaccggaggatttgagaaaggcgcgcggcgggcgaaggtcgcagaaagagtggagaactggtgccactcggacaccttagctcaccgagagaaatggagacggcctccaggacatcttaggaccctggttgattccgagaatcacaaatcacatctctgaaaaaagtgaaaagttcattctttcacttagtgcaacaaatgtttactgaaacttactatgtgccagacacaattgagatgctggtaatatgatgcaggcaaagtaggcccagatccctggcccgaaagaattcacgtactatttatgtattttagtcagcctgtcttttcctcctacattgcctctgccacttcaactctgtctccccccacccccaaaacacacacacagtacaatatttggctgattc

SEQ ID NO: 283381 - DNA, 494 bp, Homo sapiens
agcggccgcggaaggtgaggcctggtgtagacgccaaagtcttgtcaggagtgggcggggcagggtgatgtatgatctgaaaggccgggagtgactaacgactgtcagtgtgtgtgtgcctgtgaggctgtgtctgtgtgacagtatcattgtgtgcgattctgagtgtcacttggtgcagctgtcagctaatgtgactgcgtgtgtcagtgtgcatggagctggaggtgcatgtggctgtgcaagtgtgggattatgtgtgtatctgtcaatgcacatttttggtgggactgggttgtgtgtttgtgtgagagggactgtgaccacatgagggaatgtgttttgggaaggtctctgtggggtttgagaccatgtctgccagcgtgagagtgggtggctggctttgtgtgtgccaatgtgtgacttcagcagtagcagagcaaaagtgaggtttgtgactatgtgtgtgtcctgggtcctaacttaaaccgtgt

SEQ ID NO: 283382 - DNA, 732 bp, Homo sapiens
taaagccatctgagatacccaagtagtagaatcctttcaagcactggttactggtgatgaattttgttttgtactgtcacagagctggaaatttttggatccttttagttcatctgatttaggttataaattatgatggttgttccttcttacccccaacctgacaactattaacatgatgtacactcattttaaaatagttttgcagtctgttttctctattgagtggctacattgtgttattaaatgtgtatatttatatcgaatacagatgttcaataatatatctgtaatgtacatatgtgttgctaaatgtagatacagaagaaactatatggagtctgataattaaatgattattaaatgatacttgtaatgaaagtctgccccaaaaagtgaccagatttttattggggttgctgtgtatctccaggaagaagaggaggggtcagaagacgatagcaatgtgaagccagacttcatggtcactctgaaaaccgatttcagtgcacgatgctttctggaccaattcgaagatgacgctgatggatttatttccccaatggatgataaaataccatcaaaatgcagccaggacacagggctttcaaatctccatgctgcctcaatgtatgtcattttggtggtggtggtgaaatgttttggtaaaaatagctcacttaaatattatcttagcctttgtatctaaataaattagctgataaaatacaa

SEQ ID NO: 283383 - DNA, 3019 bp, Homo sapiens
aaatgtagagaagcagccgataaaatagcattgcctgaagaagtttggaggctgagagcagcagtagactggccaactgcagagcaagttgtttctccagccgtgcggtgcagcctcatgcccccaacccagcttagccactgtaagaagacgttcactgtacagacgaccaaacttgccgtggaagagacagttgtgagattcccttgcaaatttacatacgagaatggcttgtgaaatcatgcctctgcaaagttcacaggaagatgaaagacctctgtcacctttctatttgagtgctcatgtaccccaagtcagcaatgtgtctgcaaccggagaactcttagaaagaaccatccgatcagctgtagaacaacatctttttgatgttaataactctggaggtcaaagttcagaggactcagaatctggaacactatcagcatcttctgccacatctgccagacagcgccgccgccagtccaaggagcaggatgaagttcgacatgggagagacaagggacttatcaacaaagaaaatactccttctgggttcaaccaccttgatgattgtattttgaatactcaggaagtcgaaaaggtacacaaaaatacttttggttgtgctggagaaaggagcaagcctaaacgtcagaaatccagtactaaactttctgagcttcatgacaatcaggacggtcttgtgaatatggaaagtctcaattccacacgatctcatgagagaactggacctgatgattttgaatggatgtctgatgaaaggaaaggaaatgaaaaagatggtggacacactcagcattttgagagccccacaatgaagatccaggagcatcccagcctatctgacaccaaacagcagagaaatcaagatgccggtgaccaggaggagagctttgtctccgaagtgccccagtcggacctgactgcattgtgtgatgaaaagaactgggaagagcctatccctgctttctcctcctggcagcgggagaacagtgactctgatgaagcccacctctcgccgcaggctgggcgcctgatccgtcagctgctggacgaagacagcgaccccatgctctctcctcggttctacgcttatgggcagagcaggcaatacctggatgacacagaagtgcctccttccccaccaaactcccattctttcatgaggcggcgaagctcctctctggggtcctatgatgatgagcaagaggacctgacacctgcccagctcacacgaaggattcagagccttaaaaagaagatccggaagtttgaagatagattcgaagaagagaagaagtacagaccttcccacagtgacaaagcagccaatccggaggttctgaaatggacaaatgaccttgccaaattccggagacaacttaaagaatcaaaactaaagatatctgaagaggacctaactcccaggatgcggcagcgaagcaacacactccccaagagttttggttcccaacttgagaaagaagatgagaagaagcaagagctggtggataaagcaataaagcccagtgttgaagccacattggaatctattcagaggaagctccaggagaagcgagcggaaagcagccgccctgaggacattaaggatatgaccaaagaccagattgctaatgagaaagtggctctgcagaaagctctgttatattatgaaagcattcatggacggccggtaacaaagaacgaacggcaggtgatgaagccactatacgacaggtaccggctggtcaaacagatcctctcccgagctaacaccatacccatcattggttccccctccagcaagcggagaagccctttgctgcagccaattatcgagggcgaaactgcttccttcttcaaggagataaaggaagaagaggaggggtcagaagacgatagcaatgtgaagccagacttcatggtcactctgaaaaccgatttcagtgcacgatgctttctggaccaattcgaagatgacgctgatggatttatttccccaatggatgataaaataccatcaaaatgcagccaggacacagggctttcaaatctccatgctgcctcaatacctgaactcctggaacacctccaggaaatgagagaagaaaagaaaaggattcgaaagaaacttcgggattttgaagacaactttttcagacagaatggaagaaatgtccagaaggaagaccgcactcctatggctgaagaatacagtgaatataagcacataaaggcgaaactgaggctcctggaggtgctcatcagcaagagagacactgattccaagtccatgtgaggggcatggccaagcacagggggctggcagctgcggtgagagtttactgtccccagagaaagtgcagctctggaaggcagccttggggctggccctgcaaagcatgcagcccttctgcctctagaccatttggcatcggctcctgtttccattgcctgccttagaaatggctggtccaatgggatttacagcaacattttccattgctgaagtgaggtagcagctctcttctgtcagctgaatgttaaggatggggaaaaagaatgcctttaagtttgctcttaatcgtatggaagcttgagctatgtgttggaagtgccctggttttaatccatacacaaagacggtacataatcctacaggtttaaatgtacataaaaatatagtttggaattctttgctctactgtttacattgcagattgctataatttcaaggagtgagattataaataaaatgatgcactttaggatgtttcctatttttgaaatctgaacatgaatcattcacatgaccaaaaattgtgtttttttaaaaatacatgtctagtctgtcctttaatagctctcttaaataagctatgatattaatcagatcattaccagttagcttttaaagcacatttgtttaagactatgtttttggaaaaatacgctacagaatttttttttaagctacaaataaatgagatgctactaa

SEQ ID NO: 283384 - DNA, 598 bp, Homo sapiens
ctcgcgaacgtgttatccaggtattcccatgctctctcctcggttctacgcttatgggcagagcaggcaatacctggatgacacagaagtgcctccttccccaccaaactcccattctttcatgaggcggcgaagctcctctctggggtcctatgatgatgagcaagaggacctgacacctgcccagctcacacgaaggattcagagccttaaaaagaagatccggaagtttgaagatagattcgaagaagagaagaagtacagaccttcccacagtgacaaagcagccaatccggaggttctgaaatggacaaatgaccttgccaaattccggagacaacttaaagaatcaaaactaaagatatctgaagaggacctaactcccaggatgcggcagcgaagcaacacactccccaagagttttggttcccaacttgagaaagaagatgagaagaagcaagagctggtggataaagcaataaagcccagtgttgaagccacattggaatctattcagaggaagctccaggagaagcgagcggaaagcagccgccctgaggacattaaggatacacgtcgcgaggtaccggctcgatca

SEQ ID NO: 283385 - DNA, 4306 bp, Homo sapiens
gcctggggatagttaaaggagcacagatgcacagttgctttctgcatgcaagtggccagctaggatccggggggcatcaagccatgatttttatttctgtgctggatgcattagcagctgtgacttggaaggttttatcctgaaggagtggaattgctgcagacgtcttggggttttggtgagcagtagatatttggggacattgtgctgttattgcagagccccacaatgaagatccaggagcatcccagcctatctgacaccaaacagcagagaaatcaagatgccggtgaccaggaggagagctttgtctccgaagtgccccagtcggacctgactgcattgtgtgatgaaaagaactgggaagagcctatccctgctttctcctcctggcagcgggagaacagtgactctgatgaagcccacctctcgccgcaggctgggcgcctgatccgtcagctgctggacgaagacagcgaccccatgctctctcctcggttctacgcttatgggcagagcaggcaatacctggatgacacagaagtgcctccttccccaccaaactcccattctttcatgaggcggcgaagctcctctctggggtcctatgatgatgagcaagaggacctgacacctgcccagctcacacgaaggattcagagccttaaaaagaagatccggaagtttgaagatagattcgaagaagagaagaagtacagaccttcccacagtgacaaagcagccaatccggaggttctgaaatggacaaatgaccttgccaaattccggagacaacttaaagaatcaaaactaaagatatctgaagaggacctaactcccaggatgcggcagcgaagcaacacactccccaagagttttggttcccaacttgagaaagaagatgagaagaagcaagagctggtggataaagcaataaagcccagtgttgaagccacattggaatctattcagaggaagctccaggagaagcgagcggaaagcagccgccctgaggacattaaggatatgaccaaagaccagattgctaatgagaaagtggctctgcagaaagctctgttatattatgaaagcattcatggacggccggtaacaaagaacgaacggcaggtgatgaagccactatacgacaggtaccggctggtcaaacagatcctctcccgagctaacaccatacccatcattggttccccctccagcaagcggagaagccctttgctgcagccaattatcgagggcgaaactgcttccttcttcaaggagataaaggaagaagaggaggggtcagaagacgatagcaatgtgaagccagacttcatggtcactctgaaaaccgatttcagtgcacgatgctttctggaccaattcgaagatgacgctgatggatttatttccccaatggatgataaaataccatcaaaatgcagccaggacacagggctttcaaatctccatgctgcctcaatacctgaactcctggaacacctccaggaaatgagagaagaaaagaaaaggattcgaaagaaacttcgggattttgaagacaactttttcagacagaatggaagaaatgtccagaaggaagaccgcactcctatggctgaagaatacagtgaatataagcacataaaggcgaaactgaggctcctggaggtgctcatcagcaagagagacactgattccaagtccatgtgaggggcatggccaagcacagggggctggcagctgcggtgagagtttactgtccccagagaaagtgcagctctggaaggcagccttggggctggccctgcaaagcatgcagcccttctgcctctagaccatttggcatcggctcctgtttccattgcctgccttagaaactggctggaagaagacaatgtgacctgacttaggcattttgtaattggaaagtcaagactgcagtatgtgcacatgcgcacgcgcatgcacgcacacacacacacagtagtggagctttcctaacactagcagagattaatcactacattagacaacactcatctacagagaatatacactgttcttccctggataactgagaaacaagagaccattctctgtctaactgtgataaaaacaagctcaggactttattctatagagcaaacttgctgtggagggccatgctctccttggacccagttaactgcaaacgtgcattggagccctatttgctgccgctgccattctagtgacctttccacagagctgcgccttcctcacgtgtgtgaaaggttttccccttcagccctcaggtagatggaagctgcatctgcccacgatggcagtgcagtcatcatcttcaggatgtttcttcaggacttcctcagctgacaaggaattttggtccctgcctaggaccgggtcatctgcagaggacagagagatggtaagcagctgtatgaatgctgattttaaaaccaggtcatgggagaagagcctggagattctttcctgaacactgactgcacttaccagtctgattttatcgtcaaacaccaagccaggctagcatgctcatggcaatctgtttggggctgttttgttgtggcactagccaaacataaaggggcttaagtcagcctgcatacagaggatcggggagagaaggggcctgtgttctcagcctcctgagtacttaccagagtttaatttttttaaaaaaaatctgcactaaaatccccaaactgacaggtaaatgtagccctcagagctcagcccaaggcagaatctaaatcacactattttcgagatcatgtataaaaagaaaaaaaagaagtcatgctgtgtggccaattataatttttttcaaagactttgtcacaaaactgtctatattagacattttggagggaccaggaaatgtaagacaccaaatcctccatctcttcagtgtgcctgatgtcacctcatgatttgctgttacttttttaactcctgcgccaaggacagtgggttctgtgtccacctttgtgctttgcgaggccgagcccaggcatctgctcgcctgccacggctgaccagagaaggtgcttcaggagctctgccttagacgacgtgttacagtatgaacacacagcagaggcaccctcgtatgttttgaaagttgccttctgaaagggcacagttttaaggaaaagaaaaagaatgtaaaactatactgacccgttttcagttttaaagggtcgtgagaaactggctggtccaatgggatttacagcaacattttccattgctgaagtgaggtagcagctctcttctgtcagctgaatgttaaggatggggaaaaagaatgcctttaagtttgctcttaatcgtatggaagcttgagctatgtgttggaagtgccctggttttaatccatacacaaagacggtacataatcctacaggtttaaatgtacataaaaatatagtttggaattctttgctctactgtttacattgcagattgctataatttcaaggagtgagattataaataaaatgatgcactttaggatgtttcctatttttgaaatctgaacatgaatcattcacatgaccaaaaattgtgtttttttaaaaatacatgtctagtctgtcctttaatagctctcttaaataagctatgatattaatcagatcattaccagttagcttttaaagcacatttgtttaagactatgtttttggaaaaatacgctacagaatttttttttaagctacaaataaatgagatgctactaattgttttggaatctgttgtttctgccaaaggtaaattaactaaagatttattcaggaatccccatttgaatttgtatgattcaataaaagaaaacaccaagtaagttatataaaataaattgtgtatgagatgttgtgttttcctttgtaatttccactaactaactaactaacttcttatattcttcatggaatggagcccagatgaaatgagaggaagcccttttcacactagatcttatttgaagaaatgtttgttagtcagtcagtcagtggtttctggctctgccgagggagatgtgttccccagcaaccatttctgcagcccagaatctcaaggcactagaggcggtgtcttaattaattggcttcacaaagacaaaatgctctggactgggatttttcctttgctgtgttgggaatatgtgtttattaattagcacatgccaacaaaataaatgtcaagagttatttcataagtgtaagtaaacttaagaattaaagagtgcagacttataattttcaaaatactttta

SEQ ID NO: 283386 - DNA, 3137 bp, Homo sapiens
ggagtctgtaccttccagcacgcaacccatcattggttccccctccagcaagcggagaagccctttgctgcagccaattatcgagggcgaaactgcttccttcttcaaggagataaaggaagaagaggaggggtcagaagacgatagcaatgtgaagccagacttcatggtcactctgaaaaccgatttcagtgcacgatgctttctggaccaattcgaagatgacgctgatggatttatttccccaatggatgataaaataccatcaaaatgcagccaggacacagggctttcaaatctccatgctgcctcaatacctgaactcctggaacacctccaggaaatgagagaagaaaagaaaaggattcgaaagaaacttcgggattttgaagacaactttttcagacagaatggaagaaatgtccagaaggaagaccgcactcctatggctgaagaatacagtgaatataagcacataaaggcgaaactgaggctcctggaggtgctcatcagcaagagagacactgattccaagtccatgtgaggggcatggccaagcacagggggctggcagctgcggtgagagtttactgtccccagagaaagtgcagctctggaaggcagccttggggctggccctgcaaagcatgcagcccttctgcctctagaccatttggcatcggctcctgtttccattgcctgccttagaaactggctggaagaagacaatgtgacctgacttaggcattttgtaattggaaagtcaagactgcagtatgtgcacatgcgcacgcgcatgcacgcacacacacacacagtagtggagctttcctaacactagcagagattaatcactacattagacaacactcatctacagagaatatacactgttcttccctggataactgagaaacaagagaccattctctgtctaactgtgataaaaacaagctcaggactttattctatagagcaaacttgctgtggagggccatgctctccttggacccagttaactgcaaacgtgcattggagccctatttgctgccgctgccattctagtgacctttccacagagctgcgccttcctcacgtgtgtgaaaggttttccccttcagccctcaggtagatggaagctgcatctgcccacgatggcagtgcagtcatcatcttcaggatgtttcttcaggacttcctcagctgacaaggaattttggtccctgcctaggaccgggtcatctgcagaggacagagagatggtaagcagctgtatgaatgctgattttaaaaccaggtcatgggagaagagcctggagattctttcctgaacactgactgcacttaccagtctgattttatcgtcaaacaccaagccaggctagcatgctcatggcaatctgtttggggctgttttgttgtggcactagccaaacataaaggggcttaagtcagcctgcatacagaggatcggggagagaaggggcctgtgttctcagcctcctgagtacttaccagagtttaatttttttaaaaaaaatctgcactaaaatccccaaactgacaggtaaatgtagccctcagagctcagcccaaggcagaatctaaatcacactattttcgagatcatgtataaaaagaaaaaaaagaagtcatgctgtgtggccaattataatttttttcaaagactttgtcacaaaactgtctatattagacattttggagggaccaggaaatgtaagacaccaaatcctccatctcttcagtgtgcctgatgtcacctcatgatttgctgttacttttttaactcctgcgccaaggacagtgggttctgtgtccacctttgtgctttgcgaggccgagcccaggcatctgctcgcctgccacggctgaccagagaaggtgcttcaggagctctgccttagacgacgtgttacagtatgaacacacagcagaggcaccctcgtatgttttgaaagttgccttctgaaagggcacagttttaaggaaaagaaaaagaatgtaaaactatactgacccgttttcagttttaaagggtcgtgagaaactggctggtccaatgggatttacagcaacattttccattgctgaagtgaggtagcagctctcttctgtcagctgaatgttaaggatggggaaaaagaatgcctttaagtttgctcttaatcgtatggaagcttgagctatgtgttggaagtgccctggttttaatccatacacaaagacggtacataatcctacaggtttaaatgtacataaaaatatagtttggaattctttgctctactgtttacattgcagattgctataatttcaaggagtgagattataaataaaatgatgcactttaggatgtttcctatttttgaaatctgaacatgaatcattcacatgaccaaaaattgtgtttttttaaaaatacatgtctagtctgtcctttaatagctctcttaaataagctatgatattaatcagatcattaccagttagcttttaaagcacatttgtttaagactatgtttttggaaaaatacgctacagaatttttttttaagctacaaataaatgagatgctactaattgttttggaatctgttgtttctgccaaaggtaaattaactaaagatttattcaggaatccccatttgaatttgtatgattcaataaaagaaaacaccaagtaagttatataaaataaattgtgtatgagatgttgtgttttcctttgtaatttccactaactaactaactaacttcttatattcttcatggaatggagcccagatgaaatgagaggaagcccttttcacactagatcttatttgaagaaatgtttgttagtcagtcagtcagtggtttctggctctgccgagggagatgtgttccccagcaaccatttctgcagcccagaatctcaaggcactagaggcggtgtcttaattaattggcttcacaaagacaaaatgctctggactgggatttttcctttgctgtgttgggaatatgtgtttattaattagcacatgccaacaaaataaatgtcaagagttatttcataagtgtaagtaaacttaagaattaaagagtgcagacttataattttcaaaatactttta

SEQ ID NO: 283387 - DNA, 2756 bp, Homo sapiens
tgatcctcagacccctttttcctttatttgcattagaaatgtccagaaggaagaccgcactcctatggctgaagaatacagtgaatataagcacataaaggcgaaactgaggctcctggaggtgctcatcagcaagagagacactgattccaagtccatgtgaggggcatggccaagcacagggggctggcagctgcggtgagagtttactgtccccagagaaagtgcagctctggaaggcagccttggggctggccctgcaaagcatgcagcccttctgcctctagaccatttggcatcggctcctgtttccattgcctgccttagaaactggctggaagaagacaatgtgacctgacttaggcattttgtaattggaaagtcaagactgcagtatgtgcacatgcgcacgcgcatgcacgcacacacacacacagtagtggagctttcctaacactagcagagattaatcactacattagacaacactcatctacagagaatatacactgttcttccctggataactgagaaacaagagaccattctctgtctaactgtgataaaaacaagctcaggactttattctatagagcaaacttgctgtggagggccatgctctccttggacccagttaactgcaaacgtgcattggagccctatttgctgccgctgccattctagtgacctttccacagagctgcgccttcctcacgtgtgtgaaaggttttccccttcagccctcaggtagatggaagctgcatctgcccacgatggcagtgcagtcatcatcttcaggatgtttcttcaggacttcctcagctgacaaggaattttggtccctgcctaggaccgggtcatctgcagaggacagagagatggtaagcagctgtatgaatgctgattttaaaaccaggtcatgggagaagagcctggagattctttcctgaacactgactgcacttaccagtctgattttatcgtcaaacaccaagccaggctagcatgctcatggcaatctgtttggggctgttttgttgtggcactagccaaacataaaggggcttaagtcagcctgcatacagaggatcggggagagaaggggcctgtgttctcagcctcctgagtacttaccagagtttaatttttttaaaaaaaatctgcactaaaatccccaaactgacaggtaaatgtagccctcagagctcagcccaaggcagaatctaaatcacactattttcgagatcatgtataaaaagaaaaaaaagaagtcatgctgtgtggccaattataatttttttcaaagactttgtcacaaaactgtctatattagacattttggagggaccaggaaatgtaagacaccaaatcctccatctcttcagtgtgcctgatgtcacctcatgatttgctgttacttttttaactcctgcgccaaggacagtgggttctgtgtccacctttgtgctttgcgaggccgagcccaggcatctgctcgcctgccacggctgaccagagaaggtgcttcaggagctctgccttagacgacgtgttacagtatgaacacacagcagaggcaccctcgtatgttttgaaagttgccttctgaaagggcacagttttaaggaaaagaaaaagaatgtaaaactatactgacccgttttcagttttaaagggtcgtgagaaactggctggtccaatgggatttacagcaacattttccattgctgaagtgaggtagcagctctcttctgtcagctgaatgttaaggatggggaaaaagaatgcctttaagtttgctcttaatcgtatggaagcttgagctatgtgttggaagtgccctggttttaatccatacacaaagacggtacataatcctacaggtttaaatgtacataaaaatatagtttggaattctttgctctactgtttacattgcagattgctataatttcaaggagtgagattataaataaaatgatgcactttaggatgtttcctatttttgaaatctgaacatgaatcattcacatgaccaaaaattgtgtttttttaaaaatacatgtctagtctgtcctttaatagctctcttaaataagctatgatattaatcagatcattaccagttagcttttaaagcacatttgtttaagactatgtttttggaaaaatacgctacagaatttttttttaagctacaaataaatgagatgctactaattgttttggaatctgttgtttctgccaaaggtaaattaactaaagatttattcaggaatccccatttgaatttgtatgattcaataaaagaaaacaccaagtaagttatataaaataaattgtgtatgagatgttgtgttttcctttgtaatttccactaactaactaactaacttcttatattcttcatggaatggagcccagatgaaatgagaggaagcccttttcacactagatcttatttgaagaaatgtttgttagtcagtcagtcagtggtttctggctctgccgagggagatgtgttccccagcaaccatttctgcagcccagaatctcaaggcactagaggcggtgtcttaattaattggcttcacaaagacaaaatgctctggactgggatttttcctttgctgtgttgggaatatgtgtttattaattagcacatgccaacaaaataaatgtcaagagttatttcataagtgtaagtaaacttaagaattaaagagtgcagacttataattttcaaaatactttta

SEQ ID NO: 283388 - DNA, 4500 bp, Homo sapiens
aaatgtagagaagcagccgataaaatagcattgcctgaagaagtttggaggctgagagcagcagtagactggccaactgcagagcaagttgtttctccagccgtgcggtgcagcctcatgcccccaacccagcttagccactgtaagaagacgttcactgtacagacgaccaaacttgccgtggaagagacagttgtgagattcccttgcaaatttacatacgagaatggcttgtgaaatcatgcctctgcaaagttcacaggaagatgaaagacctctgtcacctttctatttgagtgctcatgtaccccaagtcagcaatgtgtctgcaaccggagaactcttagaaagaaccatccgatcagctgtagaacaacatctttttgatgttaataactctggaggtcaaagttcagaggactcagaatctggaacactatcagcatcttctgccacatctgccagacagcgccgccgccagtccaaggagcaggatgaagttcgacatgggagagacaagggacttatcaacaaagaaaatactccttctgggttcaaccaccttgatgattgtattttgaatactcaggaagtcgaaaaggtacacaaaaatacttttggttgtgctggagaaaggagcaagcctaaacgtcagaaatccagtactaaactttctgagcttcatgacaatcaggacggtcttgtgaatatggaaagtctcaattccacacgatctcatgagagaactggacctgatgattttgaatggatgtctgatgaaaggaaaggaaatgaaaaagatggtggacacactcagcattttgagagccccacaatgaagatccaggagcatcccagcctatctgacaccaaacagcagagaaatcaagatgccggtgaccaggaggagagctttgtctccgaagtgccccagtcggacctgactgcattgtgtgatgaaaagaactgggaagagcctatccctgctttctcctcctggcagcgggagaacagtgactctgatgaagcccacctctcgccgcaggctgggcgcctgatccgtcagctgctggacgaagacagcgaccccatgctctctcctcggttctacgcttatgggcagagcaggcaatacctggatgacacagaagtgcctccttccccaccaaactcccattctttcatgaggcggcgaagctcctctctggggtcctatgatgatgagcaagaggacctgacacctgcccagctcacacgaaggattcagagccttaaaaagaagatccggaagtttgaagatagattcgaagaagagaagaagtacagaccttcccacagtgacaaagcagccaatccggaggttctgaaatggacaaatgaccttgccaaattccggagacaacttaaagaatcaaaactaaagatatctgaagaggacctaactcccaggatgcggcagcgaagcaacacactccccaagagttttggttcccaacttgagaaagaagatgagaagaagcaagagctggtggataaagcaataaagcccagtgttgaagccacattggaatctattcagaggaagctccaggagaagcgagcggaaagcagccgccctgaggacattaaggatatgaccaaagaccagattgctaatgagaaagtggctctgcagaaagctctgttatattatgaaagcattcatggacggccggtaacaaagaacgaacggcaggtgatgaagccactatacgacaggtaccggctggtcaaacagatcctctcccgagctaacaccatacccatcattggttccccctccagcaagcggagaagccctttgctgcagccaattatcgagggcgaaactgcttccttcttcaaggagataaaggaagaagaggaggggtcagaagacgatagcaatgtgaagccagacttcatggtcactctgaaaaccgatttcagtgcacgatgctttctggaccaattcgaagatgacgctgatggatttatttccccaatggatgataaaataccatcaaaatgcagccaggacacagggctttcaaatctccatgctgcctcaatacctgaactcctggaacacctccaggaaatgagagaagaaaagaaaaggattcgaaagaaacttcgggattttgaagacaactttttcagacagaatggaagaaatgtccagaaggaagaccgcactcctatggctgaagaatacagtgaatataagcacataaaggcgaaactgaggctcctggaggtgctcatcagcaagagagacactgattccaagtccatgtgaggggcatggccaagcacagggggctggcagctgcggtgagagtttactgtccccagagaaagtgcagctctggaaggcagccttggggctggccctgcaaagcatgcagcccttctgcctctagaccatttggcatcggctcctgtttccattgcctgccttagaaactggctggaagaagacaatgtgacctgacttaggcattttgtaattggaaagtcaagactgcagtatgtgcacatgcgcacgcgcatgcacgcacacacacacacagtagtggagctttcctaacactagcagagattaatcactacattagacaacactcatctacagagaatatacactgttcttccctggataactgagaaacaagagaccattctctgtctaactgtgataaaaacaagctcaggactttattctatagagcaaacttgctgtggagggccatgctctccttggacccagttaactgcaaacgtgcattggagccctatttgctgccgctgccattctagtgacctttccacagagctgcgccttcctcacgtgtgtgaaaggttttccccttcagccctcaggtagatggaagctgcatctgcccacgatggcagtgcagtcatcatcttcaggatgtttcttcaggacttcctcagctgacaaggaattttggtccctgcctaggaccgggtcatctgcagaggacagagagatggtaagcagctgtatgaatgctgattttaaaaccaggtcatgggagaagagcctggagattctttcctgaacactgactgcacttaccagtctgattttatcgtcaaacaccaagccaggctagcatgctcatggcaatctgtttggggctgttttgttgtggcactagccaaacataaaggggcttaagtcagcctgcatacagaggatcggggagagaaggggcctgtgttctcagcctcctgagtacttaccagagtttaatttttttaaaaaaaatctgcactaaaatccccaaactgacaggtaaatgtagccctcagagctcagcccaaggcagaatctaaatcacactattttcgagatcatgtataaaaagaaaaaaaagaagtcatgctgtgtggccaattataatttttttcaaagactttgtcacaaaactgtctatattagacattttggagggaccaggaaatgtaagacaccaaatcctccatctcttcagtgtgcctgatgtcacctcatgatttgctgttacttttttaactcctgcgccaaggacagtgggttctgtgtccacctttgtgctttgcgaggccgagcccaggcatctgctcgcctgccacggctgaccagagaaggtgcttcaggagctctgccttagacgacgtgttacagtatgaacacacagcagaggcaccctcgtatgttttgaaagttgccttctgaaagggcacagttttaaggaaaagaaaaagaatgtaaaactatactgacccgttttcagttttaaagggtcgtgagaaactggctggtccaatgggatttacagcaacattttccattgctgaagtgaggtagcagctctcttctgtcagctgaatgttaaggatggggaaaaagaatgcctttaagtttgctcttaatcgtatggaagcttgagctatgtgttggaagtgccctggttttaatccatacacaaagacggtacataatcctacaggtttaaatgtacataaaaatatagtttggaattctttgctctactgtttacattgcagattgctataatttcaaggagtgagattataaataaaatgatgcactttaggatgtttcctatttttgaaatctgaacatgaatcattcacatgaccaaaaattgtgtttttttaaaaatacatgtctagtctgtcctttaatagctctcttaaataagctatgatattaatcagatcattaccagttagcttttaaagcacatttgtttaagactatgtttttggaaaaatacgctacagaatttttttttaagctacaaataaatgagatgctactaattgttttggaatctgttgtttctgccaaaggtaaattaactaaagatttattcaggaatccccatttgaatttgtatgattcaataaaagatacatcccagtcttcactcataatcggccccc

SEQ ID NO: 283389 - DNA, 4432 bp, Homo sapiens
aaatgtagagaagcagccgataaaatagcattgcctgaagaagtttggaggctgagagcagcagtagactggccaactgcagagcaagttgtttctccagccgtgcggtgcagcctcatgcccccaacccagcttagccactgtaagaagacgttcactgtacagacgaccaaacttgccgtggaagagacagttgtgagattcccttgcaaatttacatacgagaatggcttgtgaaatcatgcctctgcaaagttcacaggaagatgaaagacctctgtcacctttctatttgagtgctcatgtaccccaagtcagcaatgtgtctgcaaccggagaactcttagaaagaaccatccgatcagctgtagaacaacatctttttgatgttaataactctggaggtcaaagttcagaggactcagaatctggaacactatcagcatcttctgccacatctgccagacagcgccgccgccagtccaaggagcaggatgaagttcgacatgggagagacaagggacttatcaacaaagaaaatactccttctgggttcaaccaccttgatgattgtattttgaatactcaggaagtcgaaaaggtacacaaaaatacttttggttgtgctggagaaaggagcaagcctaaacgtcagaaatccagtactaaactttctgagcttcatgacaatcaggacggtcttgtgaatatggaaagtctcaattccacacgatctcatgagagaactggacctgatgattttgaatggatgtctgatgaaaggaaaggaaatgaaaaagatggtggacacactcagcattttgagagccccacaatgaagatccaggagcatcccagcctatctgacaccaaacagcagagaaatcaagatgccggtgaccaggaggagagctttgtctccgaagtgccccagtcggacctgactgcattgtgtgatgaaaagaactgggaagagcctatccctgctttctcctcctggcagcgggagaacagtgactctgatgaagcccacctctcgccgcaggctgggcgcctgatccgtcagctgctggacgaagacagcgaccccatgctctctcctcggttctacgcttatgggcagagcaggcaatacctggatgacacagaagtgcctccttccccaccaaactcccattctttcatgaggcggcgaagctcctctctggggtcctatgatgatgagcaagaggacctgacacctgcccagctcacacgaaggattcagagccttaaaaagaagatccggaagtttgaagatagattcgaagaagagaagaagtacagaccttcccacagtgacaaagcagccaatccggaggttctgaaatggacaaatgaccttgccaaattccggagacaacttaaagaatcaaaactaaagatatctgaagaggacctaactcccaggatgcggcagcgaagcaacacactccccaagagttttggttcccaacttgagaaagaagatgagaagaagcaagagctggtggataaagcaataaagcccagtgttgaagccacattggaatctattcagaggaagctccaggagaagcgagcggaaagcagccgccctgaggacattaaggatatgaccaaagaccagattgctaatgagaaagtggctctgcagaaagctctgttatattatgaaagcattcatggacggccggtaacaaagaacgaacggcaggtgatgaagccactatacgacaggtaccggctggtcaaacagatcctctcccgagctaacaccatacccatcattggttccccctccagcaagcggagaagccctttgctgcagccaattatcgagggcgaaactgcttccttcttcaaggagataaaggaagaagaggaggggtcagaagacgatagcaatgtgaagccagacttcatggtcactctgaaaaccgatttcagtgcacgatgctttctggaccaattcgaagatgacgctgatggatttatttccccaatggatgataaaataccatcaaaatgcagccaggacacagggctttcaaatctccatgctgcctcaatacctgaactcctggaacacctccaggaaatgagagaagaaaagaaaaggattcgaaagaaacttcgggattttgaagacaactttttcagacagaatggaagaaatgtccagaaggaagaccgcactcctatggctgaagaatacagtgaatataagcacataaaggcgaaactgaggctcctggaggtgctcatcagcaagagagacactgattccaagtccatgtgaggggcatggccaagcacagggggctggcagctgcggtgagagtttactgtccccagagaaagtgcagctctggaaggcagccttggggctggccctgcaaagcatgcagcccttctgcctctagaccatttggcatcggctcctgtttccattgcctgccttagaaactggctggaagaagacaatgtgacctgacttaggcattttgtaattggaaagtcaagactgcagtatgtgcacatgcgcacgcgcatgcacgcacacacacacacagtagtggagctttcctaacactagcagagattaatcactacattagacaacactcatctacagagaatatacactgttcttccctggataactgagaaacaagagaccattctctgtctaactgtgataaaaacaagctcaggactttattctatagagcaaacttgctgtggagggccatgctctccttggacccagttaactgcaaacgtgcattggagccctatttgctgccgctgccattctagtgacctttccacagagctgcgccttcctcacgtgtgtgaaaggttttccccttcagccctcaggtagatggaagctgcatctgcccacgatggcagtgcagtcatcatcttcaggatgtttcttcaggacttcctcagctgacaaggaattttggtccctgcctaggaccgggtcatctgcagaggacagagagatggtaagcagctgtatgaatgctgattttaaaaccaggtcatgggagaagagcctggagattctttcctgaacactgactgcacttaccagtctgattttatcgtcaaacaccaagccaggctagcatgctcatggcaatctgtttggggctgttttgttgtggcactagccaaacataaaggggcttaagtcagcctgcatacagaggatcggggagagaaggggcctgtgttctcagcctcctgagtacttaccagagtttaatttttttaaaaaaaatctgcactaaaatccccaaactgacaggtaaatgtagccctcagagctcagcccaaggcagaatctaaatcacactattttcgagatcatgtataaaaagaaaaaaaagaagtcatgctgtgtggccaattataatttttttcaaagactttgtcacaaaactgtctatattagacattttggagggaccaggaaatgtaagacaccaaatcctccatctcttcagtgtgcctgatgtcacctcatgatttgctgttacttttttaactcctgcgccaaggacagtgggttctgtgtccacctttgtgctttgcgaggccgagcccaggcatctgctcgcctgccacggctgaccagagaaggtgcttcaggagctctgccttagacgacgtgttacagtatgaacacacagcagaggcaccctcgtatgttttgaaagttgccttctgaaagggcacagttttaaggaaaagaaaaagaatgtaaaactatactgacccgttttcagttttaaagggtcgtgagaaactggctggtccaatgggatttacagcaacattttccattgctgaagtgaggtagcagctctcttctgtcagctgaatgttaaggatggggaaaaagaatgcctttaagtttgctcttaatcgtatggaagcttgagctatgtgttggaagtgccctggttttaatccatacacaaagacggtacataatcctacaggtttaaatgtacataaaaatatagtttggaattctttgctctactgtttacattgcagattgctataatttcaaggagtgagattataaataaaatgatgcactttaggatgtttcctatttttgaaatctgaacatgaatcattcacatgaccaaaaattgtgtttttttaaaaatacatgtctagtctgtcctttaatagctctcttaaataagctatgatattaatcagatcattaccagttagcttttaaagcacatttgtttaagactatgtttttggaaaaatacgctacagaatttttttttaagctacaaataaatgagatgctactaaagtgcatcattttatttataatctcactccttgaaattatagcaatctgtcgacg

SEQ ID NO: 283390 - DNA, 3609 bp, Homo sapiens
aaatgtagagaagcagccgataaaatagcattgcctgaagaagtttggaggctgagagcagcagtagactggccaactgcagagcaagttgtttctccagccgtgcggtgcagcctcatgcccccaacccagcttagccactgtaagaagacgttcactgtacagacgaccaaacttgccgtggaagagacagttgtgagattcccttgcaaatttacatacgagaatggcttgtgaaatcatgcctctgcaaagttcacaggaagatgaaagacctctgtcacctttctatttgagtgctcatgtaccccaagtcagcaatgtgtctgcaaccggagaactcttagaaagaaccatccgatcagctgtagaacaacatctttttgatgttaataactctggaggtcaaagttcagaggactcagaatctggaacactatcagcatcttctgccacatctgccagacagcgccgccgccagtccaaggagcaggatgaagttcgacatgggagagacaagggacttatcaacaaagaaaatactccttctgggttcaaccaccttgatgattgtattttgaatactcaggaagtcgaaaaggtacacaaaaatacttttggttgtgctggagaaaggagcaagcctaaacgtcagaaatccagtactaaactttctgagcttcatgacaatcaggacggtcttgtgaatatggaaagtctcaattccacacgatctcatgagagaactggacctgatgattttgaatggatgtctgatgaaaggaaaggaaatgaaaaagatggtggacacactcagcattttgagagccccacaatgaagatccaggagcatcccagcctatctgacaccaaacagcagagaaatcaagatgccggtgaccaggaggagagctttgtctccgaagtgccccagtcggacctgactgcattgtgtgatgaaaagaactgggaagagcctatccctgctttctcctcctggcagcgggagaacagtgactctgatgaagcccacctctcgccgcaggctgggcgcctgatccgtcagctgctggacgaagacagcgaccccatgctctctcctcggttctacgcttatgggcagagcaggcaatacctggatgacacagaagtgcctccttccccaccaaactcccattctttcatgaggcggcgaagctcctctctggggtcctatgatgatgagcaagaggacctgacacctgcccagctcacacgaaggattcagagccttaaaaagaagatccggaagtttgaagatagattcgaagaagagaagaagtacagaccttcccacagtgacaaagcagccaatccggaggttctgaaatggacaaatgaccttgccaaattccggagacaacttaaagaatcaaaactaaagatatctgaagaggacctaactcccaggatgcggcagcgaagcaacacactccccaagagttttggttcccaacttgagaaagaagatgagaagaagcaagagctggtggataaagcaataaagcccagtgttgaagccacattggaatctattcagaggaagctccaggagaagcgagcggaaagcagccgccctgaggacattaaggatatgaccaaagaccagattgctaatgagaaagtggctctgcagaaagctctgttatattatgaaagcattcatggacggccggtaacaaagaacgaacggcaggtgatgaagccactatacgacaggtaccggctggtcaaacagatcctctcccgagctaacaccatacccatcattggttccccctccagcaagcggagaagccctttgctgcagccaattatcgagggcgaaactgcttccttcttcaaggagataaaggaagaagaggaggggtcagaagacgatagcaatgtgaagccagacttcatggtcactctgaaaaccgatttcagtgcacgatgctttctggaccaattcgaagatgacgctgatggatttatttccccaatggatgataaaataccatcaaaatgcagccaggacacagggctttcaaatctccatgctgcctcaatacctgaactcctggaacacctccaggaaatgagagaagaaaagaaaaggattcgaaagaaacttcgggattttgaagacaactttttcagacagaatggaagaaatgtccagaaggaagaccgcactcctatggctgaagaatacagtgaatataagcacataaaggcgaaactgaggctcctggaggtgctcatcagcaagagagacactgattccaagtccatgtgaggggcatggccaagcacagggggctggcagctgcggtgagagtttactgtccccagagaaagtgcagctctggaaggcagccttggggctggccctgcaaagcatgcagcccttctgcctctagaccatttggcatcggctcctgtttccattgcctgccttagaaactggctggaagaagacaatgtgacctgacttaggcattttgtaattggaaagtcaagactgcagtatgtgcacatgcgcacgcgcatgcacgcacacacacacacagtagtggagctttcctaacactagcagagattaatcactacattagacaacactcatctacagagaatatacactgttcttccctggataactgagaaacaagagaccattctctgtctaactgtgataaaaacaagctcaggactttattctatagagcaaacttgctgtggagggccatgctctccttggacccagttaactgcaaacgtgcattggagccctatttgctgccgctgccattctagtgacctttccacagagctgcgccttcctcacgtgtgtgaaaggttttccccttcagccctcaggtagatggaagctgcatctgcccacgatggcagtgcagtcatcatcttcaggatgtttcttcaggacttcctcagctgacaaggaattttggtccctgcctaggaccgggtcatctgaatggaaatttcagaatggagacccacacagggtgggggtgggctgaggagaggcatgccctcccaatggccttactacctcttccagccatggattctgaatcctgtaagacaaaagtacatcagagtcatccctgactgggtcagctcaccaaggctatatatacacagaatttcacattcagtaaaagtcaaaattcccaaatgcagtcttagaatcctggcaggcacacagacaaatggggcttggcaggtctgggattgttaacagcttggtcctcactcttcccctccagccacaaggcttagacagcaagggtgactccgtgttatgctgcagctgcccggagacagggcccaatgcaaacctcagcaagaactcagttctgacaccaagaagatccccatgttactatgaattctgaaattataatcttttagatgtctggatttttctttaatttctctaaagcaattcaaagatgcacagaaatcttcatgtcaagcttctgatcctacagctttgagtatttcttggtaagccattttgaggcactatgattttctataacttttaaataatttaaa

SEQ ID NO: 283391 - DNA, 1296 bp, Homo sapiens
ccgaatcctcctcctctcaatggatttggttagtaacttctcatgctagaggaaaaatgaagcttattatataagattaatgttgtgaaacacctgttatttggaattggtttggtacttcctcttgaaatttccctcattaagtttaggtcgtggctgttttaaggaaaagaaaaagaatgtaaaactatactgacccgttttcagttttaaagggtcgtgagaaactggctggtccaatgggatttacagcaacattttccattgctgaagtgaggtagcagctctcttctgtcagctgaatgttaaggatggggaaaaagaatgcctttaagtttgctcttaatcgtatggaagcttgagctatgtgttggaagtgccctggttttaatccatacacaaagacggtacataatcctacaggtttaaatgtacataaaaatatagtttggaattctttgctctactgtttacattgcagattgctataatttcaaggagtgagattataaataaaatgatgcactttaggatgtttcctatttttgaaatctgaacatgaatcattcacatgaccaaaaattgtgtttttttaaaaatacatgtctagtctgtcctttaatagctctcttaaataagctatgatattaatcagatcattaccagttagcttttaaagcacatttgtttaagactatgtttttggaaaaatacgctacagaatttttttttaagctacaaataaatgagatgctactaattgttttggaatctgttgtttctgccaaaggtaaattaactaaagatttattcaggaatccccatttgaatttgtatgattcaataaaagaaaacaccaagtaagttatataaaataaattgtgtatgagatgttgtgttttcctttgtaatttccactaactaactaactaacttcttatattcttcatggaatggagcccagatgaaatgagaggaagcccttttcacactagatcttatttgaagaaatgtttgttagtcagtcagtcagtggtttctggctctgccgagggagatgtgttccccagcaaccatttctgcagcccagaatctcaaggcactagaggcggtgtcttaattaattggcttcacaaagacaaaatgctctggactgggatttttcctttgctgtgttgggaatatgtgtttattaattagcacatgccaacaaaataaatgtcaagagttatttcataagtgtaagtaaacttaagaattaaagagtgcagacttataattttcaaaatactttta

SEQ ID NO: 283392 - DNA, 2374 bp, Homo sapiens
aaatgtagagaagcagccgataaaatagcattgcctgaagaagtttggaggctgagagcagcagtagactggccaactgcagagcaagttgtttctccagccgtgcggtgcagcctcatgcccccaacccagcttagccactgtaagaagacgttcactgtacagacgaccaaacttgccgtggaagagacagttgtgagattcccttgcaaatttacatacgagaatggcttgtgaaatcatgcctctgcaaagttcacaggaagatgaaagacctctgtcacctttctatttgagtgctcatgtaccccaagtcagcaatgtgtctgcaaccggagaactcttagaaagaaccatccgatcagctgtagaacaacatctttttgatgttaataactctggaggtcaaagttcagaggactcagaatctggaacactatcagcatcttctgccacatctgccagacagcgccgccgccagtccaaggagcaggatgaagttcgacatgggagagacaagggacttatcaacaaagaaaatactccttctgggttcaaccaccttgatgattgtattttgaatactcaggaagtcgaaaaggtacacaaaaatacttttggttgtgctggagaaaggagcaagcctaaacgtcagaaatccagtactaaactttctgagcttcatgacaatcaggacggtcttgtgaatatggaaagtctcaattccacacgatctcatgagagaactggacctgatgattttgaatggatgtctgatgaaaggaaaggaaatgaaaaagatggtggacacactcagcattttgagagccccacaatgaagatccaggagcatcccagcctatctgacaccaaacagcagagaaatcaagatgccggtgaccaggaggagagctttgtctccgaagtgccccagtcggacctgactgcattgtgtgatgaaaagaactgggaagagcctatccctgctttctcctcctggcagcgggagaacagtgactctgatgaagcccacctctcgccgcaggctgggcgcctgatccgtcagctgctggacgaagacagcgaccccatgctctctcctcggttctacgcttatgggcagagcaggcaatacctggatgacacagaagtgcctccttccccaccaaactcccattctttcatgaggcggcgaagctcctctctggggtcctatgatgatgagcaagaggacctgacacctgcccagctcacacgaaggattcagagccttaaaaagaagatccggaagtttgaagatagattcgaagaagagaagaagtacagaccttcccacagtgacaaagcagccaatccggaggttctgaaatggacaaatgaccttgccaaattccggagacaacttaaagaatcaaaactaaagatatctgaagaggacctaactcccaggatgcggcagcgaagcaacacactccccaagagttttggttcccaacttgagaaagaagatgagaagaagcaagagctggtggataaagcaataaagcccagtgttgaagccacattggaatctattcagaggaagctccaggagaagcgagcggaaagcagccgccctgaggacattaaggatatgaccaaagaccagattgctaatgagaaagtggctctgcagaaagctctgttatattatgaaagcattcatggacggccggtaacaaagaacgaacggcaggtgatgaagccactatacgacaggtaccggctggtcaaacagatcctctcccgagctaacaccatacccatcattggttccccctccagcaagcggagaagccctttgctgcagccaattatcgagggcgaaactgcttccttcttcaaggagataaaggtgaagaccccagctgctaacccattgctaaatccgcaccagttccctccctcctcccctcccctccggtgaatggaaagggggtgtgatcgggccttttggtggtggcttcttacagcattccctaaaaatcagtagctacatataaccaactttgaacagttcctctaaagagtgctaatttctccagttccatttagttgatttctttggtttcattttattcccccccctcttttttgtattgtctgttgttgttttgtttttactttgctttcagggattattttgtttggttttgttgtccacaatgctttttgtttggttttgttttctgtatttggggaatggatttttctgtattccaaaatcttaaattagctcattagaccaactttaaaaggaatctcatatactgtttatagaaaaatcaaaattaacataggaaatatatatataaacatataaaacaatgaaaaa

SEQ ID NO: 283393 - DNA, 418 bp, Homo sapiens
cgaagaagagaagaagtacagagtaagtgtcccctcacactgttcttttcgcctcatcctctccctggacatggcagcatttcagcaactcaaagaaacgacgaaaggttaagggaggcttctagggaatcttacaacaaaaaggcagtaaaccctggatagtacaccctgataaaccccagtcattatgtatcagcattttccttgcacaagtgtattcttacaaaaaaaaaaatgaaagcttaagtctacattttataaattaatcagtaagcaggaactggagaaattgttgaatgaaatcctttgtttgactaaaatttaattcaatattatcttctgaaatcttgttagcactgagctcgttctgctgtcagctctgtaccacaagagtggcaaaaaggcatttttgtgacgg

SEQ ID NO: 283394 - DNA, 4913 bp, Homo sapiens
aaatgtagagaagcagccgataaaatagcattgcctgaagaagtttggaggctgagagcagcagtagactggccaactgcagagcaagttgtttctccagccgtgcggtgcagcctcatgcccccaacccagcttagccactgtaagaagacgttcactgtacagacgaccaaacttgccgtggaagagacagttgtgagattcccttgcaaatttacatacgagaatggcttgtgaaatcatgcctctgcaaagttcacaggaagatgaaagacctctgtcacctttctatttgagtgctcatgtaccccaagtcagcaatgtgtctgcaaccggagaactcttagaaagaaccatccgatcagctgtagaacaacatctttttgatgttaataactctggaggtcaaagttcagaggactcagaatctggaacactatcagcatcttctgccacatctgccagacagcgccgccgccagtccaaggagcaggatgaagttcgacatgggagagacaagggacttatcaacaaagaaaatactccttctgggttcaaccaccttgatgattgtattttgaatactcaggaagtcgaaaaggtacacaaaaatacttttggttgtgctggagaaaggagcaagcctaaacgtcagaaatccagtactaaactttctgagcttcatgacaatcaggacggtcttgtgaatatggaaagtctcaattccacacgatctcatgagagaactggacctgatgattttgaatggatgtctgatgaaaggaaaggaaatgaaaaagatggtggacacactcagcattttgagagccccacaatgaagatccaggagcatcccagcctatctgacaccaaacagcagagaaatcaagatgccggtgaccaggaggagagctttgtctccgaagtgccccagtcggacctgactgcattgtgtgatgaaaagaactgggaagagcctatccctgctttctcctcctggcagcgggagaacagtgactctgatgaagcccacctctcgccgcaggctgggcgcctgatccgtcagctgctggacgaagacagcgaccccatgctctctcctcggttctacgcttatgggcagagcaggcaatacctggatgacacagaagtgcctccttccccaccaaactcccattctttcatgaggcggcgaagctcctctctggggtcctatgatgatgagcaagaggacctgacacctgcccagctcacacgaaggattcagagccttaaaaagaagatccggaagtttgaagatagattcgaagaagagaagaagtacagaccttcccacagtgacaaagcagccaatccggaggttctgaaatggacaaatgaccttgccaaattccggagacaacttaaagaatcaaaactaaagatatctgaagaggacctaactcccaggatgcggcagcgaagcaacacactccccaagagttttggttcccaacttgagaaagaagatgagaagaagcaagagctggtggataaagcaataaagcccagtgttgaagccacattggaatctattcagaggaagctccaggagaagcgagcggaaagcagccgccctgaggacattaaggatatgaccaaagaccagattgctaatgagaaagtggctctgcagaaagctctgttatattatgaaagcattcatggacggccggtaacaaagaacgaacggcaggtgatgaagccactatacgacaggtaccggctggtcaaacagatcctctcccgagctaacaccatacccatcattggttccccctccagcaagcggagaagccctttgctgcagccaattatcgagggcgaaactgcttccttcttcaaggagataaaggaagaagaggaggggtcagaagacgatagcaatgtgaagccagacttcatggtcactctgaaaaccgatttcagtgcacgatgctttctggaccaattcgaagatgacgctgatggatttatttccccaatggatgataaaataccatcaaaatgcagccaggacacagggctttcaaatctccatgctgcctcaatacctgaactcctggaacacctccaggaaatgagagaagaaaagaaaaggattcgaaagaaacttcgggattttgaagacaactttttcagacagaatggaagaaatgtccagaaggaagaccgcactcctatggctgaagaatacagtgaatataagcacataaaggcgaaactgaggctcctggaggtgctcatcagcaagagagacactgattccaagtccatgtgaggggcatggccaagcacagggggctggcagctgcggtgagagtttactgtccccagagaaagtgcagctctggaaggcagccttggggctggccctgcaaagcatgcagcccttctgcctctagaccatttggcatcggctcctgtttccattgcctgccttagaaactggctggaagaagacaatgtgacctgacttaggcattttgtaattggaaagtcaagactgcagtatgtgcacatgcgcacgcgcatgcacgcacacacacacacagtagtggagctttcctaacactagcagagattaatcactacattagacaacactcatctacagagaatatacactgttcttccctggataactgagaaacaagagaccattctctgtctaactgtgataaaaacaagctcaggactttattctatagagcaaacttgctgtggagggccatgctctccttggacccagttaactgcaaacgtgcattggagccctatttgctgccgctgccattctagtgacctttccacagagctgcgccttcctcacgtgtgtgaaaggttttccccttcagccctcaggtagatggaagctgcatctgcccacgatggcagtgcagtcatcatcttcaggatgtttcttcaggacttcctcagctgacaaggaattttggtccctgcctaggaccgggtcatctgcagaggacagagagatggtaagcagctgtatgaatgctgattttaaaaccaggtcatgggagaagagcctggagattctttcctgaacactgactgcacttaccagtctgattttatcgtcaaacaccaagccaggctagcatgctcatggcaatctgtttggggctgttttgttgtggcactagccaaacataaaggggcttaagtcagcctgcatacagaggatcggggagagaaggggcctgtgttctcagcctcctgagtacttaccagagtttaatttttttaaaaaaaatctgcactaaaatccccaaactgacaggtaaatgtagccctcagagctcagcccaaggcagaatctaaatcacactattttcgagatcatgtataaaaagaaaaaaaagaagtcatgctgtgtggccaattataatttttttcaaagactttgtcacaaaactgtctatattagacattttggagggaccaggaaatgtaagacaccaaatcctccatctcttcagtgtgcctgatgtcacctcatgatttgctgttacttttttaactcctgcgccaaggacagtgggttctgtgtccacctttgtgctttgcgaggccgagcccaggcatctgctcgcctgccacggctgaccagagaaggtgcttcaggagctctgccttagacgacgtgttacagtatgaacacacagcagaggcaccctcgtatgttttgaaagttgccttctgaaagggcacagttttaaggaaaagaaaaagaatgtaaaactatactgacccgttttcagttttaaagggtcgtgagaaactggctggtccaatgggatttacagcaacattttccattgctgaagtgaggtagcagctctcttctgtcagctgaatgttaaggatggggaaaaagaatgcctttaagtttgctcttaatcgtatggaagcttgagctatgtgttggaagtgccctggttttaatccatacacaaagacggtacataatcctacaggtttaaatgtacataaaaatatagtttggaattctttgctctactgtttacattgcagattgctataatttcaaggagtgagattataaataaaatgatgcactttaggatgtttcctatttttgaaatctgaacatgaatcattcacatgaccaaaaattgtgtttttttaaaaatacatgtctagtctgtcctttaatagctctcttaaataagctatgatattaatcagatcattaccagttagcttttaaagcacatttgtttaagactatgtttttggaaaaatacgctacagaatttttttttaagctacaaataaatgagatgctactaattgttttggaatctgttgtttctgccaaaggtaaattaactaaagatttattcaggaatccccatttgaatttgtatgattcaataaaagaaaacaccaagtaagttatataaaataaattgtgtatgagatgttgtgttttcctttgtaatttccactaactaactaactaacttcttatattcttcatggaatggagcccagatgaaatgagaggaagcccttttcacactagatcttatttgaagaaatgtttgttagtcagtcagtcagtggtttctggctctgccgagggagatgtgttccccagcaaccatttctgcagcccagaatctcaaggcactagaggcggtgtcttaattaattggcttcacaaagacaaaatgctctggactgggatttttcctttgctgtgttgggaatatgtgtttattaattagcacatgccaacaaaataaatgtcaagagttatttcataagtgtaagtaaacttaagaattaaagagtgcagacttataattttcaaaatactttta

SEQ ID NO: 283395 - DNA, 4829 bp, Homo sapiens
aaatgtagagaagcagccgataaaatagcattgcctgaagaagtttggaggctgagagcagcagtagactggccaactgcagagcaagttgtttctccagccgtgcggtgcagcctcatgcccccaacccagcttagccactgtaagaagacgttcactgtacagacgaccaaacttgccgtggaagagacagttgtgagattcccttgcaaatttacatacgagaatggcttgtgaaatcatgcctctgcaaagttcacaggaagatgaaagacctctgtcacctttctatttgagtgctcatgtaccccaagtcagcaatgtgtctgcaaccggagaactcttagaaagaaccatccgatcagctgtagaacaacatctttttgatgttaataactctggaggtcaaagttcagaggactcagaatctggaacactatcagcatcttctgccacatctgccagacagcgccgccgccagtccaaggagcaggatgaagttcgacatgggagagacaagggacttatcaacaaagaaaatactccttctgggttcaaccaccttgatgattgtattttgaatactcaggaagtcgaaaaggtacacaaaaatacttttggttgtgctggagaaaggagcaagcctaaacgtcagaaatccagtactaaactttctgagcttcatgacaatcaggacggtcttgtgaatatggaaagtctcaattccacacgatctcatgagagaactggacctgatgattttgaatggatgtctgatgaaaggaaaggaaatgaaaaagatggtggacacactcagcattttgagagccccacaatgaagatccaggagcatcccagcctatctgacaccaaacagcagagaaatcaagatgccggtgaccaggaggagagctttgtctccgaagtgccccagtcggacctgactgcattgtgtgatgaaaagaactgggaagagcctatccctgctttctcctcctggcagcgggagaacagtgactctgatgaagcccacctctcgccgcaggctgggcgcctgatccgtcagctgctggacgaagacagcgaccccatgctctctcctcggttctacgcttatgggcagagcaggcaatacctggatgacacagaagtgcctccttccccaccaaactcccattctttcatgaggcggcgaagctcctctctggggtcctatgatgatgagcaagaggacctgacacctgcccagctcacacgaaggattcagagccttaaaaagaagatccggaagtttgaagatagattcgaagaagagaagaagtacagaccttcccacagtgacaaagcagccaatccggaggttctgaaatggacaaatgaccttgccaaattccggagacaacttaaagaatcaaaactaaagatatctgaagaggacctaactcccaggatgcggcagcgaagcaacacactccccaagagttttggttcccaacttgagaaagaagatgagaagaagcaagagctggtggataaagcaataaagcccagtgttgaagccacattggaatctattcagaggaagctccaggagaagcgagcggaaagcagccgccctgaggacattaaggatatgaccaaagaccagattgctaatgagaaagtggctctgcagaaagctctgttatattatgaaagcattcatggacggccggtaacaaagaacgaacggcaggtgatgaagccactatacgacaggtaccggctggtcaaacagatcctctcccgagctaacaccatacccatcattgaagaagaggaggggtcagaagacgatagcaatgtgaagccagacttcatggtcactctgaaaaccgatttcagtgcacgatgctttctggaccaattcgaagatgacgctgatggatttatttccccaatggatgataaaataccatcaaaatgcagccaggacacagggctttcaaatctccatgctgcctcaatacctgaactcctggaacacctccaggaaatgagagaagaaaagaaaaggattcgaaagaaacttcgggattttgaagacaactttttcagacagaatggaagaaatgtccagaaggaagaccgcactcctatggctgaagaatacagtgaatataagcacataaaggcgaaactgaggctcctggaggtgctcatcagcaagagagacactgattccaagtccatgtgaggggcatggccaagcacagggggctggcagctgcggtgagagtttactgtccccagagaaagtgcagctctggaaggcagccttggggctggccctgcaaagcatgcagcccttctgcctctagaccatttggcatcggctcctgtttccattgcctgccttagaaactggctggaagaagacaatgtgacctgacttaggcattttgtaattggaaagtcaagactgcagtatgtgcacatgcgcacgcgcatgcacgcacacacacacacagtagtggagctttcctaacactagcagagattaatcactacattagacaacactcatctacagagaatatacactgttcttccctggataactgagaaacaagagaccattctctgtctaactgtgataaaaacaagctcaggactttattctatagagcaaacttgctgtggagggccatgctctccttggacccagttaactgcaaacgtgcattggagccctatttgctgccgctgccattctagtgacctttccacagagctgcgccttcctcacgtgtgtgaaaggttttccccttcagccctcaggtagatggaagctgcatctgcccacgatggcagtgcagtcatcatcttcaggatgtttcttcaggacttcctcagctgacaaggaattttggtccctgcctaggaccgggtcatctgcagaggacagagagatggtaagcagctgtatgaatgctgattttaaaaccaggtcatgggagaagagcctggagattctttcctgaacactgactgcacttaccagtctgattttatcgtcaaacaccaagccaggctagcatgctcatggcaatctgtttggggctgttttgttgtggcactagccaaacataaaggggcttaagtcagcctgcatacagaggatcggggagagaaggggcctgtgttctcagcctcctgagtacttaccagagtttaatttttttaaaaaaaatctgcactaaaatccccaaactgacaggtaaatgtagccctcagagctcagcccaaggcagaatctaaatcacactattttcgagatcatgtataaaaagaaaaaaaagaagtcatgctgtgtggccaattataatttttttcaaagactttgtcacaaaactgtctatattagacattttggagggaccaggaaatgtaagacaccaaatcctccatctcttcagtgtgcctgatgtcacctcatgatttgctgttacttttttaactcctgcgccaaggacagtgggttctgtgtccacctttgtgctttgcgaggccgagcccaggcatctgctcgcctgccacggctgaccagagaaggtgcttcaggagctctgccttagacgacgtgttacagtatgaacacacagcagaggcaccctcgtatgttttgaaagttgccttctgaaagggcacagttttaaggaaaagaaaaagaatgtaaaactatactgacccgttttcagttttaaagggtcgtgagaaactggctggtccaatgggatttacagcaacattttccattgctgaagtgaggtagcagctctcttctgtcagctgaatgttaaggatggggaaaaagaatgcctttaagtttgctcttaatcgtatggaagcttgagctatgtgttggaagtgccctggttttaatccatacacaaagacggtacataatcctacaggtttaaatgtacataaaaatatagtttggaattctttgctctactgtttacattgcagattgctataatttcaaggagtgagattataaataaaatgatgcactttaggatgtttcctatttttgaaatctgaacatgaatcattcacatgaccaaaaattgtgtttttttaaaaatacatgtctagtctgtcctttaatagctctcttaaataagctatgatattaatcagatcattaccagttagcttttaaagcacatttgtttaagactatgtttttggaaaaatacgctacagaatttttttttaagctacaaataaatgagatgctactaattgttttggaatctgttgtttctgccaaaggtaaattaactaaagatttattcaggaatccccatttgaatttgtatgattcaataaaagaaaacaccaagtaagttatataaaataaattgtgtatgagatgttgtgttttcctttgtaatttccactaactaactaactaacttcttatattcttcatggaatggagcccagatgaaatgagaggaagcccttttcacactagatcttatttgaagaaatgtttgttagtcagtcagtcagtggtttctggctctgccgagggagatgtgttccccagcaaccatttctgcagcccagaatctcaaggcactagaggcggtgtcttaattaattggcttcacaaagacaaaatgctctggactgggatttttcctttgctgtgttgggaatatgtgtttattaattagcacatgccaacaaaataaatgtcaagagttatttcataagtgtaagtaaacttaagaattaaagagtgcagacttataattttcaaaatactttta

SEQ ID NO: 283396 - DNA, 3452 bp, Homo sapiens
taaagccatctgagatacccaagtagtagaatcctttcaagcactggttactggtgatgaattttgttttgtactgtcacagagctggaaatttttggatccttttagttcatctgatttaggttataaattatgatggttgttccttcttacccccaacctgacaactattaacatgatgtacactcattttaaaatagttttgcagtctgttttctctattgagtggctacattgtgttattaaatgtgtatatttatatcgaatacagatgttcaataatatatctgtaatgtacatatgtgttgctaaatgtagatacagaagaaactatatggagtctgataattaaatgattattaaatgatacttgtaatgaaagtctgccccaaaaagtgaccagatttttattggggttgctgtgtatctccaggaagaagaggaggggtcagaagacgatagcaatgtgaagccagacttcatggtcactctgaaaaccgatttcagtgcacgatgctttctggaccaattcgaagatgacgctgatggatttatttccccaatggatgataaaataccatcaaaatgcagccaggacacagggctttcaaatctccatgctgcctcaatacctgaactcctggaacacctccaggaaatgagagaagaaaagaaaaggattcgaaagaaacttcgggattttgaagacaactttttcagacagaatggaagaaatgtccagaaggaagaccgcactcctatggctgaagaatacagtgaatataagcacataaaggcgaaactgaggctcctggaggtgctcatcagcaagagagacactgattccaagtccatgtgaggggcatggccaagcacagggggctggcagctgcggtgagagtttactgtccccagagaaagtgcagctctggaaggcagccttggggctggccctgcaaagcatgcagcccttctgcctctagaccatttggcatcggctcctgtttccattgcctgccttagaaactggctggaagaagacaatgtgacctgacttaggcattttgtaattggaaagtcaagactgcagtatgtgcacatgcgcacgcgcatgcacgcacacacacacacagtagtggagctttcctaacactagcagagattaatcactacattagacaacactcatctacagagaatatacactgttcttccctggataactgagaaacaagagaccattctctgtctaactgtgataaaaacaagctcaggactttattctatagagcaaacttgctgtggagggccatgctctccttggacccagttaactgcaaacgtgcattggagccctatttgctgccgctgccattctagtgacctttccacagagctgcgccttcctcacgtgtgtgaaaggttttccccttcagccctcaggtagatggaagctgcatctgcccacgatggcagtgcagtcatcatcttcaggatgtttcttcaggacttcctcagctgacaaggaattttggtccctgcctaggaccgggtcatctgcagaggacagagagatggtaagcagctgtatgaatgctgattttaaaaccaggtcatgggagaagagcctggagattctttcctgaacactgactgcacttaccagtctgattttatcgtcaaacaccaagccaggctagcatgctcatggcaatctgtttggggctgttttgttgtggcactagccaaacataaaggggcttaagtcagcctgcatacagaggatcggggagagaaggggcctgtgttctcagcctcctgagtacttaccagagtttaatttttttaaaaaaaatctgcactaaaatccccaaactgacaggtaaatgtagccctcagagctcagcccaaggcagaatctaaatcacactattttcgagatcatgtataaaaagaaaaaaaagaagtcatgctgtgtggccaattataatttttttcaaagactttgtcacaaaactgtctatattagacattttggagggaccaggaaatgtaagacaccaaatcctccatctcttcagtgtgcctgatgtcacctcatgatttgctgttacttttttaactcctgcgccaaggacagtgggttctgtgtccacctttgtgctttgcgaggccgagcccaggcatctgctcgcctgccacggctgaccagagaaggtgcttcaggagctctgccttagacgacgtgttacagtatgaacacacagcagaggcaccctcgtatgttttgaaagttgccttctgaaagggcacagttttaaggaaaagaaaaagaatgtaaaactatactgacccgttttcagttttaaagggtcgtgagaaactggctggtccaatgggatttacagcaacattttccattgctgaagtgaggtagcagctctcttctgtcagctgaatgttaaggatggggaaaaagaatgcctttaagtttgctcttaatcgtatggaagcttgagctatgtgttggaagtgccctggttttaatccatacacaaagacggtacataatcctacaggtttaaatgtacataaaaatatagtttggaattctttgctctactgtttacattgcagattgctataatttcaaggagtgagattataaataaaatgatgcactttaggatgtttcctatttttgaaatctgaacatgaatcattcacatgaccaaaaattgtgtttttttaaaaatacatgtctagtctgtcctttaatagctctcttaaataagctatgatattaatcagatcattaccagttagcttttaaagcacatttgtttaagactatgtttttggaaaaatacgctacagaatttttttttaagctacaaataaatgagatgctactaattgttttggaatctgttgtttctgccaaaggtaaattaactaaagatttattcaggaatccccatttgaatttgtatgattcaataaaagaaaacaccaagtaagttatataaaataaattgtgtatgagatgttgtgttttcctttgtaatttccactaactaactaactaacttcttatattcttcatggaatggagcccagatgaaatgagaggaagcccttttcacactagatcttatttgaagaaatgtttgttagtcagtcagtcagtggtttctggctctgccgagggagatgtgttccccagcaaccatttctgcagcccagaatctcaaggcactagaggcggtgtcttaattaattggcttcacaaagacaaaatgctctggactgggatttttcctttgctgtgttgggaatatgtgtttattaattagcacatgccaacaaaataaatgtcaagagttatttcataagtgtaagtaaacttaagaattaaagagtgcagacttataattttcaaaatactttta

SEQ ID NO: 283397 - DNA, 4377 bp, Homo sapiens
aaatgtagagaagcagccgataaaatagcattgcctgaagaagtttggaggctgagagcagcagtagactggccaactgcagagcaagttgtttctccagccgtgcggtgcagcctcatgcccccaacccagcttagccactgtaagaagacgttcactgtacagacgaccaaacttgccgtggaagagacagttgtgagattcccttgcaaatttacatacgagaatggcttgtgaaatcatgcctctgcaaagttcacaggaagatgaaagacctctgtcacctttctatttgagtgctcatgtaccccaagtcagcaatgtgtctgcaaccggagaactcttagaaagaaccatccgatcagctgtagaacaacatctttttgatgttaataactctggaggtcaaagttcagaggactcagaatctggaacactatcagcatcttctgccacatctgccagacagcgccgccgccagtccaaggagcaggatgaagttcgacatgggagagacaagggacttatcaacaaagaaaatactccttctgggttcaaccaccttgatgattgtattttgaatactcaggaagtcgaaaaggtacacaaaaatacttttggttgtgctggagaaaggagcaagcctaaacgtcagaaatccagtactaaactttctgagcttcatgacaatcaggacggtcttgtgaatatggaaagtctcaattccacacgatctcatgagagaactggacctgatgattttgaatggatgtctgatgaaaggaaaggaaatgaaaaagatggtggacacactcagcattttgagagccccacaatgaagatccaggagcatcccagcctatctgacaccaaacagcagagaaatcaagatgccggtgaccaggaggagagctttgtctccgaagtgccccagtcggacctgactgcattgtgtgatgaaaagaactgggaagagcctatccctgctttctcctcctggcagcgggagaacagtgactctgatgaagcccacctctcgccgcaggctgggcgcctgatccgtcagctgctggacgaagacagcgaccccatgctctctcctcggttctacgcttatgggcagagcaggcaatacctggatgacacagaagtgcctccttccccaccaaactcccattctttcatgaggcggcgaagctcctctctggggtcctatgatgatgagcaagaggacctgacacctgcccagctcacacgaaggattcagagccttaaaaagaagatccggaagtttgaagatagattcgaagaagagaagaagtacagaccttcccacagtgacaaagcagccaatccggaggttctgaaatggacaaatgaccttgccaaattccggagacaacttaaagaatcaaaactaaagatatctgaagaggacctaactcccaggatgcggcagcgaagcaacacactccccaagagttttggttcccaacttgagaaagaagatgagaagaagcaagagctggtggataaagcaataaagcccagtgttgaagccacattggaatctattcagaggaagctccaggagaagcgagcggaaagcagccgccctgaggacattaaggatatgaccaaagaccagattgctaatgagaaagtggctctgcagaaagctctgttatattatgaaagcattcatggacggccggtaacaaagaacgaacggcaggtgatgaagccactatacgacaggtaccggctggtcaaacagatcctctcccgagctaacaccatacccatcattggttccccctccagcaagcggagaagccctttgctgcagccaattatcgagggcgaaactgcttccttcttcaaggagataaaggaagaagaggaggggtcagaagacgatagcaatgtgaagccagacttcatggtcactctgaaaaccgatttcagtgcacgatgctttctggaccaattcgaagatgacgctgatggatttatttccccaatggatgataaaataccatcaaaatgcagccaggacacagggctttcaaatctccatgctgcctcaatacctgaactcctggaacacctccaggaaatgagagaagaaaagaaaaggattcgaaagaaacttcgggattttgaagacaactttttcagacagaatggaagaaatgtccagaaggaagaccgcactcctatggctgaagaatacagtgaatataagcacataaaggcgaaactgaggctcctggaggtgctcatcagcaagagagacactgattccaagtccatgtgaggggcatggccaagcacagggggctggcagctgcggtgagagtttactgtccccagagaaagtgcagctctggaaggcagccttggggctggccctgcaaagcatgcagcccttctgcctctagaccatttggcatcggctcctgtttccattgcctgccttagaaactggctggaagaagacaatgtgacctgacttaggcattttgtaattggaaagtcaagactgcagtatgtgcacatgcgcacgcgcatgcacgcacacacacacacagtagtggagctttcctaacactagcagagattaatcactacattagacaacactcatctacagagaatatacactgttcttccctggataactgagaaacaagagaccattctctgtctaactgtgataaaaacaagctcaggactttattctatagagcaaacttgctgtggagggccatgctctccttggacccagttaactgcaaacgtgcattggagccctatttgctgccgctgccattctagtgacctttccacagagctgcgccttcctcacgtgtgtgaaaggttttccccttcagccctcaggtagatggaagctgcatctgcccacgatggcagtgcagtcatcatcttcaggatgtttcttcaggacttcctcagctgacaaggaattttggtccctgcctaggaccgggtcatctgcagaggacagagagatggtaagcagctgtatgaatgctgattttaaaaccaggtcatgggagaagagcctggagattctttcctgaacactgactgcacttaccagtctgattttatcgtcaaacaccaagccaggctagcatgctcatggcaatctgtttggggctgttttgttgtggcactagccaaacataaaggggcttaagtcagcctgcatacagaggatcggggagagaaggggcctgtgttctcagcctcctgagtacttaccagagtttaatttttttaaaaaaaatctgcactaaaatccccaaactgacaggtaaatgtagccctcagagctcagcccaaggcagaatctaaatcacactattttcgagatcatgtataaaaagaaaaaaaagaagtcatgctgtgtggccaattataatttttttcaaagactttgtcacaaaactgtctatattagacattttggagggaccaggaaatgtaagacaccaaatcctccatctcttcagtgtgcctgatgtcacctcatgatttgctgttacttttttaactcctgcgccaaggacagtgggttctgtgtccacctttgtgctttgcgaggccgagcccaggcatctgctcgcctgccacggctgaccagagaaggtgcttcaggagctctgccttagacgacgtgttacagtatgaacacacagcagaggcaccctcgtatgttttgaaagttgccttctgaaagggcacagttttaaggaaaagaaaaagaatgtaaaactatactgacccgttttcagttttaaagggtcgtgagaaactggctggtccaatgggatttacagcaacattttccattgctgaagtgaggtagcagctctcttctgtcagctgaatgttaaggatggggaaaaagaatgcctttaagtttgctcttaatcgtatggaagcttgagctatgtgttggaagtgccctggttttaatccatacacaaagacggtacataatcctacaggtttaaatgtacataaaaatatagtttggaattctttgctctactgtttacattgcagattgctataatttcaaggagtgagattataaataaaatgatgcactttaggatgtttcctatttttgaaatctgaacatgaatcattcacatgaccaaaaattgtgtttttttaaaaatacatgtctagtctgtcctttaatagctctcttaaataagctatgatattaatcagatcattaccagttagcttttaaagcacatttgtttaagactatgtttttggaaaaatacgctacagaatttttttttaagctacaaataaatgagatgctactaa

SEQ ID NO: 283398 - DNA, 4859 bp, Homo sapiens
aaatgtagagaagcagccgataaaatagcattgcctgaagaagtttggaggctgagagcagcagtagactggccaactgcagagcaagttgtttctccagccgtgcggtgcagcctcatgcccccaacccagcttagccactgtaagaagacgttcactgtacagacgaccaaacttgccgtggaagagacagttgtgagattcccttgcaaatttacatacgagaatggcttgtgaaatcatgcctctgcaaagttcacaggaagatgaaagacctctgtcacctttctatttgagtgctcatgtaccccaagtcagcaatgtgtctgcaaccggagaactcttagaaagaaccatccgatcagctgtagaacaacatctttttgatgttaataactctggaggtcaaagttcagaggactcagaatctggaacactatcagcatcttctgccacatctgccagacagcgccgccgccagtccaaggagcaggatgaagttcgacatgggagagacaagggacttatcaacaaagaaaatactccttctgggttcaaccaccttgatgattgtattttgaatactcaggaagtcgaaaaggtacacaaaaatacttttggttgtgctggagaaaggagcaagcctaaacgtcagaaatccagtactaaactttctgagcttcatgacaatcaggacggtcttgtgaatatggaaagtctcaattccacacgatctcatgagagaactggacctgatgattttgaatggatgtctgatgaaaggaaaggaaatgaaaaagatggtggacacactcagcattttgagagccccacaatgaagatccaggagcatcccagcctatctgacaccaaacagcagagaaatcaagatgccggtgaccaggaggagagctttgtctccgaagtgccccagtcggacctgactgcattgtgtgatgaaaagaactgggaagagcctatccctgctttctcctcctggcagcgggagaacagtgactctgatgaagcccacctctcgccgcaggctgggcgcctgatccgtcagctgctggacgaagacagcgaccccatgctctctcctcggttctacgcttatgggcagagcaggcaatacctggatgacacagaagtgcctccttccccaccaaactcccattctttcatgaggcggcgaagctcctctctggggtcctatgatgatgagcaagaggacctgacacctgcccagctcacacgaaggattcagagccttaaaaagaagatccggaagtttgaagatagattcgaagaagagaagaagtacagaccttcccacagtgacaaagcagccaatccggaggttctgaaatggacaaatgaccttgccaaattccggagacaacttaaagaatcaaaactaaagatatctgaagaggacctaactcccaggatgcggcagcgaagcaacacactccccaagagttttggttcccaacttgagaaagaagatgagaagaagcaagagctggtggataaagcaataaagcccagtgttgaagccacattggaatctattcagaggaagctccaggagaagcgagcggaaagcagccgccctgaggacattaaggatatgaccaaagaccagattgctaatgagaaagtggctctgcagaaagctctgttatattatgaaagcattcatggacggccggtaacaaagaacgaacggcaggtgatgaagccactatacgacaggtaccggctggtcaaacagatcctctcccgagctaacaccatacccatcattggttccccctccagcaagcggagaagccctttgctgcagccaattatcgagggcgaaactgcttccttcttcaaggagataaaggaagaagaggaggggtcagaagacgatagcaatgtgaagccagacttcatggtcactctgaaaaccgatttcagtgcacgatgctttctggaccaattcgaagatgacgctgatggatttatttccccaatggatgataaaataccatcaaaatgcagccaggacacagggctttcaaatctccatgctgcctcaatacctgaactcctggaacacctccaggaaatgagagaagaaaagaaaaggattcgaaagaaacttcgggattttgaagacaactttttcagacagaatggaagaaatgtccagaaggaagaccgcactcctatggctgaagaatacagtgaatataagcacataaaggcgaaactgaggctcctggaggtgctcatcagcaagagagacactgattccaagtccatgtgaggggcatggccaagcacagggggctggcagctgcggtgagagtttactgtccccagagaaagtgcagctctggaaggcagccttggggctggccctgcaaagcatgcagcccttctgcctctagaccatttggcatcggctcctgtttccattgcctgccttagaaactggctggaagaagacaatgtgacctgacttaggcattttgtaattggaaagtcaagactgcagtatgtgcacatgcgcacgcgcatgcacgcacacacacacacagtagtggagctttcctaacactagcagagattaatcactacattagacaacactcatctacagagaatatacactgttcttccctggataactgagaaacaagagaccattctctgtctaactgtgataaaaacaagctcaggactttattctatagagcaaacttgctgtggagggccatgctctccttggacccagttaactgcaaacgtgcattggagccctatttgctgccgctgccattctagtgacctttccacagagctgcgccttcctcacgtgtgtgaaaggttttccccttcagccctcaggtagatggaagctgcatctgcccacgatggcagtgcagtcatcatcttcaggatgtttcttcaggacttcctcagctgacaaggaattttggtccctgcctaggaccgggtcatctgcagaggacagagagatggtaagcagctgtatgaatgctgattttattaccagtctgattttatcgtcaaacaccaagccaggctagcatgctcatggcaatctgtttggggctgttttgttgtggcactagccaaacataaaggggcttaagtcagcctgcatacagaggatcggggagagaaggggcctgtgttctcagcctcctgagtacttaccagagtttaatttttttaaaaaaaatctgcactaaaatccccaaactgacaggtaaatgtagccctcagagctcagcccaaggcagaatctaaatcacactattttcgagatcatgtataaaaagaaaaaaaagaagtcatgctgtgtggccaattataatttttttcaaagactttgtcacaaaactgtctatattagacattttggagggaccaggaaatgtaagacaccaaatcctccatctcttcagtgtgcctgatgtcacctcatgatttgctgttacttttttaactcctgcgccaaggacagtgggttctgtgtccacctttgtgctttgcgaggccgagcccaggcatctgctcgcctgccacggctgaccagagaaggtgcttcaggagctctgccttagacgacgtgttacagtatgaacacacagcagaggcaccctcgtatgttttgaaagttgccttctgaaagggcacagttttaaggaaaagaaaaagaatgtaaaactatactgacccgttttcagttttaaagggtcgtgagaaactggctggtccaatgggatttacagcaacattttccattgctgaagtgaggtagcagctctcttctgtcagctgaatgttaaggatggggaaaaagaatgcctttaagtttgctcttaatcgtatggaagcttgagctatgtgttggaagtgccctggttttaatccatacacaaagacggtacataatcctacaggtttaaatgtacataaaaatatagtttggaattctttgctctactgtttacattgcagattgctataatttcaaggagtgagattataaataaaatgatgcactttaggatgtttcctatttttgaaatctgaacatgaatcattcacatgaccaaaaattgtgtttttttaaaaatacatgtctagtctgtcctttaatagctctcttaaataagctatgatattaatcagatcattaccagttagcttttaaagcacatttgtttaagactatgtttttggaaaaatacgctacagaatttttttttaagctacaaataaatgagatgctactaattgttttggaatctgttgtttctgccaaaggtaaattaactaaagatttattcaggaatccccatttgaatttgtatgattcaataaaagaaaacaccaagtaagttatataaaataaattgtgtatgagatgttgtgttttcctttgtaatttccactaactaactaactaacttcttatattcttcatggaatggagcccagatgaaatgagaggaagcccttttcacactagatcttatttgaagaaatgtttgttagtcagtcagtcagtggtttctggctctgccgagggagatgtgttccccagcaaccatttctgcagcccagaatctcaaggcactagaggcggtgtcttaattaattggcttcacaaagacaaaatgctctggactgggatttttcctttgctgtgttgggaatatgtgtttattaattagcacatgccaacaaaataaatgtcaagagttatttcataagtgtaagtaaacttaagaattaaagagtgcagacttataattttcaaaatactttta

SEQ ID NO: 283399 - DNA, 3157 bp, Homo sapiens
aaatgtagagaagcagccgataaaatagcattgcctgaagaagtttggaggctgagagcagcagtagactggccaactgcagagcaagttgtttctccagccgtgcggtgcagcctcatgcccccaacccagcttagccactgtaagaagacgttcactgtacagacgaccaaacttgccgtggaagagacagttgtgagattcccttgcaaatttacatacgagaatggcttgtgaaatcatgcctctgcaaagttcacaggaagatgaaagacctctgtcacctttctatttgagtgctcatgtaccccaagtcagcaatgtgtctgcaaccggagaactcttagaaagaaccatccgatcagctgtagaacaacatctttttgatgttaataactctggaggtcaaagttcagaggactcagaatctggaacactatcagcatcttctgccacatctgccagacagcgccgccgccagtccaaggagcaggatgaagttcgacatgggagagacaagggacttatcaacaaagaaaatactccttctgggttcaaccaccttgatgattgtattttgaatactcaggaagtcgaaaaggtacacaaaaatacttttggttgtgctggagaaaggagcaagcctaaacgtcagaaatccagtactaaactttctgagcttcatgacaatcaggacggtcttgtgaatatggaaagtctcaattccacacgatctcatgagagaactggacctgatgattttgaatggatgtctgatgaaaggaaaggaaatgaaaaagatggtggacacactcagcattttgagagccccacaatgaagatccaggagcatcccagcctatctgacaccaaacagcagagaaatcaagatgccggtgaccaggaggagagctttgtctccgaagtgccccagtcggacctgactgcattgtgtgatgaaaagaactgggaagagcctatccctgctttctcctcctggcagcgggagaacagtgactctgatgaagcccacctctcgccgcaggctgggcgcctgatccgtcagctgctggacgaagacagcgaccccatgctctctcctcggttctacgcttatgggcagagcaggcaatacctggatgacacagaagtgcctccttccccaccaaactcccattctttcatgaggcggcgaagctcctctctggggtcctatgatgatgagcaagaggacctgacacctgcccagctcacacgaaggattcagagccttaaaaagaagatccggaagtttgaagatagattcgaagaagagaagaagtacagaccttcccacagtgacaaagcagccaatccggaggttctgaaatggacaaatgaccttgccaaattccggagacaacttaaagaatcaaaactaaagatatctgaagaggacctaactcccaggatgcggcagcgaagcaacacactccccaagagttttggttcccaacttgagaaagaagatgagaagaagcaagagctggtggataaagcaataaagcccagtgttgaagccacattggaatctattcagaggaagctccaggagaagcgagcggaaagcagccgccctgaggacattaaggatatgaccaaagaccagattgctaatgagaaagtggctctgcagaaagctctgttatattatgaaagcattcatggacggccggtaacaaagaacgaacggcaggtgatgaagccactatacgacaggtaccggctggtcaaacagatcctctcccgagctaacaccatacccatcattggttccccctccagcaagcggagaagccctttgctgcagccaattatcgagggcgaaactgcttccttcttcaaggagataaaggaagaagaggaggggtcagaagacgatagcaatgtgaagccagacttcatggtcactctgaaaaccgatttcagtgcacgatgctttctggaccaattcgaagatgacgctgatggatttatttccccaatggatgataaaataccatcaaaatgcagccaggacacagggctttcaaatctccatgctgcctcaatacctgaactcctggaacacctccaggaaatgagagaagaaaagaaaaggattcgaaagaaacttcgggattttgaagacaactttttcagacagaatggaagaaatgtccagaaggaagaccgcactcctatggctgaagaatacagtgaatataagcacataaaggcgaaactgaggctcctggaggtgctcatcagcaagagagacactgattccaagtccatgtgaggggcatggccaagcacagggggctggcagctgcggtgagagtttactgtccccagagaaagtgcagctctggaaggcagccttggggctggccctgcaaagcatgcagcccttctgcctctagaccatttggcatcggctcctgtttccattgcctgccttagaaactggctggaagaagacaatgtgacctgacttaggcattttgtaattggaaagtcaagactgcagtatgtgcacatgcgcacgcgcatgcacgcacacacacacacagtagtggagctttcctaacactagcagagattaatcactacattagacaacactcatctacagagaatatacactgttcttccctggataactgagaaacaagagaccattctctgtctaactgtgataaaaacaagctcaggactttattctatagagcaaacttgctgtggagggccatgctctccttggacccagttaactgcaaacgtgcattggagccctatttgctgccgctgccattctagtgacctttccacagagctgcgccttcctcacgtgtgtgaaaggttttccccttcagccctcaggtagatggaagctgcatctgcccacgatggcagtgcagtcatcatcttcaggatgtttcttcaggacttcctcagctgacaaggaattttggtccctgcctaggaccgggtcatccgttttcagttttaaagggtcgtgagaaactggctggtccaatgggatttacagcaacattttccattgctgaagtgaggtagcagctctcttctgtcagctgaatgggaaattcagaatgggagaccccacacaggg

SEQ ID NO: 283400 - DNA, 2193 bp, Homo sapiens
aaatgtagagaagcagccgataaaatagcattgcctgaagaagtttggaggctgagagcagcagtagactggccaactgcagagcaagttgtttctccagccgtgcggtgcagcctcatgcccccaacccagcttagccactgtaagaagacgttcactgtacagacgaccaaacttgccgtggaagagacagttgtgagattcccttgcaaatttacatacgagaatggcttgtgaaatcatgcctctgcaaagttcacaggaagatgaaagacctctgtcacctttctatttgagtgctcatgtaccccaagtcagcaatgtgtctgcaaccggagaactcttagaaagaaccatccgatcagctgtagaacaacatctttttgatgttaataactctggaggtcaaagttcagaggactcagaatctggaacactatcagcatcttctgccacatctgccagacagcgccgccgccagtccaaggagcaggatgaagttcgacatgggagagacaagggacttatcaacaaagaaaatactccttctgggttcaaccaccttgatgattgtattttgaatactcaggaagtcgaaaaggtacacaaaaatacttttggttgtgctggagaaaggagcaagcctaaacgtcagaaatccagtactaaactttctgagcttcatgacaatcaggacggtcttgtgaatatggaaagtctcaattccacacgatctcatgagagaactggacctgatgattttgaatggatgtctgatgaaaggaaaggaaatgaaaaagatggtggacacactcagcattttgagagccccacaatgaagatccaggagcatcccagcctatctgacaccaaacagcagagaaatcaagatgccggtgaccaggaggagagctttgtctccgaagtgccccagtcggacctgactgcattgtgtgatgaaaagaactgggaagagcctatccctgctttctcctcctggcagcgggagaacagtgactctgatgaagcccacctctcgccgcaggctgggcgcctgatccgtcagctgctggacgaagacagcgaccccatgctctctcctcggttctacgcttatgggcagagcaggcaatacctggatgacacagaagtgcctccttccccaccaaactcccattctttcatgaggcggcgaagctcctctctggggtcctatgatgatgagcaagaggacctgacacctgcccagctcacacgaaggattcagagccttaaaaagaagatccggaagtttgaagatagattcgaagaagagaagaagtacagaccttcccacagtgacaaagcagccaatccggaggttctgaaatggacaaatgaccttgccaaattccggagacaacttaaagaatcaaaactaaagatatctgaagaggacctaactcccaggatgcggcagcgaagcaacacactccccaagagttttggttcccaacttgagaaagaagatgagaagaagcaagagctggtggataaagcaataaagcccagtgttgaagccacattggaatctattcagaggaagctccaggagaagcgagcggaaagcagccgccctgaggacattaaggatatgaccaaagaccagattgctaatgagaaagtggctctgcagaaagctctgttatattatgaaagcattcatggacggccggtaacaaagaacgaacggcaggtgatgaagccactatacgacaggtaccggctggtcaaacagatcctctcccgagctaacaccatacccatcattggttccccctccagcaagcggagaagccctttgctgcagccaattatcgagggcgaaactgcttccttcttcaaggagataaaggaagaagaggaggggtcagaagacgatagcaatgtgaagccagacttcatggtcactctgaaaaccgatttcagtgcacgatgctttctggaccaattcgaagatgacgctgatggatttatttccccaatggatgataaaataccatcaaaatgcagccaggacacagggctttcaaatctccatgctgcctcaatgtatgtcattttggtggtggtggtgaaatgttttggtaaaaatagctcacttaaatattatcttagcctttgtatctaaataaattagctgataaaatacaa

SEQ ID NO: 283401 - DNA, 1948 bp, Homo sapiens
tctctgacagaaacagagctctacaaactttctggcgacctcccaggaaaacagaaggaagctgtatcctgtacttcccctgggatctaatgaaatatacagcctctgggcttctttcaatttggactttcagatcgctaagccagtgaaaaggggatcctagctgtcacaaacgtcacatggtcagggtcacctgctgctcgggggttctcatgccagttgttgacataataagccccccttacactttaattacaattcacagtgtgcaaactatgcaatctgctttaaggcagactgtcttttaaatcaacactaaaattctactactaatatggcaatgcaatgtagcagaggaagggtgtgtccacatgactaactatatgcagatatctgccgtttgggagacagtgggtagcatttgccaaaatataaaatggtgttgctgaccccaattctgggagatggtacttgaatcttactgtgctctgagacttctttccataggccacaaaaaggtaatgcaatatacttcatgtgtagcattttacatttgtataactactattttttttcacatggctccataactgttctatgtactaatcttgcctatccaacagaaggagtgttgaagaacagtgaatttctacttccctatttcttcccctttaaacctagggcagtgccagtgatgtttaacacatgcttctagagttgtgtcaatgctctatcatttactggatccttgtattttgctaactacagacctgtgtaagctatatttttgcaatcaaaacatgaaaggtcattttaaaacagagcccatttaaaatgatatgacaatgcagggagctgtttaaaaagtgctaacacataattatagtctacagttttctccaaaaacaacagtggaaattagttacaattctattacagacaactgctataaacttaggtgggctaacctctgaatgaactatcccagtactctgggaattgcaatctcattttcagtgccacaaatgacgtaagatggaacacacaaaacaaacccacacaaagtactttatgtttatgaagtcttactcaaacaccttagctgagctaaccagtatgtctcactgtaaaacaccaccaccaccagtaacaacaaaataaataatcaaacaaaatagaagaaatccaaatagaaaaaaaaagttttaaaaataataatgcctatacttgctttaatgaaggatgtacctgaattacaaatgccatcatgacagattaaattagccaataattagtcactgctttattttttttagtgtcaaacaatggtagataccaagacaagtaacaacaaaaggcaaaagagtttattttatttagacgtggtcattctaacataaggagaagatgcattttcctttcaaaaattgaggtctctttgggcaaactttcagtcctttggctattagggtttgtcttcatgaaggcagacataaagcaattctgttctcttccttatttgaacactttcagtcttcacctggctctctgccaccccagctaaaccacttgacctctgattacataacagtccccatctgtgagctcagccatcctcaggagataggaggggccatgagaagctcaagttcaccatgagccacagcagtaagccatgctttagcctctgacctgtgctccaattttggtacaatgatttctgccatgttctccaacaggtaagctctacctcaaggactaacttctgtacctgtatttggtcaagtgccctagctcatctggaactggagatgttgacttgcttttccctacctgcctcccaagaacaaaattctggcacggaaacccaggctagcacgtggagccctatgacccactgacagacttctctgacactaaccttctgcctggattactgtcatctgct

SEQ ID NO: 283402 - DNA, 2025 bp, Homo sapiens
tctctgacagaaacagagctctacaaactttctggcgacctcccaggaaaacagaaggaagctgtatcctgtacttcccctgggatctaatgaaatatacagcctctgggcttctttcaatttggactttcagatcgctaagccagtgaaaaggggatcctagctgtcacaaacgtcacatggtcagggtcacctgctgctcgggggttctcatgccagttgttgacataataagccccccttacactttaattacaattcacagtgtgcaaactatgcaatctgctttaaggcagactgtcttttaaatcaacactaaaattctactactaatatggcaatgcaatgtagcagaggaagggtgtgtccacatgactaactatatgcagatatctgccgtttgggagacagtgggtagcatttgccaaaatataaaatggtgttgctgaccccaattctgggagatggtacttgaatcttactgtgctctgagacttctttccataggccacaaaaaggtaatgcaatatacttcatgtgtagcattttacatttgtataactactattttttttcacatggctccataactgttctatgtactaatcttgcctatccaacagaaggagtgttgaagaacagtgaatttctacttccctatttcttcccctttaaacctagggcagtgccagtgatgtttaacacatgcttctagagttgtgtcaatgctctatcatttactggatccttgtattttgctaactacagacctgtgtaagctatatttttgcaatcaaaacatgaaaggtcattttaaaacagagcccatttaaaatgatatgacaatgcagggagctgtttaaaaagtgctaacacataattatagtctacagttttctccaaaaacaacagtggaaattagttacaattctattacagacaactgctataaacttaggtgggctaacctctgaatgaactatcccagtactctgggaattgcaatctcattttcagtgccacaaatgacgtaagatggaacacacaaaacaaacccacacaaagtactttatgtttatgaagtcttactcaaacaccttagctgagctaaccagtatgtctcactgtaaaacaccaccaccaccagtaacaacaaaataaataatcaaacaaaatagaagaaatccaaatagaaaaaaaaagttttaaaaataataatgcctatacttgctttaatgaaggatgtacctgaattacaaatgccatcatgacagattaaattagccaataattagtcactgctttattttttttagtgtcaaacaatggtagataccaagacaagtaacaacaaaaggcaaaagagtttattttatttagacgtggtcattctaacataaggagaagatgcattttcctttcaaaaattgaggtctctttgggcaaactttcagtcctttggctattagggtttgtcttcatgaaggcagacataaagcaattctgttctcttccttatttgaacactttcagtcttcacctggctctctgccaccccagctaaaccacttgacctctgattacataacagtccccatctgtgagctcagccatcctcaggagataggaggggccatgagaagctcaagttcaccatgagccacagcagtaagccatgctttagcctctgacctgtgctccaattttggtacaatgatttctgccatgttctccaacagggtgaggaaacagacagcactaagagaaaaagctggaactcaaaaccaaattaactccaaacttaagttttcccacttcgacaagaaaaggaactgcatgtgtttttctgcctcttgcagatgtatgtcataaaagttggatgccttcctttcaagacatttgaatggatcaccaaataattacctacttttctctcacaactcagataaataattaaaaggagatatacacagattggttgcatacttaagagtgagaatcaattaaaacaaaattgtatgcatg

SEQ ID NO: 283403 - DNA, 650 bp, Homo sapiens
tagcatcctattaatttaatagctttggttttgaatttacaatgctgataactgcatttattgaacattcactaaatccaagatacaacactaaacagttctcatgtttcacaagttttgttttcattcagtttttacaagaatcctataaatcctcattaatctcattttacagatgagacaaaaagcaagctctgaaagtttcagcaaattgcgcaagctcctgtcacatctagaaggtgggattttacctaggacagagtgactctacatcttcaccacattatattgaaaagggaaaagccagaagcatttggccctatcatttttatctctaaaaaactgctggttcctgctctgaaacagttcctccacgtgaaataaataagcagctaggttttctttttatcagcttcagctcatttggtccaggtgtgagggtattaagggataagtctaaatacaatttttgttttcttcctgaacagaaaatggacaaaaataaagatggggttgttaccatagatgagttcattgaaagctgccaaaaagtaagtaatgaaagtgtaataactatcaattcagctatcataacagctaaactgagtattagcagctagctaccatgaactgggcgaaatatagagatc

SEQ ID NO: 283404 - DNA, 521 bp, Homo sapiens
tgggatagaagtagtttatggtgaagctccaaagtaaatatataacacataaagattacacccttgtttcctgctggcatcttaataaatactgtgaatggaataaagatcatggttggaatcagatagaaagaaaatgtatccaacccatgtttcaacatttagcctgaagcctttcttttccccacagcatgtgatccataaggaaatgaaattttacaatcatggggattgtggaatgacctgacgcaatggtggggtctccaaatgcacgttgaggcagactatccaggaaacaaggttcacagaccaaattaagatactcgtattacacagtttattaaaccaatttaaaacacagcgagaagtaaagaaagggatggagtaagttaaccacgcaggacaggctgcaaatggggttgaaagaccactccctaaatcctgggcattctcagtgtgcctatgtcctgtctctctttgcctcacgagacttccccagaattgagttttgagcaagaggc

SEQ ID NO: 283405 - DNA, 400 bp, Homo sapiens
aatgaagaataaagagtgggctagcgacttccaggggatagaacagaagcggttattgagcattcgctgtgtaccaagtgctgtccttgacaagaagacttacacccagtggtcccagagggagacttcggaagtgggagcacctgtcagatcatcatcaaggaaccagatttacctcccacctgaaacaaatgatgaacaagcaaaaccataaaataactgtttttagacattgagcttcaggcattgaagaacagtgattcttgatattgggaagcaagccaacaatttgtgcttcagggagagttttccaaaccaattgttattaatgagtcacacatcatatctgatttatgatttattaaactttatgcattaaatactttccaaacaagacaag

SEQ ID NO: 283406 - DNA, 2342 bp, Homo sapiens
agcgggctcccagcgccacggacgcccccgggccgagcggcggtgcgctcccgtgcagacccgtggacagacgcccctggccggtggactctcgagtctcgcttctgcaccctgcgtccccagacatgaatgtgaggagggtggaaagcatttcggctcagctggaggaggccagctctacaggcggtttcctgtacgctcagaacagcaccaagcgcagcattaaagagcggctcatgaagctcttgccctgctcagctgccaaaacgtcgtctcctgctattcaaaacagcgtggaagatgaactggagatggccaccgtcaggcatcggcctgaagcccttgagcttctggaagcccagagcaaatttaccaagaaagagcttcagatcctttacagaggatttaagaatgaatgccccagtggtgttgttaatgaagaaaccttcaaagagatttactcgcagttctttccacagggagactctacaacatatgcacattttctgttcaatgcatttgatacagaccacaatggagctgtgagtttcgaggatttcatcaaaggtctttccattttgctccgggggacagtacaagaaaaactcaattgggcatttaatctgtatgacataaataaagatggctacatcactaaagaggaaatgcttgatataatgaaagcaatatacgatatgatgggtaaatgtacatatcctgtcctcaaagaagatgctcccagacaacacgttgaaacattttttcagaaaatggacaaaaataaagatggggttgttaccatagatgagttcattgaaagctgccaaaaagatgaaaacataatgcgctccatgcagctctttgaaaatgtgatttaacttgtcaaatagatcctgaatccaacagacaaatgtgaactattctaccacccttaaagttggagctaccacttttagcatagattgctcagcttgacactgaagcatattatgcaaacaagctttgttttaatataaagcaatccccaaaagatttgagctttcagttataaatttgcatccttttcataatgccactgagttcaggggatggtctaactcatttcatactctgtgaatattcaaaagtaatagaatctggcatatagttttattggttccttagccatgggattattgaggctttcacatatcagtgattttaaaatatcagtgttttttgctactcatttgtatgtattcagtcctaggattttgaatggttttctaatatagtgacatctgcatttaatttccagaaattaaattaattttcatgtttgaatgctgtaattccatttaaattccatttatatactttaaggaaacaagattacaacaattaaaaaaacacatagttccagtttctatggccttcccaccttctgttagaaattagttttatctggcatttttaaacatttaaaaattagtttattatcagatatcagcatatgcctaataaaacttattttaataagcatttaattttccataatatgttacagccaaggcctatataataattttggatttgttcaatctttcttacaggctgttttctattgtatcaatcattagtatcaatcattaagtggaagttgaagaaggcatcaaacaaaacaaggatgtttacagacatatgcaaagggtcaggatatctatcctccagtatatagtaatgcttaataacaagtaatcctaacagcattaaaggccaaatctgtcctctttcccctgacttccttacagcatgtttatttatattacaagccattcagggacaaagaaagaaaccttgactaccccactgtctactaagaacaaacagcaagcaaaattagcaagcaaaattcactttgaaagcaccagtggttccattacattgacaactactaccaagatttagtagaaaataagtgctcgacaactaatccagattacagtatgatttagctcatcataattcagattatttttaatcaatcatcttagccaaaactgtaaagttgccacattactaaagccacacacatcgtccctgttttgtagaaatatcacaaagaccaagaggctacagaaggaggaaatttgcaactgtctttgcaacaataaatcaggtatctattctggtgtagagataggatgttgaaagctgccctgctatcaccagtgtagaaattaagagtagtacaatacatgtacactgaaatttgccatcacgtgtttgtgtaaactcaatgtgcacattttgtatttcaaaaagaaaaaataaaagcaaaataaaatgtttataactctact

SEQ ID NO: 283407 - DNA, 2258 bp, Homo sapiens
agcgggctcccagcgccacggacgcccccgggccgagcggcggtgcgctcccgtgcagacccgtggacagacgcccctggccggtggactctcgagtctcgcttctgcaccctgcgtccccagacatgaatgtgaggagggtggaaagcatttcggctcagctggaggaggccagctctacaggcgacagcgtggaagatgaactggagatggccaccgtcaggcatcggcctgaagcccttgagcttctggaagcccagagcaaatttaccaagaaagagcttcagatcctttacagaggatttaagaatgaatgccccagtggtgttgttaatgaagaaaccttcaaagagatttactcgcagttctttccacagggagactctacaacatatgcacattttctgttcaatgcatttgatacagaccacaatggagctgtgagtttcgaggatttcatcaaaggtctttccattttgctccgggggacagtacaagaaaaactcaattgggcatttaatctgtatgacataaataaagatggctacatcactaaagaggaaatgcttgatataatgaaagcaatatacgatatgatgggtaaatgtacatatcctgtcctcaaagaagatgctcccagacaacacgttgaaacattttttcagaaaatggacaaaaataaagatggggttgttaccatagatgagttcattgaaagctgccaaaaagatgaaaacataatgcgctccatgcagctctttgaaaatgtgatttaacttgtcaaatagatcctgaatccaacagacaaatgtgaactattctaccacccttaaagttggagctaccacttttagcatagattgctcagcttgacactgaagcatattatgcaaacaagctttgttttaatataaagcaatccccaaaagatttgagctttcagttataaatttgcatccttttcataatgccactgagttcaggggatggtctaactcatttcatactctgtgaatattcaaaagtaatagaatctggcatatagttttattggttccttagccatgggattattgaggctttcacatatcagtgattttaaaatatcagtgttttttgctactcatttgtatgtattcagtcctaggattttgaatggttttctaatatagtgacatctgcatttaatttccagaaattaaattaattttcatgtttgaatgctgtaattccatttaaattccatttatatactttaaggaaacaagattacaacaattaaaaaaacacatagttccagtttctatggccttcccaccttctgttagaaattagttttatctggcatttttaaacatttaaaaattattaaacatttaaaaattagtttattatcagatatcagcatatgcctaataaaacttattttaataagcatttaattttccataatatgttacagccaaggcctatataataattttggatttgttcaatctttcttacaggctgttttctattgtatcaatcattagtatcaatcattaagtggaagttgaagaaggcatcaaacaaaacaaggatgtttacagacatatgcaaagggtcaggatatctatcctccagtatatagtaatgcttaataacaagtaatcctaacagcattaaaggccaaatctgtcctctttcccctgacttccttacagcatgtttatttatattacaagccattcagggacaaagaaagaaaccttgactaccccactgtctactaagaacaaacagcaagcaaaattagcaagcaaaattcactttgaaagcaccagtggttccattacattgacaactactaccaagatttagtagaaaataagtgctcgacaactaatccagattacagtatgatttagctcatcataattcagattatttttaatcaatcatcttagccaaaactgtaaagttgccacattactaaagccacacacatcgtccctgttttgtagaaatatcacaaagaccaagaggctacagaaggaggaaatttgcaactgtctttgcaacaataaatcaggtatctattctggtgtagagataggatgttgaaagctgccctgctatcaccagtgtagaaattaagagtagtacaatacatgtacactgaaatttgccatcacgtgtttgtgtaaactcaatgtgcacattttgtatttcaaaaagaaaaaataaaagcaaaataaaatgtttataactctact

SEQ ID NO: 283408 - DNA, 2340 bp, Homo sapiens
aaagatggaggctctgtgtgagaaggaatgcagggcagcctctggttgcagagagcagcacccggtttgacagctagcaatgcaattgtgacctcagacctacaatgtcaaggaattggcttctgccaacaaccagaatgagcatgaaagtggattagtccttggaacttccagataagagcccagccagctatacttggatttcagcctgtgagattctcagcagagaacccagtcaagtgtgtccagacgtccaacctacagaactacagcgtggaagatgaactggagatggccaccgtcaggcatcggcctgaagcccttgagcttctggaagcccagagcaaatttaccaagaaagagcttcagatcctttacagaggatttaagaatgaatgccccagtggtgttgttaatgaagaaaccttcaaagagatttactcgcagttctttccacagggagactctacaacatatgcacattttctgttcaatgcatttgatacagaccacaatggagctgtgagtttcgaggatttcatcaaaggtctttccattttgctccgggggacagtacaagaaaaactcaattgggcatttaatctgtatgacataaataaagatggctacatcactaaagaggaaatgcttgatataatgaaagcaatatacgatatgatgggtaaatgtacatatcctgtcctcaaagaagatgctcccagacaacacgttgaaacattttttcagaaaatggacaaaaataaagatggggttgttaccatagatgagttcattgaaagctgccaaaaagatgaaaacataatgcgctccatgcagctctttgaaaatgtgatttaacttgtcaaatagatcctgaatccaacagacaaatgtgaactattctaccacccttaaagttggagctaccacttttagcatagattgctcagcttgacactgaagcatattatgcaaacaagctttgttttaatataaagcaatccccaaaagatttgagctttcagttataaatttgcatccttttcataatgccactgagttcaggggatggtctaactcatttcatactctgtgaatattcaaaagtaatagaatctggcatatagttttattggttccttagccatgggattattgaggctttcacatatcagtgattttaaaatatcagtgttttttgctactcatttgtatgtattcagtcctaggattttgaatggttttctaatatagtgacatctgcatttaatttccagaaattaaattaattttcatgtttgaatgctgtaattccatttaaattccatttatatactttaaggaaacaagattacaacaattaaaaaaacacatagttccagtttctatggccttcccaccttctgttagaaattagttttatctggcatttttaaacatttaaaaattattaaacatttaaaaattagtttattatcagatatcagcatatgcctaataaaacttattttaataagcatttaattttccataatatgttacagccaaggcctatataataattttggatttgttcaatctttcttacaggctgttttctattgtatcaatcattagtatcaatcattaagtggaagttgaagaaggcatcaaacaaaacaaggatgtttacagacatatgcaaagggtcaggatatctatcctccagtatatagtaatgcttaataacaagtaatcctaacagcattaaaggccaaatctgtcctctttcccctgacttccttacagcatgtttatttatattacaagccattcagggacaaagaaagaaaccttgactaccccactgtctactaagaacaaacagcaagcaaaattagcaagcaaaattcactttgaaagcaccagtggttccattacattgacaactactaccaagatttagtagaaaataagtgctcgacaactaatccagattacagtatgatttagctcatcataattcagattatttttaatcaatcatcttagccaaaactgtaaagttgccacattactaaagccacacacatcgtccctgttttgtagaaatatcacaaagaccaagaggctacagaaggaggaaatttgcaactgtctttgcaacaataaatcaggtatctattctggtgtagagataggatgttgaaagctgccctgctatcaccagtgtagaaattaagagtagtacaatacatgtacactgaaatttgccatcacgtgtttgtgtaaactcaatgtgcacattttgtatttcaaaaagaaaaaataaaagcaaaataaaatgtttataactctact

SEQ ID NO: 283409 - DNA, 2081 bp, Homo sapiens
tagcatcctattaatttaatagctttggttttgaatttacaatgctgataactgcatttattgaacattcactaaatccaagatacaacactaaacagttctcatgtttcacaagttttgttttcattcagtttttacaagaatcctataaatcctcattaatctcattttacagatgagacaaaaagcaagctctgaaagtttcagcaaattgcgcaagctcctgtcacatctagaaggtgggattttacctaggacagagtgactctacatcttcaccacattatattgaaaagggaaaagccagaagcatttggccctatcatttttatctctaaaaaactgctggttcctgctctgaaacagttcctccacgtgaaataaataagcagctaggttttctttttatcagcttcagctcatttggtccaggtgtgagggtattaagggataagtctaaatacaatttttgttttcttcctgaacagaaaatggacaaaaataaagatggggttgttaccatagatgagttcattgaaagctgccaaaaagatgaaaacataatgcgctccatgcagctctttgaaaatgtgatttaacttgtcaaatagatcctgaatccaacagacaaatgtgaactattctaccacccttaaagttggagctaccacttttagcatagattgctcagcttgacactgaagcatattatgcaaacaagctttgttttaatataaagcaatccccaaaagatttgagctttcagttataaatttgcatccttttcataatgccactgagttcaggggatggtctaactcatttcatactctgtgaatattcaaaagtaatagaatctggcatatagttttattggttccttagccatgggattattgaggctttcacatatcagtgattttaaaatatcagtgttttttgctactcatttgtatgtattcagtcctaggattttgaatggttttctaatatagtgacatctgcatttaatttccagaaattaaattaattttcatgtttgaatgctgtaattccatttaaattccatttatatactttaaggaaacaagattacaacaattaaaaaaacacatagttccagtttctatggccttcccaccttctgttagaaattagttttatctggcatttttaaacatttaaaaattattaaacatttaaaaattagtttattatcagatatcagcatatgcctaataaaacttattttaataagcatttaattttccataatatgttacagccaaggcctatataataattttggatttgttcaatctttcttacaggctgttttctattgtatcaatcattagtatcaatcattaagtggaagttgaagaaggcatcaaacaaaacaaggatgtttacagacatatgcaaagggtcaggatatctatcctccagtatatagtaatgcttaataacaagtaatcctaacagcattaaaggccaaatctgtcctctttcccctgacttccttacagcatgtttatttatattacaagccattcagggacaaagaaagaaaccttgactaccccactgtctactaagaacaaacagcaagcaaaattagcaagcaaaattcactttgaaagcaccagtggttccattacattgacaactactaccaagatttagtagaaaataagtgctcgacaactaatccagattacagtatgatttagctcatcataattcagattatttttaatcaatcatcttagccaaaactgtaaagttgccacattactaaagccacacacatcgtccctgttttgtagaaatatcacaaagaccaagaggctacagaaggaggaaatttgcaactgtctttgcaacaataaatcaggtatctattctggtgtagagataggatgttgaaagctgccctgctatcaccagtgtagaaattaagagtagtacaatacatgtacactgaaatttgccatcacgtgtttgtgtaaactcaatgtgcacattttgtatttcaaaaagaaaaaataaaagcaaaataaaatgtttataactctact

SEQ ID NO: 283410 - DNA, 1721 bp, Homo sapiens
gtccttcatagtcatctatgtggaaaatggatagaatagaatggcatttacatttgcaaacacttaatatttgagcttttggcataggtggttgaggtggttgatgggaggaggcaatactcaggggcaaaatagtgtacttttccttgcagatatgctgaatttaatcgctctgtgtttctcccttacaggatgaaaacataatgcgctccatgcagctctttgaaaatgtgatttaacttgtcaaatagatcctgaatccaacagacaaatgtgaactattctaccacccttaaagttggagctaccacttttagcatagattgctcagcttgacactgaagcatattatgcaaacaagctttgttttaatataaagcaatccccaaaagatttgagctttcagttataaatttgcatccttttcataatgccactgagttcaggggatggtctaactcatttcatactctgtgaatattcaaaagtaatagaatctggcatatagttttattggttccttagccatgggattattgaggctttcacatatcagtgattttaaaatatcagtgttttttgctactcatttgtatgtattcagtcctaggattttgaatggttttctaatatagtgacatctgcatttaatttccagaaattaaattaattttcatgtttgaatgctgtaattccatttaaattccatttatatactttaaggaaacaagattacaacaattaaaaaaacacatagttccagtttctatggccttcccaccttctgttagaaattagttttatctggcatttttaaacatttaaaaattattaaacatttaaaaattagtttattatcagatatcagcatatgcctaataaaacttattttaataagcatttaattttccataatatgttacagccaaggcctatataataattttggatttgttcaatctttcttacaggctgttttctattgtatcaatcattagtatcaatcattaagtggaagttgaagaaggcatcaaacaaaacaaggatgtttacagacatatgcaaagggtcaggatatctatcctccagtatatagtaatgcttaataacaagtaatcctaacagcattaaaggccaaatctgtcctctttcccctgacttccttacagcatgtttatttatattacaagccattcagggacaaagaaagaaaccttgactaccccactgtctactaagaacaaacagcaagcaaaattagcaagcaaaattcactttgaaagcaccagtggttccattacattgacaactactaccaagatttagtagaaaataagtgctcgacaactaatccagattacagtatgatttagctcatcataattcagattatttttaatcaatcatcttagccaaaactgtaaagttgccacattactaaagccacacacatcgtccctgttttgtagaaatatcacaaagaccaagaggctacagaaggaggaaatttgcaactgtctttgcaacaataaatcaggtatctattctggtgtagagataggatgttgaaagctgccctgctatcaccagtgtagaaattaagagtagtacaatacatgtacactgaaatttgccatcacgtgtttgtgtaaactcaatgtgcacattttgtatttcaaaaagaaaaaataaaagcaaaataaaatgtttataactctact

SEQ ID NO: 283411 - DNA, 476 bp, Homo sapiens
gtttttttaaaaatgtcatataaaattgaatttttatttcttttcaggatttcatcaaaggtctttccattttgctccgggggacagtacaagaaaaactcaattgggcatttaatctgtatgacataaataaagatggctacatcactaaagaggtaagggatgcctcaccaacatcacagtaatttggaccattttcatttcttaactttaaaatattaattgcaattattaatttgaaaagtttttttgaggaaattccaaaatattttatgtagtggaagaaagatgtacaattaaaaacttgggatagaagtagtttatggtgaagctccaaagtaaatatataacacataaagattacacccttgtttcctgctggcatcttaataaatactgtgaatggaataaagatcatggttggaatcagatagaaagaaaatgtatccaacccatgtttcaacatttagcctgaa

SEQ ID NO: 283412 - DNA, 826 bp, Homo sapiens
tgcaactgcttctggagaggggatgccgagccgaaccagagctgggttactacaagtgtgaaccggcagcctgtctgttgccacagaagaacttggtcaccacactgagaagccgtgttttctcacctccctgttactgttgtagctgtatctggcttctctagcattttaaaggaatttctgattgaggcgctaacagctaattccacaggagttgtaaggcagcctgtgcataaactgagacagaagtttctcctcagagactctctttttattattattattattattattggcaaagacttctggctctcctcagaggaataccttgttgcttaagatgagtggctgtagaaagcggtgtaaacgtgaaatactgaaatttgcccagtaccttctcagactattaacaggttctcttcatacagacagcgtggaagatgaactggagatggccaccgtcaggcatcggcctgaagcccttgagcttctggaagcccagagcaaatttaccaagaaagagcttcagatcctttacagaggatttaagaatgaatgccccagtggtgttgttaatgaagaaaccttcaaagagatttactcgcagttctttccacagggagactctacaacatatgcacattttctgttcaatgcatttgatacagaccacaatggagctgtgagtttcgaggatttcatcaaaggtctttccattttgctccgggggacagtacaagaaaaactcaattgggcatttaatctgtatgacataaataaagatggctacatcactaaagaggtaagggatgcctcaccaacatca

SEQ ID NO: 283413 - DNA, 2360 bp, Homo sapiens
agcgggctcccagcgccacggacgcccccgggccgagcggcggtgcgctcccgtgcagacccgtggacagacgcccctggccggtggactctcgagtctcgcttctgcaccctgcgtccccagacatgaatgtgaggagggtggaaagcatttcggctcagctggaggaggccagctctacaggcggtttcctgtacgctcagaacagcaccaagcgcagcattaaagagcggctcatgaagctcttgccctgctcagctgccaaaacgtcgtctcctgctattcaaaacagcgtggaagatgaactggagatggccaccgtcaggcatcggcctgaagcccttgagcttctggaagcccagagcaaatttaccaagaaagagcttcagatcctttacagaggatttaagaatgaatgccccagtggtgttgttaatgaagaaaccttcaaagagatttactcgcagttctttccacagggagactctacaacatatgcacattttctgttcaatgcatttgatacagaccacaatggagctgtgagtttcgaggatttcatcaaaggtctttccattttgctccgggggacagtacaagaaaaactcaattgggcatttaatctgtatgacataaataaagatggctacatcactaaagaggaaatgcttgatataatgaaagcaatatacgatatgatgggtaaatgtacatatcctgtcctcaaagaagatgctcccagacaacacgttgaaacattttttcagaaaatggacaaaaataaagatggggttgttaccatagatgagttcattgaaagctgccaaaaagatgaaaacataatgcgctccatgcagctctttgaaaatgtgatttaacttgtcaaatagatcctgaatccaacagacaaatgtgaactattctaccacccttaaagttggagctaccacttttagcatagattgctcagcttgacactgaagcatattatgcaaacaagctttgttttaatataaagcaatccccaaaagatttgagctttcagttataaatttgcatccttttcataatgccactgagttcaggggatggtctaactcatttcatactctgtgaatattcaaaagtaatagaatctggcatatagttttattggttccttagccatgggattattgaggctttcacatatcagtgattttaaaatatcagtgttttttgctactcatttgtatgtattcagtcctaggattttgaatggttttctaatatagtgacatctgcatttaatttccagaaattaaattaattttcatgtttgaatgctgtaattccatttaaattccatttatatactttaaggaaacaagattacaacaattaaaaaaacacatagttccagtttctatggccttcccaccttctgttagaaattagttttatctggcatttttaaacatttaaaaattattaaacatttaaaaattagtttattatcagatatcagcatatgcctaataaaacttattttaataagcatttaattttccataatatgttacagccaaggcctatataataattttggatttgttcaatctttcttacaggctgttttctattgtatcaatcattagtatcaatcattaagtggaagttgaagaaggcatcaaacaaaacaaggatgtttacagacatatgcaaagggtcaggatatctatcctccagtatatagtaatgcttaataacaagtaatcctaacagcattaaaggccaaatctgtcctctttcccctgacttccttacagcatgtttatttatattacaagccattcagggacaaagaaagaaaccttgactaccccactgtctactaagaacaaacagcaagcaaaattagcaagcaaaattcactttgaaagcaccagtggttccattacattgacaactactaccaagatttagtagaaaataagtgctcgacaactaatccagattacagtatgatttagctcatcataattcagattatttttaatcaatcatcttagccaaaactgtaaagttgccacattactaaagccacacacatcgtccctgttttgtagaaatatcacaaagaccaagaggctacagaaggaggaaatttgcaactgtctttgcaacaataaatcaggtatctattctggtgtagagataggatgttgaaagctgccctgctatcaccagtgtagaaattaagagtagtacaatacatgtacactgaaatttgccatcacgtgtttgtgtaaactcaatgtgcacattttgtatttcaaaaagaaaaaataaaagcaaaataaaatgtttataactctact

SEQ ID NO: 283414 - DNA, 2370 bp, Homo sapiens
agcgggctcccagcgccacggacgcccccgggccgagcggcggtgcgctcccgtgcagacccgtggacagacgcccctggccggtggactctcgagtctcgcttctgcaccctgcgtccccagacatgaatgtgaggagggtggaaagcatttcggctcagctggaggaggccagctctacaggcgaagcggttattgagcattcgctgtgtaccaagtgctgtccttgacaagaagacttacacccagtggtcccagagggagacttcggaagtgggagcacctgtcagatcatcatacagcgtggaagatgaactggagatggccaccgtcaggcatcggcctgaagcccttgagcttctggaagcccagagcaaatttaccaagaaagagcttcagatcctttacagaggatttaagaatgaatgccccagtggtgttgttaatgaagaaaccttcaaagagatttactcgcagttctttccacagggagactctacaacatatgcacattttctgttcaatgcatttgatacagaccacaatggagctgtgagtttcgaggatttcatcaaaggtctttccattttgctccgggggacagtacaagaaaaactcaattgggcatttaatctgtatgacataaataaagatggctacatcactaaagaggaaatgcttgatataatgaaagcaatatacgatatgatgggtaaatgtacatatcctgtcctcaaagaagatgctcccagacaacacgttgaaacattttttcagaaaatggacaaaaataaagatggggttgttaccatagatgagttcattgaaagctgccaaaaagatgaaaacataatgcgctccatgcagctctttgaaaatgtgatttaacttgtcaaatagatcctgaatccaacagacaaatgtgaactattctaccacccttaaagttggagctaccacttttagcatagattgctcagcttgacactgaagcatattatgcaaacaagctttgttttaatataaagcaatccccaaaagatttgagctttcagttataaatttgcatccttttcataatgccactgagttcaggggatggtctaactcatttcatactctgtgaatattcaaaagtaatagaatctggcatatagttttattggttccttagccatgggattattgaggctttcacatatcagtgattttaaaatatcagtgttttttgctactcatttgtatgtattcagtcctaggattttgaatggttttctaatatagtgacatctgcatttaatttccagaaattaaattaattttcatgtttgaatgctgtaattccatttaaattccatttatatactttaaggaaacaagattacaacaattaaaaaaacacatagttccagtttctatggccttcccaccttctgttagaaattagttttatctggcatttttaaacatttaaaaattattaaacatttaaaaattagtttattatcagatatcagcatatgcctaataaaacttattttaataagcatttaattttccataatatgttacagccaaggcctatataataattttggatttgttcaatctttcttacaggctgttttctattgtatcaatcattagtatcaatcattaagtggaagttgaagaaggcatcaaacaaaacaaggatgtttacagacatatgcaaagggtcaggatatctatcctccagtatatagtaatgcttaataacaagtaatcctaacagcattaaaggccaaatctgtcctctttcccctgacttccttacagcatgtttatttatattacaagccattcagggacaaagaaagaaaccttgactaccccactgtctactaagaacaaacagcaagcaaaattagcaagcaaaattcactttgaaagcaccagtggttccattacattgacaactactaccaagatttagtagaaaataagtgctcgacaactaatccagattacagtatgatttagctcatcataattcagattatttttaatcaatcatcttagccaaaactgtaaagttgccacattactaaagccacacacatcgtccctgttttgtagaaatatcacaaagaccaagaggctacagaaggaggaaatttgcaactgtctttgcaacaataaatcaggtatctattctggtgtagagataggatgttgaaagctgccctgctatcaccagtgtagaaattaagagtagtacaatacatgtacactgaaatttgccatcacgtgtttgtgtaaactcaatgtgcacattttgtatttcaaaaagaaaaaataaaagcaaaataaaatgtttataactctact

SEQ ID NO: 283415 - DNA, 645 bp, Homo sapiens
agcgggctcccagcgccacggacgcccccgggccgagcggcggtgcgctcccgtgcagacccgtggacagacgcccctggccggtggactctcgagtctcgcttctgcaccctgcgtccccagacatgaatgtgaggagggtggaaagcatttcggctcagctggaggaggccagctctacaggcggtttcctgtacgctcagaacagcaccaagcgcagcattaaagagcggctcatgaagctcttgccctgctcagctgccaaaacgtcgtctcctgctattcaaaacagcgtggaagatgaactggagatggccaccgtcaggcatcggcctgaagcccttgagcttctggaagcccagagcaaatttaccaagaaagagcttcagatcctttacagaggatttaagaatgtaagaactttctttttgactttaccttcacacaattcccagaggagcattgagaaatgagaggaaaagggggaaaatatcccattctatgagagccccatcatatgtatatttcatactgatccttcccagataggaatataatcagtatctgtggactttgaatctctgtggcacacccatgctggcatactgtaattgcccattaaacaaagagtttttgagaaaaaaa

SEQ ID NO: 283416 - DNA, 410 bp, Homo sapiens
aaaagtatatcaacagattaatgcattccagctgaacgttttagcctttttagtttcagctatccacaaatcaagccaccgagtccagctggtaggtttgtaaccattttgccaaaaatgtcttgagtttggggacaggaattggaaaatcttaacccaaagtattttaaaatgtattgtatttgagaaatgggaaaagaaacaaccacaggtatattacagctattgtgtcatctgccctcttgtgtctaatacctgtcctttgaacagcctctcccactaggtctggatggaggataccttaaagtgaaatgacagaccaggagaataacaacaacatctcaagtaacccctttgctgctctttttggctccctggctgatgccaaacagtttgcggcaatccaaaaa

SEQ ID NO: 283417 - DNA, 391 bp, Homo sapiens
gtatacgactagagcgacatactaaaacacacgcaagatctgtcttgaaaaatgctgttgccggggaccctcagatcatgttacctgagcatcctcagatgaaccaagcatgcaatcagagggagaatgtcgcgtatccagtgttcacctctgatacccacatccacccccaagcgatgcgcaccttctcactgaccttctctgcttggatcagaggcagttttcttatttccttgcctcgaggtgctgtgtcatacagcagcaggaacagacagtcagacacaaggactcgaggcaatggcggcggctgtgtatggggattgactcggcacctgggactcaagacgagataaccgctttatcagattaaagactgcgattggcaaactgt

SEQ ID NO: 283418 - DNA, 397 bp, Homo sapiens
cttacaacctttgttatcactttattccagtattaaaagctagtggcagtttcagaaatccccctgaaaacttagaggattctgacgtttcactttttttttaggtaagtaacatcaaatatgtgtgacctggctgacccagcctgccttaccaggcctctggaggggaccctggggttaccctcaggagatgaatctcacagtatggttttcctaaccagctctcttttggcttcactgtttttctttatctggcctgaaccccaggtctttgtaatcatttgctgttatcttcccctttcttgctccttgtttccatacccctgccatgcaagatgtcagcctagattaactcagccattcccctctgctgtaatatccaaactgcagaccattg

SEQ ID NO: 283419 - DNA, 473 bp, Homo sapiens
tctccctctgttgcccaggctggagtgcagtggtgcaatctcggctcactgcaacctctgcctcccagattcaagcgattctcccacctcagccccttgaatagctgggattacagaaagacagctcttgattcctctcttaatttctgtagtaagacttcatcttcagcaggcagctgaaaatacaaggtctttagacaaactcagccaagtgtcaaccagaaaacatttgaatttacctgtagcctggaagccccacttcaaattgtcccacctttctggatcaaaccaatgtatttctcaaatgtatttgattgatgtctcatgcctccctaaaatgtatgaaaccaagctgcacccaaaccacctttggtacatgttctcaggatctcttgaaggctgtgtcacaggccatggccactcatatttggctcagaataaatctcttcaaatattttacagagttcaactct

SEQ ID NO: 283420 - DNA, 1116 bp, Homo sapiens
gggtggttcttacctgtaattcttcctgtccagcaaaaaccatttattcttcttgtccagttttaggaaagcatgcctgttgagattggatcacctttcttcttggagacagtcaaggcagtgcctattatgttggcctcccaggcaagagggtttgccaactggggtgatttccatgagcagagctttagaatgattcattccaacctgacttagaacaatttgctttatttcttcttttttaaattaataatagaggcagggtcttgctatgttgcccaggttggtcttgaagtcctggactcaagcagtcctcccaccttggcctcccaaagtgctaggattacaggcatgagccaccacacccagccagaataatttactttaaagagttcttcttccttttctacatcttagccccattaaattacctcggtaaaccttacgtcaaaacttggggttatggttttcatctttcatttccaggaactaagatgccatccctcccatcagaaggaacagagttaaaggagtataaaccaaaaataaaattctaaggccccccaaccatctgaatggacttcctcctcagtcagcgcccttaaaatttaacctgagagactgtttcagggcatgatgggaagtgggggtcaaacatgcctcgttatacctctctggcattaacatcaacacagactttaagtctaataagaaacattttgcaacctattctctctgaagcctgctagctaaaagcttcatctgcatgataaaaccttggtcgctacagcctcttatcttaacccagacattcctttctgtttgatcccaggtctttagacaaactcagccaagtgtcaaccagaaaacatttgaatttacctgtagcctggaagccccacttcaaattgtcccacctttctggatcaaaccaatgtatttctcaaatgtatttgattgatgtctcatgcctccctaaaatgtatgaaaccaagctgcacccaaaccacctttggtacatgttctcaggatctcttgaaggctgtgtcacaggccatggccactcatatttggctcagaataaatctcttcaaatattttacagagttcaactct

SEQ ID NO: 283421 - DNA, 616 bp, Homo sapiens
aaaaatgattcacattccaactactgacttttattaaaaagagtactattagatgaaaatagttttcacactattatataaaaagacccattttacttaccctaaggctaagatcaattaacagaacccctgggataacagcccaggcaccaaatctggcacctcagagtcgtccttgacttccctaaaccgctttcccccatctcagattctgagaatttggtttctgtcaagatgtgcctctccagccaggcctctcctgccaggacggtggccacagggccatctccctctcctggcgcccccaactgcctggccaaggtgactgctacacacgtggggtcgcagaatccctcgagtcacaacgtcttcaacgtcttgtcagtcccgtgatcgcactaaacgtatttaaagccccctactcctttaagagggtcacctctgtgtacaggcggcctcctcgtactaagtgtggtggcgttcaaggctccgagacacaggcgcctcccgcgccactccccgggcacaggaactcctactcatccctcagtcatcagctcgaaggtttcttctccaagaagcctgcccggcactcgagaagtagagccgcgagcct

SEQ ID NO: 283422 - DNA, 803 bp, Homo sapiens
cgcctcattcacggcacccctgatagcgaggtcggcgtcacggtgtaggcgcgcagttggggaaaccgaggcccaacgtgggcggcagctaccagagatggcacacggaggactcaaattcgtccattcagtcattcgttcattcattccttcgggaaaccttgcagatctcccaatctgggcaactctgagctgggcgccagtagtctgggggtgctgacgggaggaggggccagagttttcaaagacgattaaccgaggctcacgtcgcggagccaacctagaagttctctggggacagaaccttggcggacaactgaattaattgttctagtctccaggcccagtacatggatgcttgttggatgaattaatgaaccttgacccacaccaagattctgagaatttggtttctgtcaagatgtgcctctccagccaggcctctcctgccaggacggtggccacagggccatctccctctcctggcgcccccaactgcctggccaaggtgactgctacacacgtggggtcgcagaatccctcgagtcacaacgtcttcaacgtcttgtcagtcccgtgatcgcactaaacgtatttaaagccccctactcctttaagagggtcacctctgtgtacaggcggcctcctcgtactaagtgtggtggcgttcaaggctccgagacacaggcgcctcccgcgccactccccgggcacaggaactcctactcatccctcagtcatcagctcgaaggtttcttctccaagaagcctgcccggcactcgagaagtagagccgcgagcct

SEQ ID NO: 283423 - DNA, 3482 bp, Homo sapiens
cctgatatttatctcagtggacggtggccggaaaaggacaatggtttccatgtcagcggataaacgctctcccctcggctcccggacgcgacggaggtcgtagtagtagtgagtacgtgctgaggagcaaaggagtaaccaagagatccagtgaccgacagagcaagagccatgccgcgccggggcctggtggctgggccagacttggagtattttcagcgtcgctatttcacgccggcggaggtggcccaacataacaggcccgaagacctctgggtatcttacctgggacgcgtgtacgacctaacgtcattggcacaggaatacaaggggaacctgctgctgaaacccatcgtggaagttgcaggccaggatatcagccactggtttgatccaaagaccagagacatccgcaagcacatagatccgctgaccggctgcctgaggtactgcaccccgcggggccgctttgtgcacgttccgcctcagctgccctgttcggactgggccaacgattttgggaagccctggtggcaggggtcgtattatgaggtggggcggctgtctgccaagacccggagcatccgcatcattaacacgctcacgtcgcaggagcacacactggaggtgggggttctggagtccatatgggaaatcctacaccgctatctcccctataactcacatgctgccagctacacgtggaaatatgaagggaagaacctgaacatggattttaccctggaagagaatgggatccgggatgaggaggaagaatttgactatctcagtatggacggtacacttcacacacctgcaatacttctgtacttcaatgatgatctcacggagttgtaggcaaggagatgtacactcgtgtagactcaagacgtatttcgagtttggctttttctgtgccttgaggaaaagtggtggggccgaggggtgcctggacccagatctccactcctctccaggagctagcctgtgcccttctgaagtgtaaaggccctattccctgccttcattacagtttgctctgagaaaattagtgaattaatctttgggaatgatacaagaagatcaagtaccttggtttagggagatgtagaagaggatagtcagagttcaggcagaactgtttgatagttaagagagagtagttctacaggggtgagggatggaaggacttttttggcaatgatggaaatgagatgtctgcaggaagatgggatttacaaagaaataggaaatgtttatcattgaccatacaaagctggcttatcttacttgtagaagagtgtttggcagctgaaacccaagggaaagaaaggaagtgcgtcattataggcaattcaggctagatattatactaggtacttcatataccctcttttttttttttgcccccaacaaagagaaggggtcttgctctgtcacccagtctggagtgcagtggcaaaatcatggctcactgcagcctggagctcctgggcacaagtgatcctcccatctctgccttgagtagctgggacttcaggtgcacgccacaatgcctaattttttaattttttgtagacacagggtctcgctgtgttgcccaggctggtttcaacctcctggcctcaagtgatcctcttgcctcagcctcccaaatagcctcttcaagacaactaccccataaggtggattaccattactatgttacagataagtccttcgaaactttggaaagtttaatagctcaaagccacactaggtagtaaccactagagccagaatgcaaattcaagtctgcccaactccaaagtccatgttctctcaatataaagggaccatctcaatgtctaatctcatgttaacatttgtagccactgctctcagcaagtatttgggatgtggctttgtcctaggatccctgcacaataggaaattgtggtcctattgtatagtttgcagttattgtctctggaagggagtttgcagagttctcctgtggcgaagaggaggcaaggaaggctaagtgtcagttaagcaatagctattggggctacttctttgttaatcccataccccagatttctctcctgaccttttggggcaaagaggtgggtatttactaacttgaaggaaaactagagtggggaaaaggccggcaaattagtgacactttggcgagggagaaaaaggaggcagtttgccacttggagaagatgaggaagacagggttgcaagacggtgactccaaaagagggagctcgacaggggtaatgtaaacagagatgctaactaagtcagaaaactctcctggtgaccaaaagagaaccactattgggggtaatggctagatttggtctcctttaacttaaggaggggagatttgagaatgacagacagttgaacttcctggcagcagcaagcaaacacaggagaaggtggcccctgtgagatactggtgggctatataggcgttttctgaggggctttgggaggcatgaacaaaggtggaaacattgctgttggcttcggcagtatctgaatttactgtgagatggagggtttaaatctaaccccatggaatgcaggagtccatgaattatctaaatcgatcattttgatctttaatcaactctgcaattatgtgtaccttgtttgctcaattaaaccctgaactatttgagaatgaaagctatgctgttcctctagtgcaagcctcagggcctgtcctgtgcctacaggatgtccccattctgccaaaacctgtccctcttccagagactcctacttcaatgtctcttgctagaaacacatccctttcctcacacatccagtcactcatcaagtgtaatctgtctcctaaatatctctggaacctatcttcttttctccaagttaccatcacctcttgtctaaactgctacggaaacttcctaacctgttctcccatttccacttctgacttccatgctgcaatgagagtcagctatgaaaaacaaacctaaacatcgaactttccttagcttcttcagtggcttccaactgcttttggaataaagtcctaaattcaaagatcttgtataaatcaggctcatctcgcaacacccctctttgttctctatggcctagacacactggctttcagttcattacatgtcttgcctcagaccctcacacactgtcctctctgcctgcaacactcttcctttcactttccacctagctgatcctaaatgttccttcctcagggaggtcttttctgatttcttggtgggtcaagactttctgataaatcagttagcaccatgcattttccagagtttttattacaattgtaaaattatggctgtaataggctggctgcgctgctagattgtaagctcacgagggcagagatcttgttcacatcttgctcactgctatattctcattgctgagcacacagttgcagctcaataaattttgaatgaactccaatgttaagt

SEQ ID NO: 283424 - DNA, 1439 bp, Homo sapiens
tttttttatggtattcagaacatcactttataaactgttgccaaattaccacttaaacactaatatccaaatacagaatttagaaaattattttaaattttaactctaccatccccccgagctctcggctatgaatttagtctgggaagagggctccgtaataggccactgaggtcctctgtcccaccacatcatcctcccccgaaaactagctgcccgactgctcaaccactattgggggtaatggctagatttggtctcctttaacttaaggaggggagatttgagaatgacagacagttgaacttcctggcagcagcaagcaaaaaacaaatcaggaagagtttagtgtgtcttctggcaggggacaccagggcccagcacaggagaaggtggcccctgtgagatactggtgggctatataggcgttttctgaggggctttgggaggcatgaacaaaggtggaaacattgctgttggcttcggcagtatctgaatttactgtgagatggagggtttaaatctaaccccatggaatgcaggagtccatgaattatctaaatcgatcattttgatctttaatcaactctgcaattatgtgtaccttgtttgctcaattaaaccctgaactatttgagaatgaaagctatgctgttcctctagtgcaagcctcagggcctgtcctgtgcctacaggatgtccccattctgccaaaacctgtccctcttccagagactcctacttcaatgtctcttgctagaaacacatccctttcctcacacatccagtcactcatcaagtgtaatctgtctcctaaatatctctggaacctatcttcttttctccaagttaccatcacctcttgtctaaactgctacggaaacttcctaacctgttctcccatttccacttctgacttccatgctgcaatgagagtcagctatgaaaaacaaacctaaacatcgaactttccttagcttcttcagtggcttccaactgcttttggaataaagtcctaaattcaaagatcttgtataaatcaggctcatctcgcaacacccctctttgttctctatggcctagacacactggctttcagttcattacatgtcttgcctcagaccctcacacactgtcctctctgcctgcaacactcttcctttcactttccacctagctgatcctaaatgttccttcctcagggaggtcttttctgatttcttggtgggtcaagactttctgataaatcagttagcaccatgcattttccagagtttttattacaattgtaaaattatggctgtaataggctggctgcgctgctagattgtaagctcacgagggcagagatcttgttcacatcttgctcactgctatattctcattgctgagcacacagttgcagctcaataaattttgaatgaactccaatgttaagt

SEQ ID NO: 283425 - DNA, 3537 bp, Homo sapiens
cctgatatttatctcagtggacggtggccggaaaaggacaatggtttccatgtcagcggataaacgctctcccctcggctcccggacgcgacggaggtcgtagtagtagtgagtacgtgctgaggagcaaaggagtaaccaagagatccagtgaccgacagagcaagagccatgccgcgccggggcctggtggctgggccagacttggagtattttcagcgtcgctatttcacgccggcggaggtggcccaacataacaggcccgaagacctctgggtatcttacctgggacgcgtgtacgacctaacgtcattggcacaggaatacaaggggaacctgctgctgaaacccatcgtggaagttgcaggccaggatatcagccactggtttgatccaaagaccagagacatccgcaagcacatagatccgctgaccggctgcctgaggtactgcaccccgcggggccgctttgtgcacgttccgcctcagctgccctgttcggactgggccaacgattttgggaagccctggtggcaggggtcgtattatgaggtggggcggctgtctgccaagacccggagcatccgcatcattaacacgctcacgtcgcaggagcacacactggaggtgggggttctggagtccatatgggaaatcctacaccgctatctcccctataactcacatgctgccagctacacgtggaaatatgaagggaagaacctgaacatggattttaccctggaagagaatgggatccgggatgaggaggaagaatttgactatctcagtatggacggtacacttcacacacctgcaatacttctgtacttcaatgatgatctcacggagttgtaggcaaggagatgtacactcgtgtagactcaagacgtatttcgagtttggctttttctgtgccttgaggaaaagtggtggggccgaggggtgcctggacccagatctccactcctctccaggagctagcctgtgcccttctgaagtgtaaaggccctattccctgccttcattacagtttgctctgagaaaattagtgaattaatctttgggaatgatacaagaagatcaagtaccttggtttagggagatgtagaagaggatagtcagagttcaggcagaactgtttgatagttaagagagagtagttctacaggggtgagggatggaaggacttttttggcaatgatggaaatgagatgtctgcaggaagatgggatttacaaagaaataggaaatgtttatcattgaccatacaaagctggcttatcttacttgtagaagagtgtttggcagctgaaacccaagggaaagaaaggaagtgcgtcattataggcaattcaggctagatattatactaggtacttcatataccctcttttttttttttgcccccaacaaagagaaggggtcttgctctgtcacccagtctggagtgcagtggcaaaatcatggctcactgcagcctggagctcctgggcacaagtgatcctcccatctctgccttgagtagctgggacttcaggtgcacgccacaatgcctaattttttaattttttgtagacacagggtctcgctgtgttgcccaggctggtttcaacctcctggcctcaagtgatcctcttgcctcagcctcccaaatagcctcttcaagacaactaccccataaggtggattaccattactatgttacagataagtccttcgaaactttggaaagtttaatagctcaaagccacactaggtagtaaccactagagccagaatgcaaattcaagtctgcccaactccaaagtccatgttctctcaatataaagggaccatctcaatgtctaatctcatgttaacatttgtagccactgctctcagcaagtatttgggatgtggctttgtcctaggatccctgcacaataggaaattgtggtcctattgtatagtttgcagttattgtctctggaagggagtttgcagagttctcctgtggcgaagaggaggcaaggaaggctaagtgtcagttaagcaatagctattggggctacttctttgttaatcccataccccagatttctctcctgaccttttggggcaaagaggtgggtatttactaacttgaaggaaaactagagtggggaaaaggccggcaaattagtgacactttggcgagggagaaaaaggaggcagtttgccacttggagaagatgaggaagacagggttgcaagacggtgactccaaaagagggagctcgacaggggtaatgtaaacagagatgctaactaagtcagaaaactctcctggtgaccaaaagagaaccactattgggggtaatggctagatttggtctcctttaacttaaggaggggagatttgagaatgacagacagttgaacttcctggcagcagcaagcaaaaaacaaatcaggaagagtttagtgtgtcttctggcaggggacaccagggcccagcacaggagaaggtggcccctgtgagatactggtgggctatataggcgttttctgaggggctttgggaggcatgaacaaaggtggaaacattgctgttggcttcggcagtatctgaatttactgtgagatggagggtttaaatctaaccccatggaatgcaggagtccatgaattatctaaatcgatcattttgatctttaatcaactctgcaattatgtgtaccttgtttgctcaattaaaccctgaactatttgagaatgaaagctatgctgttcctctagtgcaagcctcagggcctgtcctgtgcctacaggatgtccccattctgccaaaacctgtccctcttccagagactcctacttcaatgtctcttgctagaaacacatccctttcctcacacatccagtcactcatcaagtgtaatctgtctcctaaatatctctggaacctatcttcttttctccaagttaccatcacctcttgtctaaactgctacggaaacttcctaacctgttctcccatttccacttctgacttccatgctgcaatgagagtcagctatgaaaaacaaacctaaacatcgaactttccttagcttcttcagtggcttccaactgcttttggaataaagtcctaaattcaaagatcttgtataaatcaggctcatctcgcaacacccctctttgttctctatggcctagacacactggctttcagttcattacatgtcttgcctcagaccctcacacactgtcctctctgcctgcaacactcttcctttcactttccacctagctgatcctaaatgttccttcctcagggaggtcttttctgatttcttggtgggtcaagactttctgataaatcagttagcaccatgcattttccagagtttttattacaattgtaaaattatggctgtaataggctggctgcgctgctagattgtaagctcacgagggcagagatcttgttcacatcttgctcactgctatattcaaaatttattgagctgcaactgtgtgctcagcaatgagaatatagcagtgaggtcgacg

SEQ ID NO: 283426 - DNA, 442 bp, Homo sapiens
gggaggcactttgatcccagcgtgtgtatatgtatactccatccagaattctgggggtggggtgcttctgtgttctccaggtgggggttctggagtccatatgggaaatcctacaccgctatctcccctataactcacatgctgccagctacacgtggaaatatgaagggaagaacctgaacatggattttaccctggaagagaatgggatccgggatgaggaggaagaatttgactatctcagtatggacggtacacttcacacacctgcaatacttctgtacttcaatgatgatctcacggagttgtaggcaaggagatgtacactcgtgtagactcaagacgtatttcgagtttggctttttctgtgccttgaggaaaagtggtggggccgaggggtgcctggacccagatctccactcctctccaggagctagcctgt

SEQ ID NO: 283427 - DNA, 3536 bp, Homo sapiens
cctgatatttatctcagtggacggtggccggaaaaggacaatggtttccatgtcagcggataaacgctctcccctcggctcccggacgcgacggaggtcgtagtagtagtgagtacgtgctgaggagcaaaggagtaaccaagagatccagtgaccgacagagcaagagccatgccgcgccggggcctggtggctgggccagacttggagtattttcagcgtcgctatttcacgccggcggaggtggcccaacataacaggcccgaagacctctgggtatcttacctgggacgcgtgtacgacctaacgtcattggcacaggaatacaaggggaacctgctgctgaaacccatcgtggaagttgcaggccaggatatcagccactggtttgatccaaagaccagagacatccgcaagcacatagatccgctgaccggctgcctgaggtactgcaccccgcggggccgctttgtgcacgttccgcctcagctgccctgttcggactgggccaacgattttgggaagccctggtggcaggggtcgtattatgaggtggggcggctgtctgccaagacccggagcatccgcatcattaacacgctcacgtcgcaggagcacacactggaggtgggggttctggagtccatatgggaaatcctacaccgctatctcccctataactcacatgctgccagctacacgtggaaatatgaagggaagaacctgaacatggattttaccctggaagagaatgggatccgggatgaggaggaagaatttgactatctcagtatggacggtacacttcacacacctgcaatacttctgtacttcaatgatgatctcacggagttgtaggcaaggagatgtacactcgtgtagactcaagacgtatttcgagtttggctttttctgtgccttgaggaaaagtggtggggccgaggggtgcctggacccagatctccactcctctccaggagctagcctgtgcccttctgaagtgtaaaggccctattccctgccttcattacagtttgctctgagaaaattagtgaattaatctttgggaatgatacaagaagatcaagtaccttggtttagggagatgtagaagaggatagtcagagttcaggcagaactgtttgatagttaagagagagtagttctacaggggtgagggatggaaggacttttttggcaatgatggaaatgagatgtctgcaggaagatgggatttacaaagaaataggaaatgtttatcattgaccatacaaagctggcttatcttacttgtagaagagtgtttggcagctgaaacccaagggaaagaaaggaagtgcgtcattataggcaattcaggctagatattatactaggtacttcatataccctcttttttttttttgcccccaacaaagagaaggggtcttgctctgtcacccagtctggagtgcagtggcaaaatcatggctcactgcagcctggagctcctgggcacaagtgatcctcccatctctgccttgagtagctgggacttcaggtgcacgccacaatgcctaattttttaattttttgtagacacagggtctcgctgtgttgcccaggctggtttcaacctcctggcctcaagtgatcctcttgcctcagcctcccaaatagcctcttcaagacaactaccccataaggtggattaccattactatgttacagataagtccttcgaaactttggaaagtttaatagctcaaagccacactaggtagtaaccactagagccagaatgcaaattcaagtctgcccaactccaaagtccatgttctctcaatataaagggaccatctcaatgtctaatctcatgttaacatttgtagccactgctctcagcaagtatttgggatgtggctttgtcctaggatccctgcacaataggaaattgtggtcctattgtatagtttgcagttattgtctctggaagggagtttgcagagttctcctgtggcgaagaggaggcaaggaaggctaagtgtcagttaagcaatagctattggggctacttctttgttaatcccataccccagatttctctcctgaccttttggggcaaagaggtgggtatttactaacttgaaggaaaactagagtggggaaaaggccggcaaattagtgacactttggcgagggagaaaaaggaggcagtttgccacttggagaagatgaggaagacagggttgcaagacggtgactccaaaagagggagctcgacaggggtaatgtaaacagagatgctaactaagtcagaaaactctcctggtgaccaaaagagaaccactattgggggtaatggctagatttggtctcctttaacttaaggaggggagatttgagaatgacagacagttgaacttcctggcagcagcaagcaaaaaacaaatcaggaagagtttagtgtgtcttctggcaggggacaccagggcccagcacaggagaaggtggcccctgtgagatactggtgggctatataggcgttttctgaggggctttgggaggcatgaacaaaggtggaaacattgctgttggcttcggcagtatctgaatttactgtgagatggagggtttaaatctaaccccatggaatgcaggagtccatgaattatctaaatcgatcattttgatctttaatcaactctgcaattatgtgtaccttgtttgctcaattaaaccctgaactatttgagaatgaaagctatgctgttcctctagtgcaagcctcagggcctgtcctgtgcctacaggatgtccccattctgccaaaacctgtccctcttccagagactcctacttcaatgtctcttgctagaaacacatccctttcctcacacatccagtcactcatcaagtgtaatctgtctcctaaatatctctggaacctatcttcttttctccaagttaccatcacctcttgtctaaactgctacggaaacttcctaacctgttctcccatttccacttctgacttccatgctgcaatgagagtcagctatgaaaaacaaacctaaacatcgaactttccttagcttcttcagtggcttccaactgcttttggaataaagtcctaaattcaaagatcttgtataaatcaggctcatctcgcaacacccctctttgttctctatggcctagacacactggctttcagttcattacatgtcttgcctcagaccctcacacactgtcctctctgcctgcaacactcttcctttcactttccacctagctgatcctaaatgttccttcctcagggaggtcttttctgatttcttggtgggtcaagactttctgataaatcagttagcaccatgcattttccagagtttttattacaattgtaaaattatggctgtaataggctggctgcgctgctagattgtaagctcacgagggcagagatcttgttcacatcttgctcactgctatattctcattgctgagcacacagttgcagctcaataaattttgaatgaactccaatgttaagt

SEQ ID NO: 283428 - DNA, 3482 bp, Homo sapiens
cctgatatttatctcagtggacggtggccggaaaaggacaatggtttccatgtcagcggataaacgctctcccctcggctcccggacgcgacggaggtcgtagtagtagtgagtacgtgctgaggagcaaaggagtaaccaagagatccagtgaccgacagagcaagagccatgccgcgccggggcctggtggctgggccagacttggagtattttcagcgtcgctatttcacgccggcggaggtggcccaacataacaggcccgaagacctctgggtatcttacctgggacgcgtgtacgacctaacgtcattggcacaggaatacaaggggaacctgctgctgaaacccatcgtggaagttgcaggccaggatatcagccactggtttgatccaaagaccagagacatccgcaagcacatagatccgctgaccggctgcctgaggtactgcaccccgcggggccgctttgtgcacgttccgcctcagctgccctgttcggactgggccaacgattttgggaagccctggtggcaggggtcgtattatgaggtggggcggctgtctgccaagacccggagcatccgcatcattaacacgctcacgtcgcaggagcacacactggaggtgggggttctggagtccatatgggaaatcctacaccgctatctcccctataactcacatgctgccagctacacgtggaaatatgaagggaagaacctgaacatggattttaccctggaagagaatgggatccgggatgaggaggaagaatttgactatctcagtatggacggtacacttcacacacctgcaatacttctgtacttcaatgatgatctcacggagttgtaggcaaggagatgtacactcgtgtagactcaagacgtatttcgagtttggctttttctgtgccttgaggaaaagtggtggggccgaggggtgcctggacccagatctccactcctctccaggagctagcctgtgcccttctgaagtgtaaaggccctattccctgccttcattacagtttgctctgagaaaattagtgaattaatctttgggaatgatacaagaagatcaagtaccttggtttagggagatgtagaagaggatagtcagagttcaggcagaactgtttgatagttaagagagagtagttctacaggggtgagggatggaaggacttttttggcaatgatggaaatgagatgtctgcaggaagatgggatttacaaagaaataggaaatgtttatcattgaccatacaaagctggcttatcttacttgtagaagagtgtttggcagctgaaacccaagggaaagaaaggaagtgcgtcattataggcaattcaggctagatattatactaggtacttcatataccctcttttttttttttgcccccaacaaagagaaggggtcttgctctgtcacccagtctggagtgcagtggcaaaatcatggctcactgcagcctggagctcctgggcacaagtgatcctcccatctctgccttgagtagctgggacttcaggtgcacgccacaatgcctaattttttaattttttgtagacacagggtctcgctgtgttgcccaggctggtttcaacctcctggcctcaagtgatcctcttgcctcagcctcccaaatagcctcttcaagacaactaccccataaggtggattaccattactatgttacagataagtccttcgaaactttggaaagtttaatagctcaaagccacactaggtagtaaccactagagccagaatgcaaattcaagtctgcccaactccaaagtccatgttctctcaatataaagggaccatctcaatgtctaatctcatgttaacatttgtagccactgctctcagcaagtatttgggatgtggctttgtcctaggatccctgcacaataggaaattgtggtcctattgtatagtttgcagttattgtctctggaagggagtttgcagagttctcctgtggcgaagaggaggcaaggaaggctaagtgtcagttaagcaatagctattggggctacttctttgttaatcccataccccagatttctctcctgaccttttggggcaaagaggtgggtatttactaacttgaaggaaaactagagtggggaaaaggccggcaaattagtgacactttggcgagggagaaaaaggaggcagtttgccacttggagaagatgaggaagacagggttgcaagacggtgactccaaaagagggagctcgacaggggtaatgtaaacagagatgctaactaagtcagaaaactctcctggtgaccaaaagagaaccactattgggggtaatggctagatttggtctcctttaacttaaggaggggagatttgagaatgacagacagttgaacttcctggcagcagcaagcaaaaaacaaatcaggaagagtttagtgtgtcttctggcaggggacaccagggcccagcacaggagaaggtggcccctgtgagatactggtgggctatataggcgttttctgaggggctttgggaggcatgaacaaaggtggaaacattgctgttggcttcggcagtatctgaatttactgtgagatggagggtttaaatctaaccccatggaatgcaggagtccatgaattatctaaatcgatcattttgatctttaatcaactctgcaattatgtgtaccttgtttgctcaattaaaccctgaactatttgagaatgaaagctatgctgttcctctagtgcaagcctcagggcctgtcctgtgcctacaggatgtccccattctgccaaaacctgtccctcttccagagactcctacttcaatgtctcttgctagaaacacatccctttcctcacacatccagtcactcatcaagtgtaatctgtctcctaaatatctctggaacctatcttcttttctccaagttaccatcacctcttgtctaaactgctacggaaacttcctaacctgttctcccatttccacttctgacttccatgctgcaatgagagtcagctatgattttggaataaagtcctaaattcaaagatcttgtataaatcaggctcatctcgcaacacccctctttgttctctatggcctagacacactggctttcagttcattacatgtcttgcctcagaccctcacacactgtcctctctgcctgcaacactcttcctttcactttccacctagctgatcctaaatgttccttcctcagggaggtcttttctgatttcttggtgggtcaagactttctgataaatcagttagcaccatgcattttccagagtttttattacaattgtaaaattatggctgtaataggctggctgcgctgctagattgtaagctcacgagggcagagatcttgttcacatcttgctcactgctatattctcattgctgagcacacagttgcagctcaataaattttgaatgaactccaatgttaagt

SEQ ID NO: 283429 - DNA, 388 bp, Homo sapiens
gatgtacatggctgctgcaaatgtggtaccaagataaaagcagaggccaacagccccaccaaactctgggcccagtgcccgggaaatcataaagtatgagcccccagctaaaagacaaaacagaagaggtcatgtgcatctgctcttgagaacttgcaacgttcaggtgatctctaggagccagtgcagtacttacacagcagcagcagataaggacaattgcaaaagcctgaagaactccagctgtgcccaccacccatgtaaggcgtaaaaaaaggatcactccaaaaatattttgtagacatgggaggtagacacccatgaaggtacccatttggggggtctagaaagaaagacattgataaaaaatcacacagttatcctaaaa

SEQ ID NO: 283430 - DNA, 1021 bp, Homo sapiens
acactgctgccatagcggtctttgccaagacttgtccatgctgaggcccaattcctcccctggcatagggttccctgactggggctgcttgtgtaaagaatggatcaggcgacaaaggatctcctgtgagtcagaatttggtcaagaatttcagtgcatcttgatgctgattgagaataccacctgaaactgatctgaagtaataacaggctagcaacgtaatcatctctgtgttggtccatgcttgaatgaatgtacacggaatcttgggtgctgcctctccattttcagcagcagaagacatctacaagagaaacacactgccctttgaacttcaatgttactctgaaatacaatatattaataatattgctaaccaaaggatctattttaaggtcctagaatcaatctcccgcagataccaagggctgactgcactgagtttccttttggggtgatgcagatgttttggaactgcatagaggtagtggttgcataacattgtaaatgtactaaactgtactaaaaatgaacactgaattgttcatttttaaatggctaattttatgttatatgaatttcacctgaaagacacagcgagacatcgtctctaaaaattttttttgaagttataatcatgtgtattttccatgtacacataaaaggaaggaggaaagacattctcagaagttctggtgattatctacagatgatgggattataaatgctttaggttttcatttttatattttgttagattctccaagtattctacagtgaacactgctacacttaaaaataaggaaaatactatttaaaaatttaacacacatagtaattaacaacagagaccacatctcggttttttttttaacccttctggcatgccaaaattcataaaatttcttgtttctgtttgcttgatgttttattcaaatttgatgtcagagttaaaggttatgagctagatatatgttttagaatatttgtaaaaatatttacaataaaaaggtaagggctc

SEQ ID NO: 283431 - DNA, 292 bp, Homo sapiens
ccagagtcttgctctgtcgcccaggctggagtgcagtggcgtgatctcggctcactgcaacctctgccttccaggctcaagtgattctcctgtgtcagcctcccaagcagctgggatcacaggtgctgcctctccattttcagcagcagaagacatctacaagagaaacacactgccctttgaacttcaatgttactctgaaatacaatatattaataatattgctaaccaaaggatctattttagttaagtatgtttttgttattgctattgctgttgttcctaaggaaga

SEQ ID NO: 283432 - DNA, 292 bp, Homo sapiens
ggggagcgagggcactgcactgagcttttcagtccctgttgctcacacacagcatccagttcacaagggacgggcaacgtggacaaagaacgaaagacaacggacaaaaaactgaagggacctgaaattggagtttccagcgtggactttgaatacatgacagagaaaagacaaggttcagaatgttggcggccaggcctaaggtggatcccttggggtcaggaattggagaccagcctggccaacatggtgaaaccccgtctctactaaaaatacaaaagtaagccaggtg

SEQ ID NO: 283433 - DNA, 291 bp, Homo sapiens
agctgcatgagagacagaaggagcctggccagggcttcgtccgcacctgagcatccagttcacaagggacgggcaacgtggacaaagaacgaaagacaacggacaaaaaactgaagggacctgaaattggagtttccagcgtggactttgaatacatgacagagaaaagacaaggttcagaatgttggcggccaggcctaaggtggatcccttggggtcaggaattggagaccagcctggccaacatggtgaaaccccgtctctactaaaaatacaaaagtaagccaggtg

SEQ ID NO: 283434 - DNA, 868 bp, Homo sapiens
ctccacttgtcggccgttcttcgtccagagatgaacatgccggaagcggccgttcccagcttttctccgcaggcctctccaaccgagcttctattgtaaagcaccctatgccgcgcaaagcgtcatgggagctgtagttccgccgcgcccccgccgcgtccccggctctgagtggaggagtggaaagggagcgtgcgcgaagtcacgcttctggctgcgacgcaaccgccgctgggcgttttccacaacatttgggaagatttacaaggtatactccatttaggcaaaaataactgtcagggaatagtcattgtcaagagcagtttgtattgcaacccacaaattatacctctatgtcggtccagaaatccttcaatttaccaagagattatgtttgaaaatcttagaaaaaataaacaatcctgaaaaactaagtaggcagagcccatatctgttctgttcaccatcatataccaagtgccttacagaatgcctggaacatagtagacactcaacaaatattcattgaatgaatgaatgaatgacactaggcttagatactagcttaaaataacagaagaagaatcctaatttcattaaaagtaggaccagctttacagaccagtgggagatccaggctacagggagaacacatggaattccagaatcatgaaccatctggaaggggctgaggacacatatgaagtacagtctaaagcttcaggatcaattttgggagccagatgttcttcatttaacggcaaaagaccagaggatcaaggtttctgactagtcctgcttccccctactcccatgtgaactttgaattcagtttatctagttccagaaataaacaagttggtagttt

SEQ ID NO: 283435 - DNA, 1266 bp, Homo sapiens
cccgaaccggccgccgccgacaccccgctccggcccggggctgaggaggaagccgagaaggaggagaaggaggaggcggcggagggcgggggaagaggacggccgttccgggttccgcctgagcccgcagcacaggacgaggaggcgggagcggcgcggtgagagagaggtggatgaaggggaggcgacgtctcttccagggccgtgcgcggcccacgtcgccggggccgcggaggacgaggacgacgaggagcaggcggtggcggcagctcctcacgctcacaaggccactgctaacccgcctcccggctccgctggccgcgccgccgctatcgcacgggattcgcagaggcatttttggaacatctttggaaaaaattgcaggatccaagtaatcctgccatcatcaggcaggctgctggaaattatattggaagctttttggcaagagctaaatttattcctcttattactgtaaaaccatgcctagatcttttggttaactggctgcacatataccttaataaccaggattcgggaacaaaggcattctgcaatgttgctctccatggaccattttactcagcctgccaagctgtgttctacacctttgtttttagacacaagcagcttttgagcggaaacctgaaagaaggtttgcagtatcttcagagtctgaattttgagcggatagtgatgagccagctaaatcccctgaagatttgcctgccctcagtggttaacttttttgctgcaatcacaaataagtaccagctcgtcttctgctacaccatcatcgagaggaacaatcgccagatgctgccagtcattaggagtaccactggaggagactcagtgcagacctgcacaaacccactggacaccttcgtcccctttgatccctgtgtgctgaagaggtcaaagaaattcattgatcctatttatcaggtatgggaagacatgagtgctgaagaagccttctcatgggaacatgttctcagtgacgctgctacattgttgcaatctgagaggtgaaaaatgagactgcaatgtagctctgattgacatttctgttttgagtgttattgagccatttgttcatgtgtttaaggcccatttataaacatttttggtaaattatctcttcatgtcttttgttcattttcctattgggtctttggtcatttcttccctcagtttttaataatgctttctgtattagaactatttcccctatatttgatgtatgttataaatatttctcct

SEQ ID NO: 283436 - DNA, 1106 bp, Homo sapiens
cccgaaccggccgccgccgacaccccgctccggcccggggctgaggaggaagccgagaaggaggagaaggaggaggcggcggagggcgggggaagaggacggccgttccgggttccgcctgagcccgcagcacaggacgaggaggcgggagcggcgcggtgagagagaggtggatgaaggggaggcgacgtctcttccagggccgtgcgcggcccacgtcgccggggccgcggaggacgaggacgacgaggagcaggcggtggcggcagctcctcacgctcacaaggccactgctaacccgcctcccggctccgctggccgcgccgccgctatcgcacgggattcgcagaggcatttttggaacatctttggaaaaaattgcaggatccaagtaatcctgccatcatcaggcaggctgctggaaattatattggaagctttttggcaagagctaaatttattcctcttattactgtaaaaccatgcctagatcttttggttaactggctgcacatataccttaataaccaggattcgggaacaaaggcattctgcaatgttgctctccatggaccattttactcagcctgccaagctgtgttctacacctttgtttttagacacaagcagcttttgagcggaaacctgaaagaaggtttgcagtatcttcagagtctgaattttgagcggatagtgatgagccagctaaatcccctgaagatttgcctgccctcagtggttaacttttttgctgcaatcacaaataagtaccagctcgtcttctgctacaccatcatcgagaggaacaatcgccagatgctgccagtcattaggagtaccactggaggagactcagtgcagacctgcacaaacccactggacaccttcgtcccctttgatccctgtgtgctgaagagacctgcctttcgccttctgccatgattgggaggcctccccagccacatggaactagagtcttgctctgtcgcccaggctacagtgcagtggtgcaatcacagcccactgcagcctcgacctccggagctcaattgatcctcccgcctcagcctcctgagtagctgcatctacagatgtgagccaccata

SEQ ID NO: 283437 - DNA, 1038 bp, Homo sapiens
  misc_feature (940)..(940): n is a, c, g, or t
  misc_feature (949)..(950): n is a, c, g, or t
  misc_feature (1003)..(1003): n is a, c, g, or t
cccgaaccggccgccgccgacaccccgctccggcccggggctgaggaggaagccgagaaggaggagaaggaggaggcggcggagggcgggggaagaggacggccgttccgggttccgcctgagcccgcagcacaggacgaggaggcgggagcggcgcggtgagagagaggtggatgaaggggaggcgacgtctcttccagggccgtgcgcggcccacgtcgccggggccgcggaggacgaggacgacgaggagcaggcggtggcggcagctcctcacgctcacaaggccactgctaacccgcctcccggctccgctggccgcgccgccgctatcgcacgggattcgcagaggcatttttggaacatctttggaaaaaattgcaggatccaagtaatcctgccatcatcaggcaggctgctggaaattatattggaagctttttggcaagagctaaatttattcctcttattactgtaaaaccatgcctagatcttttggttaactggctgcacatataccttaataaccaggattcgggaacaaaggcattctgcaatgttgctctccatggaccattttactcagcctgccaagctgtgttctacacctttgtttttagacacaagcagcttttgagcggaaacctgaaagaaggtttgcagtatcttcagagtctgaattttgagcggatagtgatgagccagctaaatcccctgaagatttgcctgccctcagtggttaacttttttgctgcaatcacaaataagtaccagctcgtcttctgctacaccatcatcgagaggaacaatcgccagatgctgccagtcattaggagtaccactggaggagactcagtgcagacctgcacaaacccactggacaccttcgtcccctttgatccctgtgtgctgaagagatcttcaacttgctgctgagctngggaagacnnttactggatcggaacacagagttgggaggactctgtcagacagatgttacaancaatcaggagcagtgacaggaaattgagtatcgtg

SEQ ID NO: 283438 - DNA, 903 bp, Homo sapiens
ttttttaagagttttgccttgcaaacatttatttttaatgaataatatctattactcattaaaatataagcccagtttcacattctgagtgatagccacgttttctttctccttagcaaacttgcagatagaagacccatagaacggtaccctaaaagtgttactttctgctttatattgttatttttactagcacttgttatattcagcaatttctctggtaggtacagttgtcacatgcagctcacatccgcagagtcacttcagcatgttaatgcctctgtctgtgttgtttttttgttccacagtaagtaccagctcgtcttctgctacaccatcatcgagaggaacaatcgccagatgctgccagtcattaggagtaccactggaggagactcagtgcagacctgcacaaacccactggacaccttcgtcccctttgatccctgtgtgctgaagagacctgcctttcgccttctgccatgattgggaggcctccccagccacatggaactgtgagtccattcaacttctttttctttgtaaattacccagtctcgggtatggctttatcagcagcatgaaaacagacaaatatactgttgtttcttattaaatgttattggcttattttgaaaacaaaagcttaccaaatacatgtgattatgggaaggggccagaaagttacactgcaagtaaaaatatcagtaactatgtttactgggtggcgatggcaaaaacaatagtttttcctttttttttttttggagagtcttgctctgtcgcccaggctacagtgcagtggtgcaatcacagcccactgcagcctcgacctccggagctcaattgatcctcccgcctcagcctcctgagtagctgcatctacagatgtgagccaccata

SEQ ID NO: 283439 - DNA, 1031 bp, Homo sapiens
  misc_feature (933)..(933): n is a, c, g, or t
  misc_feature (942)..(943): n is a, c, g, or t
  misc_feature (996)..(996): n is a, c, g, or t
cccgaaccggccgccgccgacaccccgctccggcccggggctgaggaggaagccgagaaggaggagaaggaggaggcggcggagggcgggggaagaggacggccgttccgggttccgcctgagcccgcagcacaggacgaggaggcgggagcggcgcggtgagagagaggtggatgaaggggaggcgacgtctcttccagggccgtgcgcggcccacgtcgccggggccgcggaggacgaggacgacgaggagcaggcggtggcggcagctcctcacgctcacaaggccactgctaacccgcctcccggctccgctggccgcgccgccgctatcgcacgggattcgcagaggcatttttggaacatctttggaaaaaattgcaggatccaagtaatcctgccatcatcaggcaggctgctggaaattatattggaagctttttggcaagagctaaatttattcctcttatgattcgggaacaaaggcattctgcaatgttgctctccatggaccattttactcagcctgccaagctgtgttctacacctttgtttttagacacaagcagcttttgagcggaaacctgaaagaaggtttgcagtatcttcagagtctgaattttgagcggatagtgatgagccagctaaatcccctgaagatttgcctgccctcagtggttaacttttttgctgcaatcacaaataagtaccagctcgtcttctgctacaccatcatcgagaggaacaatcgccagatgctgccagtcattaggagtaccactggaggagactcagtgcagacctgcacaaacccactggacaccttcgtcccctttgatccctgtgtgctgaagagacctgcctttcgccttctgccatgattgggaggcctccccagccacatggaactatcttcaacttgctgctgagctngggaagacnnttactggatcggaacacagagttgggaggactctgtcagacagatgttacaancaatcaggagcagtgacaggaaattgagtatcgtg

SEQ ID NO: 283440 - DNA, 107 bp, Homo sapiens
atgtgtgataatttgtgcttttaaagatatcttacacttttcacttatttgtacctttaaaaaatctttttttttttaaaccaaaggtttgcagtatcttcagagtc

SEQ ID NO: 283441 - DNA, 1359 bp, Homo sapiens
cccgaaccggccgccgccgacaccccgctccggcccggggctgaggaggaagccgagaaggaggagaaggaggaggcggcggagggcgggggaagaggacggccgttccgggttccgcctgagcccgcagcacaggacgaggaggcgggagcggcgcggtgagagagaggtggatgaaggggaggcgacgtctcttccagggccgtgcgcggcccacgtcgccggggccgcggaggacgaggacgacgaggagcaggcggtggcggcagctcctcacgctcacaaggccactgctaacccgcctcccggctccgctggccgcgccgccgctatcgcacgggattcgcagaggcatttttggaacatctttggaaaaaattgcaggatccaagtaatcctgccatcatcaggcaggctgctggaaattatattggaagctttttggcaagagctaaatttattcctcttattactgtaaaaccatgcctagatcttttggttaactggctgcacatataccttaataaccaggattcgggaacaaaggcattctgcaatgttgctctccatggaccattttactcagcctgccaagctgtgttctacacctttgtttttagacacaagcagcttttgagcggaaacctgaaagaaggtttgcagtatcttcagagtctgaattttgagcggatagtgatgagccagctaaatcccctgaagatttgcctgccctcagtggttaacttttttgctgcaatcacaaataagtaccagctcgtcttctgctacaccatcatcgagaggaacaatcgccagatgctgccagtcattaggagtaccactggaggagactcagtgcagacctgcacaaacccactggacaccttcgtcccctttgatccctgtgtgctgaagagacctgcctttcgccttctgccatgattgggaggcctccccagccacatggaactgtgagtccattcaacttctttttctttgtaaattacccagtctcgggtatggctttatcagcagcatgaaaacagacaaatatactgttgtttcttattaaatgttattggcttattttgaaaacaaaagcttaccaaatacatgtgattatgggaaggggccagaaagttacactgcaagtaaaaatatcagtaactatgtttactgggtggcgatggcaaaaacaatagtttttcctttttttttttttggagagtcttgctctgtcgcccaggctacagtgcagtggtgcaatcacagcccactgcagcctcgacctccggagctcaattgatcctcccgcctcagcctcctgagtagctgcatctacagatgtgagccaccata

SEQ ID NO: 283442 - DNA, 1029 bp, Homo sapiens
cccgaaccggccgccgccgacaccccgctccggcccggggctgaggaggaagccgagaaggaggagaaggaggaggcggcggagggcgggggaagaggacggccgttccgggttccgcctgagcccgcagcacaggacgaggaggcgggagcggcgcggtgagagagaggtggatgaaggggaggcgacgtctcttccagggccgtgcgcggcccacgtcgccggggccgcggaggacgaggacgacgaggagcaggcggtggcggcagctcctcacgctcacaaggccactgctaacccgcctcccggctccgctggccgcgccgccgctatcgcacgggattcgcagaggcatttttggaacatctttggaaaaaattgcaggatccaagtaatcctgccatcatcaggcaggctgctggaaattatattggaagctttttggcaagagctaaatttattcctcttattactgtaaaaccatgcctagatcttttggttaactggctgcacatataccttaataaccaggattcgggaacaaaggcattctgcaatgttgctctccatggaccattttactcagcctgccaagctgtgttctacacctttgtttttagacacaagcagcttttgagcggaaacctgaaagaaggtttgcagtatcttcagagtctgaattttgagcggatagtgatgagccagctaaatcccctgaagatttgcctgccctcagtggttaacttttttgctgcaatcacaaataagtaccagctcgtcttctgctacaccatcatcgagaggaacaatcgccagatgctgccagtcattaggagtaccactggaggagactcagtgcagacctgcacaaacccactggacaccttcgtcccctttgatccctgtgtgctgaagaggtcaaagaaattcattgatcctatttatcaggtatgggaagacatgagtgctgaagagctacaggagttcaagaaacccatgaaaaaggtcagtttgtgattgattgagcac

SEQ ID NO: 283443 - DNA, 985 bp, Homo sapiens
cccgaaccggccgccgccgacaccccgctccggcccggggctgaggaggaagccgagaaggaggagaaggaggaggcggcggagggcgggggaagaggacggccgttccgggttccgcctgagcccgcagcacaggacgaggaggcgggagcggcgcggtgagagagaggtggatgaaggggaggcgacgtctcttccagggccgtgcgcggcccacgtcgccggggccgcggaggacgaggacgacgaggagcaggcggtggcggcagctcctcacgctcacaaggccactgctaacccgcctcccggctccgctggccgcgccgccgctatcgcacgggattcgcagaggcatttttggaacatctttggaaaaaattgcaggatccaagtaatcctgccatcatcaggcaggctgctggaaattatattggaagctttttggcaagagctaaatttattcctcttattactgtaaaaccatgcctagatcttttggttaactggctgcacatataccttaataaccaggattcgggaacaaaggcattctgcaatgttgctctccatggaccattttactcagcctgccaagctgtgttctacacctttgtttttagacacaagcagcttttgagcggaaacctgaaagaaggtttgcagtatcttcagagtctgaattttgagcggatagtgatgagccagctaaatcccctgaagatttgcctgccctcagtggttaacttttttgctgcaatcacaaataagtaccagctcgtcttctgctacaccatcatcgagaggaacaatcgccagatgctgccagtcattaggagtaccactggaggagactcagtgcagacctgcacaaacccactggacaccttcgtcccctttgatccctgtgtgctgaagaggtaggtacttttaaacattgatgctggaggaggtggatttttttttctttttgagacgccatcatgga

SEQ ID NO: 283444 - DNA, 731 bp, Homo sapiens
atgtcggtaccgatacgctcctagacgatcagagctttgggtcaccttggggagctggcagagccagcaagaagggctgaatgattctgggtgaactggggacagccatgtcgccctgggagacagagcaagggtagcctgggctggccagatgccttcagggatgaagaagcgtatggggagggggagctgaaggatcaactctcctgagggtgcatctcctcagggcccaggaagggcaaggtggctgaggaggggtgcttcaggcttcctgcgagcaaccctggcctctccctccctacctgcagcaggcatggagtatggagcccgacaaagtggagtgttttgttttttccttttccggctttgctccatttcccagccatgcactgccccatttcctagccatgcactgccccagctgggacctgtgtctctggcctctggtggcccttggagttgactgtcctgctgctccttgaggccattctcagagagaggaagtggcctcattttaatccgcttcccacagccttgtcctttccagacccatgggagagggaggggctgagggtgtggctgagcccacccaagtcacgcgtcactctgcaggtccctctcccccaaggccgtggccttgggagcccgtggatcccagtgagtgacgcctccaccccccgccctactcgggcagtttaacccttgttgttcacttgcagacatcgtgaaca

SEQ ID NO: 283445 - DNA, 427 bp, Homo sapiens
  misc_feature (30)..(30): n is a, c, g, or t
  misc_feature (246)..(246): n is a, c, g, or t
  misc_feature (274)..(274): n is a, c, g, or t
  misc_feature (283)..(283): n is a, c, g, or t
  misc_feature (293)..(294): n is a, c, g, or t
  misc_feature (303)..(303): n is a, c, g, or t
  misc_feature (311)..(311): n is a, c, g, or t
  misc_feature (409)..(409): n is a, c, g, or t
tggatgtgaactctgtcctgataggtcccnctgctgctgctgctgctgctgctgctgctgctgctgctgctgctgctgctgttgctgctgctgttgctgcttttgctgctgtctgaaacattcaaaagtgaagtatatttaaaaaacaaaacttaaaagaataaatacaccatgagaaaaactattcataaggaaaatacattgtttcacgaatcaaagtagtcactggtattaaaagaatgcaanagcagttagtctgatacagattactttnaaatatggnagtgctgatnntaggaaatntagacatnaaatttaaatttatcagacaaattaagaggtaggtattttcatcacaaaataactatcatggccaggagtggtggctcacacctgtaatcccagcacnttgggaggccgaggcggg

SEQ ID NO: 283446 - DNA, 257 bp, Homo sapiens
tcatcaatgatgtaggtgctcctggggacaccccagtacacacaggcacgcacaggtgcacacacacatgcacatgtacacacctgcacatgcatgcaagaaccggcgcctgcatgcacttatgggccgtcccagagcaccgcagaggaagatggtgtgcgggcgggagtgtggaagccccgctgccaccgtccaaactgggccctcagcctccacccgcgacgcgggtctttgcacagatggagtggcgatagcca

SEQ ID NO: 283447 - DNA, 502 bp, Homo sapiens
cggcacgaggagcgcgttgttttcgaagcttggagaagtctttcagtgggcagtgcctgccctctgcacacagtagtaacttgatttctgctgtgaagcctgagtcgtgttatttggaaggcggtggggatccaccgggatcaggaacaaagagtgactctgtaatggtatcagaggcccctgtggtggtttccacacagaccagggctgctgtggaagctgtgcgtgccccgacaggaactctagtgtactgtgtgatcgcggccattagaaaggtggcctcttcagatggacccatttgggggataaagcctgtcaggtggtgccagccctgagcacactgcaggcacgctttggagctttggggctggtctacagggaaggcctccagccccttccatccaaaatgcgcccacagggttggggggtctgtaagcaaccactgtagctgcccccggttctcacagaattcctttccattgcagaaaataattaaaatttg

SEQ ID NO: 283448 - DNA, 784 bp, Homo sapiens
ctttcgcctcccggttctcaccctcatacagaccctcctttcagacccgccctcctgttcacagggacccatttcggagccctggctcacgctgggcgggaactgccgtgacgaattccccccaaggtgttgattatccatcccaacccagcctctggcttccctcccacctccaccccagctcccacaggcccctcgccccgttcatcggctgggcgctcgagacggcgcccccagatctcccaccgggcagtgtccccagctgcagctgaggagagaagcgccggcgtgcgcggtgccacgtcggaattggctctggggacgccgcagctgccgaagcgcagcgcgcggtccccacgcacgccctgcctccgggcggccggcgggctggcccggcgaggagaggagggatgcgcgccctcctcccgctcctatctgcgggtgccaccgcctgcgtcagggacccctggcccgatctttctgcccccgataacagaaaatctctttttcgtcttaaaaaaaaaaaaaaaaaaaaaaaagcctgtggaagactcagcagaacccaggaagcgcagaattgggagaaaagtctttggctggggctgtttcaagtctctggttcaatgggctgctcgaagccaggactgggatcttctgaggggtggacttctttggaactcgacaggaccttgaagactgggttcttagtccttatcacatatatgggctataatgaataagtctaaacagaaaagtcgaataaactggaaatgatgctttcaaa

SEQ ID NO: 283449 - DNA, 323 bp, Homo sapiens
gattttctccgaaatacgcactgctgcatcctgcagtcactgaagatcatttccaaatcagtttccccacccccgagaggaggccatttctaaagatgaaaaacaaaacccctcaaatgtagctgttatgtttttaaacagtggcacatatcacctttatcaccttgttgcagcttaagtcagtctctaatacacataaggtaatgcaatcacatgtggtgggggacattactgacaaagcaaatcagtcctaaaaacttctattcacctgatcttctggaattcgaaggacagcacctcaagcccgtctatcgccttcattg

SEQ ID NO: 283450 - DNA, 958 bp, Homo sapiens
agcggattggcgggtccgccgcccgccccgccgcggtcgaggatcctggaggtttgtccccgccgccccgacgcttccgcccggtccgtcggcacgtcggccctgcctcccggaccaccctgcggggcgcaccagcgatctggggtgcggggctcggcctccctgcgctcctggctgacggtgtgaccttgggaccgagacgtgcagctgtccaaggctctgtcctatgccctgcgccatggggccttgaagctggggcttcccatgggagctgatggcttcgtgcccctgggcaccctcctgcagttgccccagttccgcggcttctctgctgaagatgtgcagcgcgtggtggacaccaataggaagcagcggttcgccctgcagctgggggatcccagcactggccttctcatccgggccaaccagggccattccctgcaggtacctaagttggagctgatgcccctggagacaccgcaggccctgcccccgatgctagtccatggtacattctggaagcactggccatccatcctactcaaaggcctgtcctgccagggaaggacgcacattcacctggccccaggactgcctggagaccccggtatcatcagtggcatgcggtcccattgtgaaatagctgtgttcatcgatggacccctggctctggcagatggaatacccttcttccgctctgccaatggggtgattctgactccagggaatactgatggcttcctccttcccaagtacttcaaggaggccctgcagctacgccctacccgaaagcccctttccttggctggtgatgaagagacagagtgtcagagtagccccaagcacagctccagagaaaggaggaggatccaacaataaaatattaatttataaaaaagaaattttaaaaagtaacaagaaagaactcgtttgaaaccatgtttcatcatcctgtagc

SEQ ID NO: 283451 - DNA, 1042 bp, Homo sapiens
agcggattggcgggtccgccgcccgccccgccgcggtcgaggatcctggaggtttgtccccgccgccccgacgcttccgcccggtccgtcggcacgtcggccctgcctcccggaccaccctgcggggcgcaccagcgatctggggtgcggggctcggcctccctgcgctcctggctgacggtgtgaccttgggtcttaaccatgaacttctctggaggagggaggcaggaagcagcagggtccaggggtagaagggctcccagaccccgagaacaggaccgagacgtgcagctgtccaaggctctgtcctatgccctgcgccatggggccttgaagctggggcttcccatgggagctgatggcttcgtgcccctgggcaccctcctgcagttgccccagttccgcggcttctctgctgaagatgtgcagcgcgtggtggacaccaataggaagcagcggttcgccctgcagctgggggatcccagcactggccttctcatccgggccaaccagggccattccctgcaggtacctaagttggagctgatgcccctggagacaccgcaggccctgcccccgatgctagtccatggtacattctggaagcactggccatccatcctactcaaaggcctgtcctgccagggaaggacgcacattcacctggccccaggactgcctggagaccccggtatcatcagtggcatgcggtcccattgtgaaatagctgtgttcatcgatggacccctggctctggcagatggaatacccttcttccgctctgccaatggggtgattctgactccagggaatactgatggcttcctccttcccaagtacttcaaggaggccctgcagctacgccctacccgaaagcccctttccttggctggtgatgaagagacagagtgtcagagtagccccaagcacagctccagagaaaggaggaggatccaacaataaaatattaatttataaaaaagaaattttaaaaagtaacaagaaagaactcgtttgaaaccatgtttcatcatcctgtagc

SEQ ID NO: 283452 - DNA, 1570 bp, Homo sapiens
agcggattggcgggtccgccgcccgccccgccgcggtcgaggatcctggaggtttgtccccgccgccccgacgcttccgcccggtccgtcggcacgtcggccctgcctcccggaccaccctgcggggcgcaccagcgatctggggtgcggggctcggcctccctgcgctcctggctgacggtgtgaccttgggtcttaaccatgaacttctctggaggagggaggcaggaagcagcagggtccaggggtagaagggctcccagaccccgagaacaggaccgagacgtgcagctgtccaaggctctgtcctatgccctgcgccatggggccttgaagctggggcttcccatgggagctggtaagtaggggccttggaggctggggcttgagcccagagagaaacgtgagcctgtctgcgactcctccctgatggctgcctccaccgctccctgaggaaggcacagagtgcacttcctccccatgcacagaggagagcaaggcctagagcccctgtcatgtccacagcagactgaggagagttcttgtctgggccaggcctggtgaccgccccctccagccaagcagccagatcagcacttaccccgagggcgagccctggagggtacggtgcagctggtggtgtgagtgtgcactccgggccagcgctatgctgggcactcacctccctgcccctccgtgaggcagatcctctttttatgtaagttgaaaaaactgcggcccagaaaggggagactttctaaaggtcccacagaggatgcccaagcgatctccaagcccagactttgtttcggttgcctgtggctccctgttaaccctggcccagtccagagcaaggttagctcctgagcaccctgcctgcccacagatggcttcgtgcccctgggcaccctcctgcagttgccccagttccgcggcttctctgctgaagatgtgcagcgcgtggtggacaccaataggaagcagcggttcgccctgcagctgggggatcccagcactggccttctcatccgggccaaccagggccattccctgcaggtacctaagttggagctgatgcccctggagacaccgcaggccctgcccccgatgctagtccatggtacattctggaagcactggccatccatcctactcaaaggcctgtcctgccagggaaggacgcacattcacctggccccaggactgcctggagaccccggtatcatcagtggcatgcggtcccattgtgaaatagctgtgttcatcgatggacccctggctctggcagatggaatacccttcttccgctctgccaatggggtgattctgactccagggaatactgatggcttcctccttcccaagtacttcaaggaggccctgcagctacgccctacccgaaagcccctttccttggctggtgatgaagagacagagtgtcagagtagccccaagcacagctccagagaaaggaggaggatccaacaataaaatattaatttataaaaaagaaattttaaaaagtaacaagaaagaactcgtttgaaaccatgtttcatcatcctgtagc

SEQ ID NO: 283453 - DNA, 1526 bp, Homo sapiens
agcggattggcgggtccgccgcccgccccgccgcggtcgaggatcctggaggtttgtccccgccgccccgacgcttccgcccggtccgtcggcacgtcggccctgcctcccggaccaccctgcggggcgcaccagcgatctggggtgcggggctcggcctccctgcgctcctggctgacggtgtgaccttgggtcttaaccatgaacttctctggaggagggaggcaggaagcagcagggtccaggggtagaagggctcccagaccccgagaacaggaccgagacgtgcagctgtccaaggctctgtcctatgccctgcgccatggggccttgaagctggggcttcccatgggagctggtaagtaggggccttggaggctggggcttgagcccagagagaaacgtgagcctgtctgcgactcctccctgatggctgcctccaccgctccctgaggaaggcacagagtgcacttcctccccatgcacagaggagagcaaggcctagagcccctgtcatgtccacagcagactgaggagagttcttgtctgggccaggcctggtgaccgccccctccagccaagcagccagatcagcacttaccccgagggcgagccctggagggtacggtgcagctggtggtgtgagtgtgcactccgggccagcgctatgctgggcactcacctccctgcccctccgtgaggcagatcctctttttatgtaagttgaaaaaactgcggcccagaaaggggagactttctaaaggtcccacagaggatgcccaagcgatctccaagcccagactttgtttcggttgcctgtggctccctgttaaccctggcccagtccagagcaaggttagctcctgagcaccctgcctgcccacagatggcttcgtgcccctgggcaccctcctgcagttgccccagttccgcggcttctctgctgaagatgtgcagcgcgtggtggacaccaataggaagcagcggttcgccctgcagctgggggatcccagcactggccttctcatccgggccaaccagggccattccctgcaggtacctaagttggagctgatgcccctggagacaccgcaggccctgcccccgatgctagtccatggtacattctggaagcactggccatccatcctactcaaaggcctgtcctgccagggaaggacgcacattcacctggccccaggactgcctggagaccccggtatcatcagtggcatgcggtcccattgtgaaatagctgtgttcatcgatggacccctggctctggcagatggaatacccttcttccgctctgccaatggggtgattctgactccagggaatactgatggcttcctccttcccaagtacttcaaggaggccctgcagctacgccctacccgaaagcccctttccttggctggtgatgaagagacagagtgtcagagtagccccaagcacagctccagagaaaggaggaggatccaacaataaaatattaatttataaaaaagaaattttaaaaagta

SEQ ID NO: 283454 - DNA, 2163 bp, Homo sapiens
cccacccccagtgggtccgccagataggcctgcgtgtcaccccagtcggtggcaccctgctgtcgcagccaggcagctgagctggaccagttggtgcccaggaagtctcggtaggaagtaaggcccaggcgcaggagcagctgtggcccccgagagccaataggcgccagggtggctgagtgcaggcggaacttgggggcgtcgaagagccagggttgggcctttagccgggtctcccagatggcagtgatggcctcgtccccacctggcagtgggcgacggtcatgggcggggctcagctcggcctgtatctgctcctggggcaggcccccgccagggcactgcagcagcaaggtcacctcaggatccatggtctgaaccagccgccgggtccctcaggctccgccccttccccgaagcggaagtgcccgccccctttccacgcggcttttcattggcgggtccgccgcggtcgaggatcctggaggtttgtccccgccgccccgacgcttccgcccggtccgtcggcacgtcggccctgcctcccggaccaccctgcggggcgcaccagcgatctggggtgcggggctcggcctccctgcgctcctggctgacggtgtgaccttgggtcttaaccatgaacttctctggaggagggaggcaggaagcagcagggtccaggggtagaagggctcccagaccccgagaacaggaccgagacgtgcagctgtccaaggctctgtcctatgccctgcgccatggggccttgaagctggggcttcccatgggagctggtaagtaggggccttggaggctggggcttgagcccagagagaaacgtgagcctgtctgcgactcctccctgatggctgcctccaccgctccctgaggaaggcacagagtgcacttcctccccatgcacagaggagagcaaggcctagagcccctgtcatgtccacagcagactgaggagagttcttgtctgggccaggcctggtgaccgccccctccagccaagcagccagatcagcacttaccccgagggcgagccctggagggtacggtgcagctggtggtgtgagtgtgcactccgggccagcgctatgctgggcactcacctccctgcccctccgtgaggcagatcctctttttatgtaagttgaaaaaactgcggcccagaaaggggagactttctaaaggtcccacagaggatgcccaagcgatctccaagcccagactttgtttcggttgcctgtggctccctgttaaccctggcccagtccagagcaaggttagctcctgagcaccctgcctgcccacagatggcttcgtgcccctgggcaccctcctgcagttgccccagttccgcggcttctctgctgaagatgtgcagcgcgtggtggacaccaataggaagcagcggttcgccctgcagctgggggatcccagcactggccttctcatccgggccaaccagggccattccctgcaggtacctaagttggagctgatgcccctggagacaccgcaggccctgcccccgatgctagtccatggtacattctggaagcactggccatccatcctactcaaaggcctgtcctgccagggaaggacgcacattcacctggccccaggactgcctggagaccccggtatcatcagtggtcagtgccctcccctccacctagctactcccacccactctgtcctcccaggtccccttcaaaggttacaacacttgtctggggccaccccatgtccggcatggagcagcacccctgcatcccccagcccaggaccccagtctgcctaggttgctgactgcactccaggtgcccaggcctcagctccagctgtctctgcaggcatgcggtcccattgtgaaatagctgtgttcatcgatggacccctggctctggcagatggaatacccttcttccgctctgccaatggggtgattctgactccagggaatactgatggcttcctccttcccaagtacttcaaggaggccctgcagctacgccctacccgaaagcccctttccttggctggtgatgaagagacagagtgtcagagtagccccaagcacagctccagagaaaggaggaggatccaacaataaaatattaatttataaaaaagaaattttaaaaagta

SEQ ID NO: 283455 - DNA, 1339 bp, Homo sapiens
aggctgtacgcctccggagtacgggatccagacccgagaacaggagaccgagacgtgcagctgtccaaggctctgtcctatgccctgcgccatggggccttgaagctggggcttcccatgggagctggtaagtaggggccttggaggctggggcttgagcccagagagaaacgtgagcctgtctgcgactcctccctgatggctgcctccaccgctccctgaggaaggcacagagtgcacttcctccccatgcacagaggagagcaaggcctagagcccctgtcatgtccacagcagactgaggagagttcttgtctgggccaggcctggtgaccgccccctccagccaagcagccagatcagcacttaccccgagggcgagccctggagggtacggtgcagctggtggtgtgagtgtgcactccgggccagcgctatgctgggcactcacctccctgcccctccgtgaggcagatcctctttttatgtaagttgaaaaaactgcggcccagaaaggggagactttctaaaggtcccacagaggatgcccaagcgatctccaagcccagactttgtttcggttgcctgtggctccctgttaaccctggcccagtccagagcaaggttagctcctgagcaccctgcctgcccacagatggcttcgtgcccctgggcaccctcctgcagttgccccagttccgcggcttctctgctgaagatgtgcagcgcgtggtggacaccaataggaagcagcggttcgccctgcagctgggggatcccagcactggccttctcatccgggccaaccagggccattccctgcaggtacctaagttggagctgatgcccctggagacaccgcaggccctgcccccgatgctagtccatggtacattctggaagcactggccatccatcctactcaaaggcctgtcctgccagggaaggacgcacattcacctggccccaggactgcctggagaccccggtatcatcagtggcatgcggtcccattgtgaaatagctgtgttcatcgatggacccctggctctggcagatggaatacccttcttccgctctgccaatggggtgattctgactccagggaatactgatggcttcctccttcccaagtacttcaaggaggccctgcagctacgccctacccgaaagcccctttccttggctggtgatgaagagacagagtgtcagagtagccccaagcacagctccagagaaaggaggaggatccaacaataaaatattaatttataaaaaagaaattttaaaaagtaacaagaaagaactcgtttgaaaccatgtttcatcatcctgtagc

SEQ ID NO: 283456 - DNA, 740 bp, Homo sapiens
agcggattggcgggtccgccgcccgccccgccgcggtcgaggatcctggaggtttgtccccgccgccccgacgcttccgcccggtccgtcggcacgtcggccctgcctcccggaccaccctgcggggcgcaccagcgatctggggaccgagacgtgcagctgtccaaggctctgtcctatgccctgcgccatggggccttgaagctggggcttcccatgggagctggtacctaagttggagctgatgcccctggagacaccgcaggccctgcccccgatgctagtccatggtacattctggaagcactggccatccatcctactcaaaggcctgtcctgccagggaaggacgcacattcacctggccccaggactgcctggagaccccggtatcatcagtggcatgcggtcccattgtgaaatagctgtgttcatcgatggacccctggctctggcagatggaatacccttcttccgctctgccaatggggtgattctgactccagggaatactgatggcttcctccttcccaagtacttcaaggaggccctgcagctacgccctacccgaaagcccctttccttggctggtgatgaagagacagagtgtcagagtagccccaagcacagctccagagaaaggaggaggatccaacaataaaatattaatttataaaaaagaaattttaaaaagtaacaagaaagaactcgtttgaaaccatgtttcatcatcctgtagc

SEQ ID NO: 283457 - DNA, 1771 bp, Homo sapiens
agcggattggcgggtccgccgcccgccccgccgcggtcgaggatcctggaggtttgtccccgccgccccgacgcttccgcccggtccgtcggcacgtcggccctgcctcccggaccaccctgcggggcgcaccagcgatctggggtgcggggctcggcctccctgcgctcctggctgacggtgtgaccttgggtcttaaccatgaacttctctggaggagggaggcaggaagcagcagggtccaggggtagaagggctcccagaccccgagaacaggaccgagacgtgcagctgtccaaggctctgtcctatgccctgcgccatggggccttgaagctggggcttcccatgggagctggtaagtaggggccttggaggctggggcttgagcccagagagaaacgtgagcctgtctgcgactcctccctgatggctgcctccaccgctccctgaggaaggcacagagtgcacttcctccccatgcacagaggagagcaaggcctagagcccctgtcatgtccacagcagactgaggagagttcttgtctgggccaggcctggtgaccgccccctccagccaagcagccagatcagcacttaccccgagggcgagccctggagggtacggtgcagctggtggtgtgagtgtgcactccgggccagcgctatgctgggcactcacctccctgcccctccgtgaggcagatcctctttttatgtaagttgaaaaaactgcggcccagaaaggggagactttctaaaggtcccacagaggatgcccaagcgatctccaagcccagactttgtttcggttgcctgtggctccctgttaaccctggcccagtccagagcaaggttagctcctgagcaccctgcctgcccacagatggcttcgtgcccctgggcaccctcctgcagttgccccagttccgcggcttctctgctgaagatgtgcagcgcgtggtggacaccaataggaagcagcggttcgccctgcagctgggggatcccagcactggccttctcatccgggccaaccagggccattccctgcaggtacctaagttggagctgatgcccctggagacaccgcaggccctgcccccgatgctagtccatggtacattctggaagcactggccatccatcctactcaaaggcctgtcctgccagggaaggacgcacattcacctggccccaggactgcctggagaccccggtatcatcagtggtcagtgccctcccctccacctagctactcccacccactctgtcctcccaggtccccttcaaaggttacaacacttgtctggggccaccccatgtccggcatggagcagcacccctgcatcccccagcccaggaccccagtctgcctaggttgctgactgcactccaggtgcccaggcctcagctccagctgtctctgcaggcatgcggtcccattgtgaaatagctgtgttcatcgatggacccctggctctggcagatggaatacccttcttccgctctgccaatggggtgattctgactccagggaatactgatggcttcctccttcccaagtacttcaaggaggccctgcagctacgccctacccgaaagcccctttccttggctggtgatgaagagacagagtgtcagagtagccccaagcacagctccagagaaaggaggaggatccaacaataaaatattaatttataaaaaagaaattttaaaaagtaacaagaaagaactcgtttgaaaccatgtttcatcatcctgtagc

SEQ ID NO: 283458 - DNA, 1658 bp, Homo sapiens
agcggattggcgggtccgccgcccgccccgccgcggtcgaggatcctggaggtttgtccccgccgccccgacgcttccgcccggtccgtcggcacgtcggccctgcctcccggaccaccctgcggggcgcaccagcgatctggggtgcggggctcggcctccctgcgctcctggctgacggtgtgaccttgggtcttaaccatgaacttctctggaggagggaggcaggaagcagcagggtccaggggtagaagggctcccagaccccgagaacaggaccgagacgtgcagctgtccaaggctctgtcctatgccctgcgccatggggccttgaagctggggcttcccatgggagctggtaagtaggggccttggaggctggggcttgagcccagagagaaacgtgagcctgtctgcgactcctccctgatggctgcctccaccgctccctgaggaaggcacagagtgcacttcctccccatgcacagaggagagcaaggcctagagcccctgtcatgtccacagcagactgaggagagttcttgtctgggccaggcctggtgaccgccccctccagccaagcagccagatcagcacttaccccgagggcgagccctggagggtacggtgcagctggtggtgtgagtgtgcactccgggccagcgctatgctgggcactcacctccctgcccctccgtgaggcagatcctctttttatgtaagttgaaaaaactgcggcccagaaaggggagactttctaaaggtcccacagaggatgcccaagcgatctccaagcccagactttgtttcggttgcctgtggctccctgttaaccctggcccagtccagagcaaggttagctcctgagcaccctgcctgcccacagatggcttcgtgcccctgggcaccctcctgcagttgccccagttccgcggcttctctgctgaagatgtgcagcgcgtggtggacaccaataggaagcagcggttcgccctgcagctgggggatcccagcactggccttctcatccgggccaaccagggccattccctgcaggtacctaagttggagctgatgcccctggagacaccgcaggccctgcccccgatgctagtccatggtacattctggaagcactggccatccatcctactcaaaggcctgtcctgccagggaaggacgcacattcacctggccccaggactgcctggagaccccggtatcatcagtggcatgcggtcccattgtgaaatagctgtgttcatcgatggacccctggctctggcagatggaatacccttcttccgctctgccaatggggtgattctgactccagggaatactgatggcttcctccttcccaagtacttcaaggaggccctgcagctacgccctacccgtgagaaccaccaccccagcccctattccttgttcctgaaagctgtgcccttctgccctcacctctctcctagcttccaaccctagactgacttaggtgtccctttctctaaccaactcttgtctttatcaggaaagcccctttccttggctggtgatgaagagacagagtgtcagagtagccccaagcacagctccagagaaaggaggaggatccaacaataaaatattaatttataaaaaagaaattttaaaaagta

SEQ ID NO: 283459 - DNA, 1731 bp, Homo sapiens
agcggattggcgggtccgccgcccgccccgccgcggtcgaggatcctggaggtttgtccccgccgccccgacgcttccgcccggtccgtcggcacgtcggccctgcctcccggaccaccctgcggggcgcaccagcgatctggggtgcggggctcggcctccctgcgctcctggctgacggtgtgaccttgggtcttaaccatgaacttctctggaggagggaggcaggaagcagcagggtccaggggtagaagggctcccagaccccgagaacaggaccgagacgtgcagctgtccaaggctctgtcctatgccctgcgccatggggccttgaagctggggcttcccatgggagctggtaagtaggggccttggaggctggggcttgagcccagagagaaacgtgagcctgtctgcgactcctccctgatggctgcctccaccgctccctgaggaaggcacagagtgcacttcctccccatgcacagaggagagcaaggcctagagcccctgtcatgtccacagcagactgaggagagttcttgtctgggccaggcctggtgaccgccccctccagccaagcagccagatcagcacttaccccgagggcgagccctggagggtacggtgcagctggtggtgtgagtgtgcactccgggccagcgctatgctgggcactcacctccctgcccctccgtgaggcagatcctctttttatgtaagttgaaaaaactgcggcccagaaaggggagactttctaaaggtcccacagaggatgcccaagcgatctccaagcccagactttgtttcggttgcctgtggctccctgttaaccctggcccagtccagagcaaggttagctcctgagcaccctgcctgcccacagatggcttcgtgcccctgggcaccctcctgcagttgccccagttccgcggcttctctgctgaagatgtgcagcgcgtggtggacaccaataggaagcagcggttcgccctgcagctgggggatcccagcactggccttctcatccgggccaaccagggccattccctgcaggtacctaagttggagctgatgcccctggagacaccgcaggccctgcccccgatgctagtccatggtacattctggaagcactggccatccatcctactcaaaggcctgtcctgccagggaaggacgcacattcacctggccccaggactgcctggagaccccggtatcatcagtggcatgcggtcccattgtgaaatagctgtgttcatcgatggacccctggctctggcaggtgagtctggacaaagcaggagctgcccttgccttcggggagggcatgagtcacatctctggctctgtcagcaatggaatacccttcttccgctctgccaatggggtgattctgactccagggaatactgatggcttcctccttcccaagtacttcaaggaggccctgcagctacgccctacccgtgagaaccaccaccccagcccctattccttgttcctgaaagctgtgcccttctgccctcacctctctcctagcttccaaccctagactgacttaggtgtccctttctctaaccaactcttgtctttatcaggaaagcccctttccttggctggtgatgaagagacagagtgtcagagtagccccaagcacagctccagagaaaggaggaggatccaacaataaaatattaatttataaaaaagaaattttaaaaagta

SEQ ID NO: 283460 - DNA, 1522 bp, Homo sapiens
agcggattggcgggtccgccgcccgccccgccgcggtcgaggatcctggaggtttgtccccgccgccccgacgcttccgcccggtccgtcggcacgtcggccctgcctcccggaccaccctgcggggcgcaccagcgatctggggtgcggggctcggcctccctgcgctcctggctgacggtgtgaccttgggtcttaaccatgaacttctctggaggagggaggcaggaagcagcagggtccaggggtagaagggctcccagaccccgagaacaggaccgagacgtgcagctgtccaaggctctgtcctatgccctgcgccatggggccttgaagctggggcttcccatgggagctggtaagtaggggccttggaggctggggcttgagcccagagagaaacgtgagcctgtctgcgactcctccctgatggctgcctccaccgctccctgaggaaggcacagagtgcacttcctccccatgcacagaggagagcaaggcctagagcccctgtcatgtccacagcagactgaggagagttcttgtctgggccaggcctggtgaccgccccctccagccaagcagccagatcagcacttaccccgagggcgagccctggagggtacggtgcagctggtggtgtgagtgtgcactccgggccagcgctatgctgggcactcacctccctgcccctccgtgaggcagatcctctttttatgtaagttgaaaaaactgcggcccagaaaggggagactttctaaaggtcccacagaggatgcccaagcgatctccaagcccagactttgtttcggttgcctgtggctccctgttaaccctggcccagtccagagcaaggttagctcctgagcaccctgcctgcccacagatggcttcgtgcccctgggcaccctcctgcagttgccccagttccgcggcttctctgctgaagatgtgcagcgcgtggtggacaccaataggaagcagcggttcgccctgcagctgggggatcccagcactggccttctcatccgggccaaccagggccattccctgcaggtacctaagttggagctgatgcccctggagacaccgcaggccctgcccccgatgctagtccatggtacattctggaagcactggccatccatcctactcaaaggcctgtcctgccagggaaggacgcacattcacctggccccaggactgcctggagaccccggtatcatcagtggcatgcggtcccattgtgaaatagctgtgttcatcgatggacccctggctctggcagggaatactgatggcttcctccttcccaagtacttcaaggaggccctgcagctacgccctacccgaaagcccctttccttggctggtgatgaagagacagagtgtcagagtagccccaagcacagctccagagaaaggaggaggatccaacaataaaatattaatttataaaaaagaaattttaaaaagtaacaagaaagaactcgtttgaaaccatgtttcatcatcctgtagc

SEQ ID NO: 283461 - DNA, 1258 bp, Homo sapiens
agcggattggcgggtccgccgcccgccccgccgcggtcgaggatcctggaggtttgtccccgccgccccgacgcttccgcccggtccgtcggcacgtcggccctgcctcccggaccaccctgcggggcgcaccagcgatctggggtgcggggctcggcctccctgcgctcctggctgacggtgtgaccttgggtcttaaccatgaacttctctggaggagggaggcaggaagcagcagggtccaggggtagaagggctcccagaccccgagaacaggaccgagacgtgcagctgtccaaggctctgtcctatgccctgcgccatggggccttgaagctggggcttcccatgggagctggtaagtaggggccttggaggctggggcttgagcccagagagaaacgtgagcctgtctgcgactcctccctgatggctgcctccaccgctccctgaggaaggcacagagtgcacttcctccccatgcacagaggagagcaaggcctagagcccctgtcatgtccacagcagactgaggagagttcttgtctgggccaggcctggtgaccgccccctccagccaagcagccagatcagcacttaccccgagggcgagccctggagggtacggtgcagctggtggtgtgagtgtgcactccgggccagcgctatgctgggcactcacctccctgcccctccgtgaggcagatcctctttttatgtaagttgaaaaaactgcggcccagaaaggggagactttctaaaggtcccacagaggatgcccaagcgatctccaagcccagactttgtttcggttgcctgtggctccctgttaaccctggcccagtccagagcaaggttagctcctgagcaccctgcctgcccacagatggcttcgtgcccctgggcaccctcctgcagttgccccagttccgcggcttctctgctgaagatgtgcagcgcgtggtggacaccaataggaagcagcggttcgccctgcagctgggggatcccagcactggccttctcatccgggccaaccagggccattccctgcaggtacctaagttggagctgatgcccctggagacaccgcaggccctgcccccgatgctagtccatggtacattctggaagcactggccatccatcctactcaaaggcctgtcctgccagggaaggacgcacattcacctggccccaggactgcctggagaccccggtatcatcagtgccaggcagggatcctcaagggtctaca

SEQ ID NO: 283462 - DNA, 1014 bp, Homo sapiens
agcggattggcgggtccgccgcccgccccgccgcggtcgaggatcctggaggtttgtccccgccgccccgacgcttccgcccggtccgtcggcacgtcggccctgcctcccggaccaccctgcggggcgcaccagcgatctggggtgcggggctcggcctccctgcgctcctggctgacggtgtgaccttgggaccgagacgtgcagctgtccaaggctctgtcctatgccctgcgccatggggccttgaagctggggcttcccatgggagctggtaagtaggggccttggaggctggggcttgagcccagagagaaacgtgagcctgtctgcgactcctccctgatggctgcctccaccgctccctgaggaaggcacagagtgcacttcctccccatgcacagaggagagcaaggcctagagcccctgtcatgtccacagcagactgaggagagttcttgtctgggccaggcctggtgaccgccccctccagccaagcagccagatcagcacttaccccgagggcgagccctggagggtacggtgcagctggtggtgtgagtgtgcactccgggccagcgctatgctgggcactcacctccctgcccctccgtgaggcagatcctctttttatgtaagttgaaaaaactgcggcccagaaaggggagactttctaaaggtcccacagaggatgcccaagcgatctccaagcccagactttgtttcggttgcctgtggctccctgttaaccctggcccagtccagagcaaggttagctcctgagcaccctgcctgcccacagatggcttcgtgcccctgggcaccctcctgcagttgccccagttccgcggcttctctgctgaagatgtgcagcgcgtggtggacaccaataggaagcagcggttcgccctgcagctgggggatcccagcactggccttctcatccgggccaaccagggccattccctgcaggtcggggtgaggggacaagtgcgagacgagatgggagggacc

SEQ ID NO: 283463 - DNA, 998 bp, Homo sapiens
agcggattggcgggtccgccgcccgccccgccgcggtcgaggatcctggaggtttgtccccgccgccccgacgcttccgcccggtccgtcggcacgtcggccctgcctcccggaccaccctgcggggcgcaccagcgatctggggtgcggggctcggcctccctgcgctcctggctgacggtgtgaccttgggtcttaaccatgaacttctctggaggagggaggcaggaagcagcagggtccaggggtagaagggctcccagaccccgagaacaggaccgagacgtgcagctgtccaaggctctgtcctatgccctgcgccatggggccttgaagctggggcttcccatgggagctgatggcttcgtgcccctgggcaccctcctgcagttgccccagttccgcggcttctctgctgaagatgtgcagcgcgtggtggacaccaataggaagcagcggttcgccctgcagctgggggatcccagcactggccttctcatccgggccaaccagggccattccctgcaggtacctaagttggagctgatgcccctggagacaccgcaggccctgcccccgatgctagtccatggtacattctggaagcactggccatccatcctactcaaaggcctgtcctgccagggaaggacgcacattcacctggccccaggactgcctggagaccccggtatcatcagtggcatgcggtcccattgtgaaatagctgtgttcatcgatggacccctggctctggcagatggaatacccttcttccgctctgccaatggggtgattctgactccagggaatactgatggcttcctccttcccaagtacttcaaggaggccctgcagctacgccctacccgaaagcccctttccttggctggtgatgaagagacagagtgtcagagtagccccaagcacagctccagagaaaggaggaggatccaacaataaaatattaatttataaaaaagaaattttaaaaagta

SEQ ID NO: 283464 - DNA, 2391 bp, Homo sapiens
cccacccccagtgggtccgccagataggcctgcgtgtcaccccagtcggtggcaccctgctgtcgcagccaggcagctgagctggaccagttggtgcccaggaagtctcggtaggaagtaaggcccaggcgcaggagcagctgtggcccccgagagccaataggcgccagggtggctgagtgcaggcggaacttgggggcgtcgaagagccagggttgggcctttagccgggtctcccagatggcagtgatggcctcgtccccacctggcagtgggcgacggtcatgggcggggctcagctcggcctgtatctgctcctggggcaggcccccgccagggcactgcagcagcaaggtcacctcaggatccatggtctgaaccagccgccgggtccctcaggctccgccccttccccgaagcggaagtgcccgccccctttccacgcggcttttcattggcgggtccgccgcggtcgaggatcctggaggtttgtccccgccgccccgacgcttccgcccggtccgtcggcacgtcggccctgcctcccggaccaccctgcggggcgcaccagcgatctggggtgcggggctcggcctccctgcgctcctggctgacggtgtgaccttgggcaagtctggcctgctgggccttagtttccctctctgcagcagggacttgggggtggtgaacttaatgagccgtatactcccacccagcgctcacttcctgaggctttgtgactttctgggagggatggggacgtggaaggggccttaaagcagtcccccctcgtcactgccccccacaggtcttaaccatgaacttctctggaggagggaggcaggaagcagcagggtccaggggtagaagggctcccagaccccgagaacaggtgcgcgcctcctccccaccccctcccaccagtccaggctccctgggagttgctggggggcggagctgaagggtcctactattcctggagaccactggcactcctttctctctgggctctctctgcagtgggtcattgagggttcaggatgggcagtagggcagggtcaccatggagactaggggccaccgctgggttctttcaggaccgagacgtgcagctgtccaaggctctgtcctatgccctgcgccatggggccttgaagctggggcttcccatgggagctggtaagtaggggccttggaggctggggcttgagcccagagagaaacgtgagcctgtctgcgactcctccctgatggctgcctccaccgctccctgaggaaggcacagagtgcacttcctccccatgcacagaggagagcaaggcctagagcccctgtcatgtccacagcagactgaggagagttcttgtctgggccaggcctggtgaccgccccctccagccaagcagccagatcagcacttaccccgagggcgagccctggagggtacggtgcagctggtggtgtgagtgtgcactccgggccagcgctatgctgggcactcacctccctgcccctccgtgaggcagatcctctttttatgtaagttgaaaaaactgcggcccagaaaggggagactttctaaaggtcccacagaggatgcccaagcgatctccaagcccagactttgtttcggttgcctgtggctccctgttaaccctggcccagtccagagcaaggttagctcctgagcaccctgcctgcccacagatggcttcgtgcccctgggcaccctcctgcagttgccccagttccgcggcttctctgctgaagatgtgcagcgcgtggtggacaccaataggaagcagcggttcgccctgcagctgggggatcccagcactggccttctcatccgggccaaccagggccattccctgcaggtacctaagttggagctgatgcccctggagacaccgcaggccctgcccccgatgctagtccatggtacattctggaagcactggccatccatcctactcaaaggcctgtcctgccagggaaggacgcacattcacctggccccaggactgcctggagaccccggtatcatcagtggcatgcggtcccattgtgaaatagctgtgttcatcgatggacccctggctctggcagatggaatacccttcttccgctctgccaatggggtgattctgactccagggaatactgatggcttcctccttcccaagtacttcaaggaggccctgcagctacgccctacccgaaagcccctttccttggctggtgatgaagagacagagtgtcagagtagccccaagcacagctccagagaaaggaggaggatccaacaataaaatattaatttataaaaaagaaattttaaaaagtaacaagaaagaactcgtttgaaaccatgtttcatcatcctgtagc

SEQ ID NO: 283465 - DNA, 1230 bp, Homo sapiens
cccacccccagtgggtccgccagataggcctgcgtgtcaccccagtcggtggcaccctgctgtcgcagccaggcagctgagctggaccagttggtgcccaggaagtctcggtaggaagtaaggcccaggcgcaggagcagctgtggcccccgagagccaataggcgccagggtggctgagtgcaggcggaacttgggggcgtcgaagagccagggttgggcctttagccgggtctcccagatggcagtgatggcctcgtccccacctggcagtgggcgacggtcatgggcggggctcagctcggcctgtatctgctcctggggcaggcccccgccagggcactgcagcagcaaggtcacctcaggatccatggtctgaacgtcttaaccatgaacttctctggaggagggaggcaggaagcagcagggtccaggggtagaagggctcccagaccccgagaacaggaccgagacgtgcagctgtccaaggctctgtcctatgccctgcgccatggggccttgaagctggggcttcccatgggagctgatggcttcgtgcccctgggcaccctcctgcagttgccccagttccgcggcttctctgctgaagatgtgcagcgcgtggtggacaccaataggaagcagcggttcgccctgcagctgggggatcccagcactggccttctcatccgggccaaccagggccattccctgcaggtacctaagttggagctgatgcccctggagacaccgcaggccctgcccccgatgctagtccatggtacattctggaagcactggccatccatcctactcaaaggcctgtcctgccagggaaggacgcacattcacctggccccaggactgcctggagaccccggtatcatcagtggcatgcggtcccattgtgaaatagctgtgttcatcgatggacccctggctctggcagatggaatacccttcttccgctctgccaatggggtgattctgactccagggaatactgatggcttcctccttcccaagtacttcaaggaggccctgcagctacgccctacccgaaagcccctttccttggctggtgatgaagagacagagtgtcagagtagccccaagcacagctccagagaaaggaggaggatccaacaataaaatattaatttataaaaaagaaattttaaaaagtaacaagaaagaactcgtttgaaaccatgtttcatcatcctgtagc

SEQ ID NO: 283466 - DNA, 1693 bp, Homo sapiens
cccacccccagtgggtccgccagataggcctgcgtgtcaccccagtcggtggcaccctgctgtcgcagccaggcagctgagctggaccagttggtgcccaggaagtctcggtaggaagtaaggcccaggcgcaggagcagctgtggcccccgagagccaataggcgccagggtggctgagtgcaggcggaacttgggggcgtcgaagagccagggttgggcctttagccgggtctcccagatggcagtgatggcctcgtccccacctggcagtgggcgacggtcatgggcggggctcagctcggcctgtatctgctcctggggcaggcccccgccagggcactgcagcagcaaggtcacctcaggatccatggtctgaaccagccgccgggtccctcaggctccgccccttccccgaagcggaagtgcccgccccctttccacgcggcttttcattggcgggtccgccgcggtcgaggatcctggaggtttgtccccgccgccccgacgcttccgcccggtccgtcggcacgtcggccctgcctcccggaccaccctgcggggcgcaccagcgatctggggtgcggggctcggcctccctgcgctcctggctgacggtgtgaccttgggcaagtctggcctgctgggccttagtttccctctctgcagcagggacttgggggtggtgaacttaatgagccgtatactcccacccagcgctcacttcctgaggctttgtgactttctgggagggatggggacgtggaaggggccttaaagcagtcccccctcgtcactgccccccacaggtcttaaccatgaacttctctggaggagggaggcaggaagcagcagggtccaggggtagaagggctcccagaccccgagaacaggtgcgcgcctcctccccaccccctcccaccagtccaggctccctgggagttgctggggggcggagctgaagggtcctactattcctggagaccactggcactcctttctctctgggctctctctgcagtgggtcattgagggttcaggatgggcagtagggcagggtcaccatggagactaggggccaccgctgggttctttcaggaccgagacgtgcagctgtccaaggctctgtcctatgccctgcgccatggggccttgaagctggggcttcccatgggagctggtacctaagttggagctgatgcccctggagacaccgcaggccctgcccccgatgctagtccatggtacattctggaagcactggccatccatcctactcaaaggcctgtcctgccagggaaggacgcacattcacctggccccaggactgcctggagaccccggtatcatcagtggcatgcggtcccattgtgaaatagctgtgttcatcgatggacccctggctctggcagatggaatacccttcttccgctctgccaatggggtgattctgactccagggaatactgatggcttcctccttcccaagtacttcaaggaggccctgcagctacgccctacccgaaagcccctttccttggctggtgatgaagagacagagtgtcagagtagccccaagcacagctccagagaaaggaggaggatccaacaataaaatattaatttataaaaaagaaattttaaaaagtaacaagaaagaactcgtttgaaaccatgtttcatcatcctgtagc

SEQ ID NO: 283467 - DNA, 1702 bp, Homo sapiens
agcggattggcgggtccgccgcccgccccgccgcggtcgaggatcctggaggtttgtccccgccgccccgacgcttccgcccggtccgtcggcacgtcggccctgcctcccggaccaccctgcggggcgcaccagcgatctggggtgcggggctcggcctccctgcgctcctggctgacggtgtgaccttgggtcttaaccatgaacttctctggaggagggaggcaggaagcagcagggtccaggggtagaagggctcccagaccccgagaacaggaccgagacgtgcagctgtccaaggctctgtcctatgccctgcgccatggggccttgaagctggggcttcccatgggagctggtaagtaggggccttggaggctggggcttgagcccagagagaaacgtgagcctgtctgcgactcctccctgatggctgcctccaccgctccctgaggaaggcacagagtgcacttcctccccatgcacagaggagagcaaggcctagagcccctgtcatgtccacagcagactgaggagagttcttgtctgggccaggcctggtgaccgccccctccagccaagcagccagatcagcacttaccccgagggcgagccctggagggtacggtgcagctggtggtgtgagtgtgcactccgggccagcgctatgctgggcactcacctccctgcccctccgtgaggcagatcctctttttatgtaagttgaaaaaactgcggcccagaaaggggagactttctaaaggtcccacagaggatgcccaagcgatctccaagcccagactttgtttcggttgcctgtggctccctgttaaccctggcccagtccagagcaaggttagctcctgagcaccctgcctgcccacagatggcttcgtgcccctgggcaccctcctgcagttgccccagttccgcggcttctctgctgaagatgtgcagcgcgtggtggacaccaataggaagcagcggttcgccctgcagctgggggatcccagcactggccttctcatccgggccaaccagggccattccctgcaggtacctaagttggagctgatgcccctggagacaccgcaggccctgcccccgatgctagtccatggtacattctggaagcactggccatccatcctactcaaaggcctgtcctgccagggaaggacgcacattcacctggccccaggactgcctggagaccccggtatcatcagtggcatgcggtcccattgtgaaatagctgtgttcatcgatggacccctggctctggcagatggaatacccttcttccgctctgccaatggggtgattctgactccagggaatactgatggcttcctccttcccaagtacttcaaggaggccctgcagctacgccctacccgtgagaaccaccaccccagcccctattccttgttcctgaaagctgtgcccttctgccctcacctctctcctagcttccaaccctagactgacttaggtgtccctttctctaaccaactcttgtctttatcaggaaagcccctttccttggctggtgatgaagagacagagtgtcagagtagccccaagcacagctccagagaaaggaggaggatccaacaataaaatattaatttataaaaaagaaattttaaaaagtaacaagaaagaactcgtttgaaaccatgtttcatcatcctgtagc

SEQ ID NO: 283468 - DNA, 1599 bp, Homo sapiens
agcggattggcgggtccgccgcccgccccgccgcggtcgaggatcctggaggtttgtccccgccgccccgacgcttccgcccggtccgtcggcacgtcggccctgcctcccggaccaccctgcggggcgcaccagcgatctggggtgcggggctcggcctccctgcgctcctggctgacggtgtgaccttgggtcttaaccatgaacttctctggaggagggaggcaggaagcagcagggtccaggggtagaagggctcccagaccccgagaacaggaccgagacgtgcagctgtccaaggctctgtcctatgccctgcgccatggggccttgaagctggggcttcccatgggagctggtaagtaggggccttggaggctggggcttgagcccagagagaaacgtgagcctgtctgcgactcctccctgatggctgcctccaccgctccctgaggaaggcacagagtgcacttcctccccatgcacagaggagagcaaggcctagagcccctgtcatgtccacagcagactgaggagagttcttgtctgggccaggcctggtgaccgccccctccagccaagcagccagatcagcacttaccccgagggcgagccctggagggtacggtgcagctggtggtgtgagtgtgcactccgggccagcgctatgctgggcactcacctccctgcccctccgtgaggcagatcctctttttatgtaagttgaaaaaactgcggcccagaaaggggagactttctaaaggtcccacagaggatgcccaagcgatctccaagcccagactttgtttcggttgcctgtggctccctgttaaccctggcccagtccagagcaaggttagctcctgagcaccctgcctgcccacagatggcttcgtgcccctgggcaccctcctgcagttgccccagttccgcggcttctctgctgaagatgtgcagcgcgtggtggacaccaataggaagcagcggttcgccctgcagctgggggatcccagcactggccttctcatccgggccaaccagggccattccctgcaggtacctaagttggagctgatgcccctggagacaccgcaggccctgcccccgatgctagtccatggtacattctggaagcactggccatccatcctactcaaaggcctgtcctgccagggaaggacgcacattcacctggccccaggactgcctggagaccccggtatcatcagtggcatgcggtcccattgtgaaatagctgtgttcatcgatggacccctggctctggcaggtgagtctggacaaagcaggagctgcccttgccttcggggagggcatgagtcacatctctggctctgtcagcaatggaatacccttcttccgctctgccaatggggtgattctgactccagggaatactgatggcttcctccttcccaagtacttcaaggaggccctgcagctacgccctacccgaaagcccctttccttggctggtgatgaagagacagagtgtcagagtagccccaagcacagctccagagaaaggaggaggatccaacaataaaatattaatttataaaaaagaaattttaaaaagta

SEQ ID NO: 283469 - DNA, 1565 bp, Homo sapiens
agcggattggcgggtccgccgcccgccccgccgcggtcgaggatcctggaggtttgtccccgccgccccgacgcttccgcccggtccgtcggcacgtcggccctgcctcccggaccaccctgcggggcgcaccagcgatctggggtgcggggctcggcctccctgcgctcctggctgacggtgtgaccttgggtcttaaccatgaacttctctggaggagggaggcaggaagcagcagggtccaggggtagaagggctcccagaccccgagaacaggaccgagacgtgcagctgtccaaggctctgtcctatgccctgcgccatggggccttgaagctggggcttcccatgggagctggtaagtaggggccttggaggctggggcttgagcccagagagaaacgtgagcctgtctgcgactcctccctgatggctgcctccaccgctccctgaggaaggcacagagtgcacttcctccccatgcacagaggagagcaaggcctagagcccctgtcatgtccacagcagactgaggagagttcttgtctgggccaggcctggtgaccgccccctccagccaagcagccagatcagcacttaccccgagggcgagccctggagggtacggtgcagctggtggtgtgagtgtgcactccgggccagcgctatgctgggcactcacctccctgcccctccgtgaggcagatcctctttttatgtaagttgaaaaaactgcggcccagaaaggggagactttctaaaggtcccacagaggatgcccaagcgatctccaagcccagactttgtttcggttgcctgtggctccctgttaaccctggcccagtccagagcaaggttagctcctgagcaccctgcctgcccacagatggcttcgtgcccctgggcaccctcctgcagttgccccagttccgcggcttctctgctgaagatgtgcagcgcgtggtggacaccaataggaagcagcggttcgccctgcagctgggggatcccagcactggccttctcatccgggccaaccagggccattccctgcaggtacctaagttggagctgatgcccctggagacaccgcaggccctgcccccgatgctagtccatggtccccttcaaaggttacaacacttgtctggggccaccccatgtccggcatggagcagcacccctgcatcccccagcccaggaccccagtctgcctaggttgctgactgcactccaggtgcccaggcctcagctccagctgtctctgcaggcatgcggtcccattgtgaaatagctgtgttcatcgatggacccctggctctggcagatggaatacccttcttccgctctgccaatggggtgattctgactccagggaatactgatggcttcctccttcccaagtacttcaaggaggccctgcagctacgccctacccgaaagcccctttccttggctggtgatgaagagacagagtgtcagagtagccccaagcacagctccagagaaaggaggaggatccaacaataaaatattaatttataaaaaagaaattttaaaaagta

SEQ ID NO: 283470 - DNA, 715 bp, Homo sapiens
agcggattggcgggtccgccgcccgccccgccgcggtcgaggatcctggaggtttgtccccgccgccccgacgcttccgcccggtccgtcggcacgtcggccctgcctcccggaccaccctgcggggcgcaccagcgatctggggtgcggggctcggcctccctgcgctcctggctgacggtgtgaccttgggaccgagacgtgcagctgtccaaggctctgtcctatgccctgcgccatggggccttgaagctggggcttcccatgggagctggtccccttcaaaggttacaacacttgtctggggccaccccatgtccggcatggagcagcacccctgcatcccccagcccaggaccccagtctgcctaggttgctgactgcactccaggtgcccaggcctcagctccagctgtctctgcaggcatgcggtcccattgtgaaatagctgtgttcatcgatggacccctggctctggcagggaatactgatggcttcctccttcccaagtacttcaaggaggccctgcagctacgccctacccgaaagcccctttccttggctggtgatgaagagacagagtgtcagagtagccccaagcacagctccagagaaaggaggaggatccaacaataaaatattaatttataaaaaagaaattttaaaaagtaacaagaaagaactcgtttgaaaccatgtttcatcatcctgtagc

SEQ ID NO: 283471 - DNA, 341 bp, Homo sapiens
gaagctcagagctagattcacggctccagcttctgttagattccccgtgcccaccatggggctggaatcctgtaggtgctcaattattgtgtgttgactgagtgagcaggagggaggggctcaggcccagctcacccaccctcgccccagacctctcaccgtgacgctggagtcatccatggccttgacaaaggtgtggagagggactgttgtgccaggattgcactggtgaccccggatctgctggggaagacgcatggtcagctgggcctctgtgcacctgttggctgctacctagtcccatagaccatggcctctgactgaacctcccagcccaacag

SEQ ID NO: 283472 - DNA, 1030 bp, Homo sapiens
ggccgcacaagcgccggaccgggtaccgctgtgcccggcctggccgcggcctagtcccggcagacgggactgacgaggtcaccaagcccaggccgagacggcgcgggtgtcagggacttgggaatccccctcccccagtcccgatcccgctttcctttggggtttcacctcagaggacccgacagcactcttgcagaacagccgtctgcctgtcttcctggctcgctccctgcaggaatggtctggggcaaccccagcaacacgcccacctgtggccaggatgaataggaatccagttcaggcttggcttccatggcaatcaaggcccaccaggccccagcaaccttccctaccccccattcctttttgctgcccccctccacaccaggcatgttccctgccacaccatgctgttcccctcacctgggctgccctcccaactcctctctgcctctggagatgctctgccattcaagacttggctcaggctccaggtcctccctgggccttctagagcccctggttctcactcctctgaacacttccagcctggctaatagcccactgcatcctggcctggggtacaggtggccagcacaggtgtgggggccagcttccaacacaagcacgggtaggtccctctgcagaccatgggctgcaagaggcccggccttgcccactgcaggggccctgcgcagggctgggcacgaagcaggtgggtgtccaccaatctagtatccaaaaccctgcttggttcacccccacctctgttgaaggaaagcaacactgtgatggagaggagcagctgtggattcaaatcctggcttggccactttctagttgtgtgacttggtgcatctgccctcatctcctcagagacaaaaatggcaacacctcccttcttgggttactatgaggattaaataacaaaacctccaagaagcagagcccggtgtctggagagtgctcaatggacgtagttattattatcatcatcagcacagtgcggggcacatggtgggcattcagg

SEQ ID NO: 283473 - DNA, 1127 bp, Homo sapiens
ggccgcacaagcgccggaccgggtaccgctgtgcccggcctggccgcggcctagtcccggcagacgggactgacgaggtcaccaagcccaggccgagacggcgcgggtgtcagggacttgggaatccccctcccccagtcccgatcccgctttcctttggggtttcacctcagaggacccgacagcactcttgcagtttcctcatcctcaagatggactgcaccttctggcatctcaagtggttcttgtgaagattaaatgaatccatcaggccgggtgcggtggctcacgcctgtaatcccagcactttgggaggccgagacgagcgcatcacctgaggtcaggagttccagaccagcctggccaacaaggtgaaaccccatctctactaaaaatacaaaaagttagccaggtgtggtggctcatgcttgtagtcccagctacgtgggaggctgaggcaggcgaatcacttgaacccaggaggcggaggttgcagtgagccaagattgtgccattgcactccagcctgggggatagagtgagactccatctcaaaaaaaataaataaataaataaataaatggatcaatcagtttaaaaacttagaacagtgcgtggcaaatagtgctcaagaagagtaggcttgtgaaacattcacatgcattgttttaacaaacaatgcttccccagacctccccacagagttgacgctctggaaagaaaagccaggcttttctctgaggttttgcatctccttggccaatgtgctcatgccagagaagagcagtgcatggccagtttgaggagcacggccatgtgaccttggacagcccctgcctctctctaggactcactcccggtccctaacctcagctctctgatctgtaccacaaggagctgccactaacacctgtgtcagaactactgtaaggaccctttcctcctgcgagaggagaacagtgctaaacctgtctgaacgtgatagacatgctacaaactgccaaccctttaggctataaactgctcacacatgggccaagtgtcactctcataagaaggtgtgattttttttaagctgccagcagccttgaagccacctgggactgcacagtatgtctgtgtgtgcc

SEQ ID NO: 283474 - DNA, 963 bp, Homo sapiens
ttgtcgagtaacttaacctctctccatctcagtttcctcatcctcaagatggactgcaccttctggcatctcaagtggttcttgtgaagattaaatgaatccatcaggccgggtgcggtggctcacgcctgtaatcccagcactttgggaggccgagacgagcgcatcacctgaggtcaggagttccagaccagcctggccaacaaggtgaaaccccatctctactaaaaatacaaaaagttagccaggtgtggtggctcatgcttgtagtcccagctacgtgggaggctgaggcaggcgaatcacttgaacccaggaggcggaggttgcagtgagccaagattgtgccattgcactccagcctgggggatagagtgagactccatctcaaaaaaaataaataaataaataaataaatggatcaatcagtttaaaaacttagaacagtgcgtggcaaatagtgctcaagaagagtaggcttgtgaaacattcacatgcattgttttaacaaacaatgcttccccagacctccccacagagttgacgctctggaaagaaaagccaggcttttctctgaggttttgcatctccttggccaatgtgctcatgccagagaagagcagtgcatggccagtttgaggagcacggccatgtgaccttggacagcccctgcctctctctaggactcactcccggtccctaacctcagctctctgatctgtaccacaaggagctgccactaacacctgtgtcagaactactgtaaggaccctttcctcctgcgagaggagaacagtgctaaacctgtctgaacgtgatagacatgctacaaactgccaaccctttaggctataaactgctcacacatgggccaagtgtcactctcataagaaggtgtgattttttttaagctgccagcagccttgaagccacctgggactgcacagtatgtctgtgtgtgcc

SEQ ID NO: 283475 - DNA, 808 bp, Homo sapiens
ggccgcacaagcgccggaccgggtaccgctgtgcccggcctggccgcggcctagtcccggcagacgggactgacgaggtcaccaagcccaggccgagacggcgcgggtgtcagggacttgggaatccccctcccccagtcccgatcccgctttcctttggggtttcacctcagaggacccgacagcactcttgcagtttcctcatcctcaagatggactgcaccttctggcatctcaagtggttcttgtgaagattaaatgaatccatcaggccgggtgcggtggctcacgcctgtaatcccagcactttgggaggccgagacgagcgcatcacctgaggtcaggagttccagaccagcctggccaacaagacctccccacagagttgacgctctggaaagaaaagccaggcttttctctgaggttttgcatctccttggccaatgtgctcatgccagagaagagcagtgcatggccagtttgaggagcacggccatgtgaccttggacagcccctgcctctctctaggactcactcccggtccctaacctcagctctctgatctgtaccacaaggagctgccactaacacctgtgtcagaactactgtaaggaccctttcctcctgcgagaggagaacagtgctaaacctgtctgaacgtgatagacatgctacaaactgccaaccctttaggctataaactgctcacacatgggccaagtgtcactctcataagaaggtgtgattttttttaagctgccagcagccttgaagccacctgggactgcacagtatgtctgtgtgtgcc

SEQ ID NO: 283476 - DNA, 4372 bp, Homo sapiens
  misc_feature (1149)..(1149): n is a, c, g, or t
taattgcttgaaggattttttccagacaggtggtctggaaaccttttacctattaccttccatccctgaaccatttcaatcttctgcctcctggatatcttggagaaaatgaaccaacacaacacagctttcagtttttagagcatttcccccatacagaacattgtcttacttgatcttcccgatgacctcaacaacaggaaaggcaggtcctttcatttccatttataagacgcacagacccaggattatctagccacaggaagcaggactccagatttcaagtccagcatctcaacgtgacaaccttggtaactctgcatgaacggactggatagtaaagtggaattattactgagaactgcaatgaataaaatcttttgcattttttgcctacgtttcacagagggtgatatttttctgaggcaattaaatttataccacggccacaatactgaaacgttctgaccaacaaagtcatgctcctgcatctacacagcagataactgcagaaacggcttcctttcttccttgtaaaattgcctgaaaacagctcccccttgctgtccgtcgaggcatatcttcaccaacgttaaaacagagctgagggagatcgcatttctgcctccctcccgccctgcagaggggctccagctgttcagagtaacggattactaggtaggtggttgtttcccctccttcccagggcctctttcctctctttgagattgcctctttcttactcctgagcacaggagccgggcgggttttctgtcccttgccctggacagcactgcctggatggccgctgtccggcagctgctctttgtccacccaaaaagatgtccccacgactcagtagtaaccagacggtccccacggaccactgcggccaaatttccgccatccccgctgtgggaatcaggcttttcccgcagaaaaccccaggaatctagagaaaactccttaagtccctagtctccatagagaaaaccaggagacactccccccaaaccccgctgtgaatacaggcacagcagccactggggctgaaagtgatgagtgcgttcttcccgtcgcaaacatagggtaataaatagcatgcatcaaagacgttactaggaagagatagctctttaagtcacgagnggggagaaatgtttgccccgggaaaatttgcctggggaataaaatttgccagactgctgcacgggtgagctcggtgagaaggaagaaacccggactggaggaggtgaggtcgagagccaggttcaggtgcaggagctagatgcgtggacgccggtgcgtggactggaggtttccaggtaccgcgcttagcgtgcctgttgaagtcaaatgcatggttaaggaggctagcgaggaaggctagtgagggaagcttgtggaaacggctacgagcccagaaaaggcatgactcgtcagttgtccaagtttttggaagggaaaagcgggaaagcgccacgatcccacctactgtgaggaggaatctgcgagtctcccagctccaccccctccacagtgatgcagaggacaaacaccgacgtagggagaggaaaaaataaaactccagggagcggggagtaggcaaccagcagtcttccggcaatagggcgggagggagcgcgtcccaaggaaacaagcaccgcataaatacttgagttgggaacccagtgcttccggaagctcggagctcaccttcccgacctcgccgaagttgaaaaaaggcagagcagggagaggggccagctcaccctgctgagagctgctcagtgggcaggcgggacgctgctccgggagacgcccactggagggatcgcagagcccggcaagctgcgagcgcgccaaagaccctgcgcttcggacgaggagcccaagtcctccgagacggggagggagcggcccgcgagggctggagctccgaagagggccgagtaggagctgcatggacagcatgcgtctctccgccggtcccgacgcggggccctcgggcaactccagcccatggtggcctctggccaccggcgctggcaacacaagccgggaggccgaagccctcggggagggcaacggcccaccgagggacgtgcgcaacgaggagctggccaaactggagatcgccgtgctggcggtgactttcgcggtggccgtgctgggcaacagcagcgtactgctggctctgcaccggacgccgcgcaagacgtcccgcatgcacctcttcatccgacacctcagcctggccgacctggccgtggcattcttccaggtgctgccgcaaatgtgctgggacatcacctaccgcttccgcggccccgactggctgtgccgcgtggtgaagcacctgcaggtgttcggcatgtttgcgtcggcctacatgctggtagtcatgacagccgaccgctacatcgcggtgtgccacccgctcaagactctgcaacagcccgcgcgccgctcgcgcctcatgatcgcggccgcctgggtgctgagcttcgtgctgagcacgccgcagtacttcgtcttctccatgatcgaggtgaacaatgtcaccaaggcccgcgactgctgggccaccttcatccagccctggggttctcgtgcctacgtgacctggatgacgggcggcatctttgtggcgcccgtggtcatcttgggtacctgctacggcttcatctgctacaacatctggtgcaacgtccgcgggaagacggcgtcgcgccagagcaagggtgcagagcaagcgggtgtggccttccaaaaggggttcctgctcgcaccctgtgtcagcagcgtgaagtccatttcccgggccaagatccgcacggtgaagatgacttttgtgatcgtgacggcttacatcgtctgctgggcgcctttcttcatcatccagatgtggtctgtctgggatcccatgtccgtctggaccgaatcggaaaaccctaccatcaccatcactgcattactgggttccttgaatagctgctgtaatccctggatatacatgttttttagtggccatctccttcaagactgtgttcaaagcttcccatgctgccaaaacatgaaggaaaaattcaacaaagaagatactgacagtatgagcagaagacagactttttattctaacaatcgaagcccaacaaacagtacgggtatgtggaaggactcgcctaaatcttccaagtccatcaaattcattcctgtttcaacttgagccttgcattcatgcaacttgattcttgtgattgactttttggctcattagctgaattgagctagaaatcacaagaacaaatacactttattaatataaccataaatcaattcattgtgtatgagactgtgtttctagttgcattttcatattgctaccaaaaactagacattattttgtatggaatattaatggaaacatgctgtactaaaatatgcaggtctgattcccagaaatacaacagaagttatatttttaaaggaaaaatcataaccaccctagctttatattttgttgttagtttcttttattttcatttctaacataagtaagacttgattggtttaaaagtcacataaaatgcggcactatttctgaacaaagagagctcatcatcagtcttaatattcagagaaaacttcagagaaattatgttttcatccattaaaattaatttgtgcatcagaaaatgcagccttaaacagtgtccaggagatgggatggtacctcctaggagtacaagtgcctggggtgtaatgagctcctgctcattgtggccagtttagagttctattagaagctatcaatcaccttgcatttcaaaatggtaactttacaactggcagtggcctccttttggttcctcacatattattggtcaagaaaagcatgaaaactgagatgctgaaggtgagaggaaatgttgactggccaaaaatatcttttttcccccactgcaaggttgttttaaagtcagatttgtataaggaaagccaaattttattaaaagagtagaaaaggattgcttaaggtactctggactttctcttggacattgtaaacgtattttgatcagtgttacaagggtatcctgtgctatgctggacattaacaagatcattatcttcatgtttggggaattcagattcataatatgagtatcctaaagagtgactcaggatataaagtgtcccaacatgtttaattaaaaatagctttgtctttccaatctctcactcatctaacaattgcaaagcagagatgagacagggttgggacatgggtgacagatggaaagagaactgctctgtgcccagactggcttccttcattattaaatccacaactttaggcaagtttctt

SEQ ID NO: 283477 - DNA, 572 bp, Homo sapiens
gctgcagtcgactctacagaattcccgtatccgtatcgtgattggtcatggctgctgattctctctgccagtgcgttgtttgagccaaaggtctcgtgattggaaacaccctgtgggtactggggttacctactccttaacaggaggccctcatcagaatgaccagggcccatctagcttcagtggctagggtcttctctctctgtgacagaagatacccttgtatctgtgtttgtctctgtctctgtctgcctcccctctgcctgcccccaccatctgtctgtctctgtctccctcactgcaggctacgagggctatggctatggctatggctatggccaggataacaccaccaactatgggtatggtatggccacttcacactcttgggaaatgcctagctctgacacaaatgcaaacactagtgcctcgggtagcgccagtgccgattccgttttatccagaattaaccagcgcttagatatggtgccgcatttggagacagacatgatgcaaggaggcgtgtacggctcaggtggagaaaggtgagtggacacctgcctaggggttga

SEQ ID NO: 283478 - DNA, 2121 bp, Homo sapiens
gggctagggtgtgtgtggaggggaccctgtggttagcagcagctatcgcagcgtcggatgttcagagcagcagaagccggcgtcgtcggatgttgtgttgcccgccaccatgagctacacaggctttgtccagggatctgaaaccactttgcagtcgacatactcggataccagcgctcagcccacctgtgattatggatatggaacttggaactctgggacaaatagaggctacgagggctatggctatggctatggctatggccaggataacaccaccaactatgggtatggtatggccacttcacactcttgggaaatgcctagctctgacacaaatgcaaacactagtgcctcgggtagcgccagtgccgattccgttttatccagaattaaccagcgcttagatatggtgccgcatttggagacagacatgatgcaaggaggcgtgtacggctcaggtggagaaaggtatgactcttatgagtcctgcgactcgagggccgtcctgagtgagcgcgacctgtaccggtcaggctatgactacagcgagcttgaccctgagatggaaatggcctatgagggccaatacgatgcctaccgcgaccagttccgcatgcgtggcaacgacaccttcggtcccagggcacagggctgggcccgggatgcccggagcggccggccaatggcctcaggctatgggcgcatgtgggaagaccccatgggggcccggggccagtgcatgtctggtgcctctcggctgcctccctcttctcccagaacatcatccccgagtacggcatgttccagggcatgcgaggtgggggcgccttcccgggcggctcccgctttggtttcgggtttggcaatggcatgaagcagatgaggcggacctggaagacctggaccacagccgacttccgaaccaagaagaagaagagaaagcagggcggcagtcctgatgagccagatagcaaagccacccgcacggactgctcggacaacagcgactcagacaatgatgagggcaccgagggggaagccacagagggccttgaaggcaccgaggctgtggagaagggctccagagtggacggagaggatgaggagggaaaagaggatgggagagaagaaggcaaagaggatccagagaagggggccctaaccacccaggatgaaaatggccagaccaagcgcaagttgcaggcaggcaagaagagtcaggacaagcagaaaaagcggcagcgagaccgcatggtggaaaggatccagtttgtgtgttctctgtgcaaataccggaccttctatgaggacgagatggccagccatcttgacagcaagttccacaaggaacactttaagtacgtaggcaccaagctccctaagcagacggctgactttctgcaggagtacgtcactaacaagaccaagaagacagaggagctccgaaaaaccgtggaggaccttgatggcctcatccagcaaatctacagagaccaggatctgacccaggaaattgccatggagcattttgtgaagaaggtggaggcagcccattgtgcagcctgcgacctcttcattcccatgcagtttgggatcatccagaagcatctgaagaccatggatcacaaccggaaccgcaggctcatgatggagcagtccaagaagtcctccctcatggtggcccgcagtattctcaacaacaagctcatcagcaagaagctggagcgctacctgaagggcgagaaccctttcaccgacagccccgaggaggagaaggagcaggaggaggctgagggcggtgccctggacgagggggcgcagggcgaagcggcagggatctcggagggcgcagagggcgtgccggcgcagcctcccgtgcccccagagccagcccccggggccgtgtcgccgccaccgccgccgcccccagaggaggaggaggagggcgccgtgcccttgctgggaggggcgctgcaacgccagatccgcggcatcccgggcctcgacgtggaggacgacgaggagggcggcgggggcgccccgtgacccgagctcggggcgggcggagcccgcgtggccgaagctggaaaccaaacctaataaagttttcccatccca

SEQ ID NO: 283479 - DNA, 3677 bp, Homo sapiens
gggctagggtgtgtgtggaggggaccctgtggttagcagcagctatcgcagcgtcggatgttcagagcagcagaagccggcgtcgtcggatgttgtgttgcccgccaccatgagctacacaggctttgtccagggatctgaaaccactttgcagtcgacatactcggataccagcgctcagcccacctgtgattatggatatggaacttggaactctgggacaaatagaggctacgagggctatggctatggctatggctatggccaggataacaccaccaactatgggtatggtatggccacttcacactcttgggaaatgcctagctctgacacaaatgcaaacactagtgcctcgggtagcgccagtgccgattccgttttatccagaattaaccagcgcttagatatggtgccgcatttggagacagacatgatgcaaggaggcgtgtacggctcaggtggagaaaggtatgactcttatgagtcctgcgactcgagggccgtcctgagtgagcgcgacctgtaccggtcaggctatgactacagcgagcttgaccctgagatggaaatggcctatgagggccaatacgatgcctaccgcgaccagttccgcatgcgtggcaacgacaccttcggtcccagggcacagggctgggcccgggatgcccggagcggccggccaatggcctcaggctatgggcgcatgtgggaagaccccatgggggcccggggccagtgcatgtctggtgcctctcggctgcctccctcttctcccagaacatcatccccgagtacggcatgttccagggcatgcgaggtgggggcgccttcccgggcggctcccgctttggtttcgggtttggcaatggcatgaagcagatgaggcggacctggaagacctggaccacagccgacttccgaaccaagaagaagaagagaaagcagggcggcagtcctgatgagccagatagcaaagccacccgcacggactgctcggacaacagcgactcagacaatgatgagggcaccgagggggaagccacagagggccttgaaggcaccgaggctgtggagaagggctccagagtggacggagaggatgaggagggaaaagaggatgggagagaagaaggcaaagaggatccagagaagggtgagttttcctggggtgcctggtgctagggcggctcttccaggggctcacagtgggagggacccagctgagggcagggttgcggcagacatgcggccagttggggacctcccttgtgggcccgagtgtgtgctggcagggggctttcttttcgccgcctccacccccttcccactcttcctcctccttcccaggcggaggctgtggatggtggtgacccctgcctagcacactggttttgccttcagatgggggcagctagtaaaagtgtggggaaccccaggcacgccccctgccctcggtccctcagtaacgcgcagttccaagtcctcagtggctggtgtccgatctgggaccctcggtgcagtttttacggctctggtgtgcgtatcctctcccttagcacctctccagcccctgttgggattccgtgtccccccacctgagtgatgagcgccagcaggtacctaacagcaaatccagcgtcagcccactgttgccgcggtgcccggttgggggtgggcagggccatgtgagcagcctccctgcatcccaccacctggcccctctgaacatgtgccagtgtccccacaaagataccccctctttgctttccagcctcctcctggcccactgcacagagagcatgggtgtcctggagagtggaggggtcatcgcctggcccccactccttggggcctaggccaaacccactccctgcacagcccaggatacccagccctgctcatggccagaggccttgcttggacagctattctcgatggaccctctggagtggacagtgggtgattcagccagaggccgcagggcctgccctgtcctggcagagccaaattggtgacagtgcccatctgctcccacaggggccctaaccacccaggatgaaaatggccagaccaagcgcaagttgcaggcaggcaagaagagtcaggacaagcagaaaaagcggcagcgagaccgcatggtggaaaggtaaccagcttccctccacccctctgcctctgcctcgctgtggggctgccgccaggagagcagggccatagctctgccagctcgccgccctctggcctcccttgggagccgccacctgctcggccgtgcatggaccctgcttcccgccaggcccagctcccaaggcctgactcatcccctgcccctctgcggccgcctggcgaccgctggcgtctgtgggccgagacctgacaccgctcggcaccgttgctcagaagctctggcgctaggtcactcggcgcacgaaccccaaggtgcactgggggcctgatgcccctgagggagggggccagctcatcagagactcaaggtccaaggcgcctgtgccgccccagctagctgccaagaggccaccgccgtgcccaggagagatggcagcacctgtgggctgtggcagcctcgggcctgccttctgccctgcccgccggccctgtcaggccgggcctgtctgcggctgagcccttcacgccccttggtcgggtctgtctgccctcagggctcccgcactggcgcttgcctcctccgcctcagactcttgctcttgctggaccttcctcagcctcgccggcgcccggcccctgggctctccagacaaagctgaccccgtggcccagataaggacgtccggcagaggatccagtttgtgtgttctctgtgcaaataccggaccttctatgaggacgagatggccagccatcttgacagcaagttccacaaggaacactttaagtacgtaggcaccaagctccctaagcagacggctgactttctgcaggagtacgtcactaacaagaccaagaagacagaggagctccgaaaaaccgtggaggaccttgatggcctcatccagcaaatctacagagaccaggatctgacccaggaaattgccatggagcattttgtgaagaaggtggaggcagcccattgtgcagcctgcgacctcttcattcccatgcagtttgggatcatccagaagcatctgaagaccatggatcacaaccggaaccgcaggctcatgatggagcagtccaagaagtcctccctcatggtggcccgcagtattctcaacaacaagctcatcagcaagaagctggagcgctacctgaagggcgagaaccctttcaccgacagccccgaggaggagaaggagcaggaggaggctgagggcggtgccctggacgagggggcgcagggcgaagcggcagggatctcggagggcgcagagggcgtgccggcgcagcctcccgtgcccccagagccagcccccggggccgtgtcgccgccaccgccgccgcccccagaggaggaggaggagggcgccgtgcccttgctgggaggggcgctgcaacgccagatccgcggcatcccgggcctcgacgtggaggacgacgaggagggcggcgggggcgccccgtgacccgagctcggggcgggcggagcccgcgtggccgaagctggaaaccaaacctaataaagttttcccatccca

SEQ ID NO: 283480 - DNA, 3163 bp, Homo sapiens
gggctagggtgtgtgtggaggggaccctgtggttagcagcagctatcgcagcgtcggatgttcagagcagcagaagccggcgtcgtcggatgttgtgttgcccgccaccatgagctacacaggctttgtccagggatctgaaaccactttgcagtcgacatactcggataccagcgctcagcccacctgtgattatggatatggaacttggaactctgggacaaatagaggctacgagggctatggctatggctatggctatggccaggataacaccaccaactatgggtatggtatggccacttcacactcttgggaaatgcctagctctgacacaaatgcaaacactagtgcctcgggtagcgccagtgccgattccgttttatccagaattaaccagcgcttagatatggtgccgcatttggagacagacatgatgcaaggaggcgtgtacggctcaggtggagaaaggtatgactcttatgagtcctgcgactcgagggccgtcctgagtgagcgcgacctgtaccggtcaggctatgactacagcgagcttgaccctgagatggaaatggcctatgagggccaatacgatgcctaccgcgaccagttccgcatgcgtggcaacgacaccttcggtcccagggcacagggctgggcccgggatgcccggagcggccggccaatggcctcaggctatgggcgcatgtgggaagaccccatgggggcccggggccagtgcatgtctggtgcctctcggctgcctccctcttctcccagaacatcatccccgagtacggcatgttccagggcatgcgaggtgggggcgccttcccgggcggctcccgctttggtttcgggtttggcaatggcatgaagcagatgaggcggacctggaagacctggaccacagccgacttccgaaccaagaagaagaagagaaagcagggcggcagtcctgatgagccagatagcaaagccacccgcacggactgctcggacaacagcgactcagacaatgatgagggcaccgagggggaagccacagagggccttgaaggcaccgaggctgtggagaagggctccagagtggacggagaggatgaggagggaaaagaggatgggagagaagaaggcaaagaggatccagagaagggtgagttttcctggggtgcctggtgctagggcggctcttccaggggctcacagtgggagggacccagctgagggcagggttgcggcagacatgcggccagttggggacctcccttgtgggcccgagtgtgtgctggcagggggctttcttttcgccgcctccacccccttcccactcttcctcctccttcccaggcggaggctgtggatggtggtgacccctgcctagcacactggttttgccttcagatgggggcagctagtaaaagtgtggggaaccccaggcacgccccctgccctcggtccctcagtaacgcgcagttccaagtcctcagtggctggtgtccgatctgggaccctcggtgcagtttttacggctctggtgtgcgtatcctctcccttagcacctctccagcccctgttgggattccgtgtccccccacctgagtgatgagcgccagcaggtacctaacagcaaatccagcgtcagcccactgttgccgcggtgcccggttgggggtgggcagggccatgtgagcagcctccctgcatcccaccacctggcccctctgaacatgtgccagtgtccccacaaagataccccctctttgctttccagcctcctcctggcccactgcacagagagcatgggtgtcctggagagtggaggggtcatcgcctggcccccactccttggggcctaggccaaacccactccctgcacagcccaggatacccagccctgctcatggccagaggccttgcttggacagctattctcgatggaccctctggagtggacagtgggtgattcagccagaggccgcagggcctgccctgtcctggcagagccaaattggtgacagtgcccatctgctcccacaggggccctaaccacccaggatgaaaatggccagaccaagcgcaagttgcaggcaggcaagaagagtcaggacaagcagaaaaagcggcagcgagaccgcatggtggaaaggtaaccagcttccctccacccctctgcctctgcctcgctgtggggctgccgccaggagagcagggccatagctctgccagctcgccgccctctggcctcccttgggagccgccacctgctcggccgtgcatggaccctgcttcccgccaggcccagctcccaaggcctgactcatcccctgcccctctgcggccgcctggcgaccgctggcgtctgtgggccgagacctgacaccgctcggcaccgttgctcagaagctctggcgctaggtcactcggcgcacgaaccccaaggtgcactgggggcctgatgcccctgagggagggggccagctcatcagagactcaaggtccaaggcgcctgtgccgccccagctagctgccaagaggccaccgccgtgcccaggagagatggcagcacctgtgggctgtggcagcctcgggcctgccttctgccctgcccgccggccctgtcaggccgggcctgtctgcggctgagcccttcacgccccttggtcgggtctgtctgccctcagggctcccgcactggcgcttgcctcctccgcctcagactcttgctcttgctggaccttcctcagcctcgccggcgcccggcccctgggctctccagacaaagctgaccccgtggcccagataaggacgtccggcagaggatccagtttgtgtgttctctgtgcaaataccggaccttctatgaggacgagatggccagccatcttgacagcaagttccacaaggaacactttaagtacgtaggcaccaagctccctaagcagacggctgactttctgcaggagtacgtcactaacaagaccaagaagacagaggagctccgaaaaaccgtggaggaccttgatggcctcatccagcaaatctacagagaccaggatctgacccaggtatgccagaaggtccaggtatgccagaaggtccaggtatgccagaaggtccaggtatgccagaaggtccaggtatgccagaaggtccaggtatg

SEQ ID NO: 283481 - DNA, 1458 bp, Homo sapiens
gggctagggtgtgtgtggaggggaccctgtggttagcagcagctatcgcagcgtcggatgttcagagcagcagaagccggcgtcgtcggatgttgtgttgcccgccaccatgagctacacaggctttgtccagggatctgaaaccactttgcagtcgacatactcggataccagcgctcagcccacctgtgattatggatatggaacttggaactctgggacaaatagaggctacgagggctatggctatggctatggctatggccaggataacaccaccaactatgggtatggtatggccacttcacactcttgggaaatgcctagctctgacacaaatgcaaacactagtgcctcgggtagcgccagtgccgattccgttttatccagaattaaccagcgcttagatatggtgccgcatttggagacagacatgatgcaaggaggcgtgtacggctcaggtggagaaaggtatgactcttatgagtcctgcgactcgagggccgtcctgagtgagcgcgacctgtaccggtcaggctatgactacagcgagcttgaccctgagatggaaatggcctatgagggccaatacgatgcctaccgcgaccagttccgcatgcgtggcaacgacaccttcggtcccagggcacagggctgggcccgggatgcccggagcggccggccaatggcctcaggctatgggcgcatgtgggaagaccccatgggggcccggggccagtgcatgtctggtgcctctcggctgcctccctcttctcccagaacatcatccccgagtacggcatgttccagggcatgcgaggtgggggcgccttcccgggcggctcccgctttggtttcgggtttggcaatggcatgaagcagatgaggcggacctggaagacctggaccacagccgacttccgaaccaagaagaagaagagaaagcagggcggcagtcctgatgagccagatagcaaagccacccgcacggactgctcggacaacagcgactcagacaatgatgagggcaccgagggggaagccacagagggccttgaaggcaccgaggctgtggagaagggctccagagtggacggagaggatgaggagggaaaagaggatgggagagaagaaggcaaagaggatccagagaagggggccctaaccacccaggatgaaaatggccagaccaagcgcaagttgcaggcaggcaagaagagtcaggacaagcagaaaaagcggcagcgagaccgcatggtggaaaggatccagtttgtgtgttctctgtgcaaataccggaccttctatgaggacgagatggccagccatcttgacagcaagttccacaaggaacactttaagtacgtaggcaccaagctccctaagcagacggctgactttctgcaggagtacgtcactaacaagacggcaagcgggggtaccggagctcgacatcgt

SEQ ID NO: 283482 - DNA, 3953 bp, Homo sapiens
cggacgcgtgggtcgacccacgcgtcgtcgcagcgtcggatgttcagagcagcagaagccggcgtcgtcggatgttgtgttgcccgccaccatgagctacacaggctttgtccagggatctgaaaccactttgcagtcgacatactcggataccagcgctcagcccacctgtgattatggatatggaacttggaactctgggacaaatagaggcaagtgtcattcctgtgattgctgtcctgtcccttggggttgtcctggctgtgtttctctgccactgccctgcttggccaaggttgggagtggggagggggcatgtttctggggttacctactccttaacaggaggccctcatcagaatgaccagggcccatctagcttcagtggctagggtcttctctctctgtgacagaagatacccttgtatctgtgtttgtctctgtctctgtctgcctcccctctgcctgcccccaccatctgtctgtctctgtctccctcactgcaggctacgagggctatggctatggctatggctatggccaggataacaccaccaactatgggtatggtatggccacttcacactcttgggaaatgcctagctctgacacaaatgcaaacactagtgcctcgggtagcgccagtgccgattccgttttatccagaattaaccagcgcttagatatggtgccgcatttggagacagacatgatgcaaggaggcgtgtacggctcaggtggagaaaggtatgactcttatgagtcctgcgactcgagggccgtcctgagtgagcgcgacctgtaccggtcaggctatgactacagcgagcttgaccctgagatggaaatggcctatgagggccaatacgatgcctaccgcgaccagttccgcatgcgtggcaacgacaccttcggtcccagggcacagggctgggcccgggatgcccggagcggccggccaatggcctcaggctatgggcgcatgtgggaagaccccatgggggcccggggccagtgcatgtctggtgcctctcggctgcctccctcttctcccagaacatcatccccgagtacggcatgttccagggcatgcgaggtgggggcgccttcccgggcggctcccgctttggtttcgggtttggcaatggcatgaagcagatgaggcggacctggaagacctggaccacagccgacttccgaaccaagaagaagaagagaaagcagggcggcagtcctgatgagccagatagcaaagccacccgcacggactgctcggacaacagcgactcagacaatgatgagggcaccgagggggaagccacagagggccttgaaggcaccgaggctgtggagaagggctccagagtggacggagaggatgaggagggaaaagaggatgggagagaagaaggcaaagaggatccagagaagggtgagttttcctggggtgcctggtgctagggcggctcttccaggggctcacagtgggagggacccagctgagggcagggttgcggcagacatgcggccagttggggacctcccttgtgggcccgagtgtgtgctggcagggggctttcttttcgccgcctccacccccttcccactcttcctcctccttcccaggcggaggctgtggatggtggtgacccctgcctagcacactggttttgccttcagatgggggcagctagtaaaagtgtggggaaccccaggcacgccccctgccctcggtccctcagtaacgcgcagttccaagtcctcagtggctggtgtccgatctgggaccctcggtgcagtttttacggctctggtgtgcgtatcctctcccttagcacctctccagcccctgttgggattccgtgtccccccacctgagtgatgagcgccagcaggtacctaacagcaaatccagcgtcagcccactgttgccgcggtgcccggttgggggtgggcagggccatgtgagcagcctccctgcatcccaccacctggcccctctgaacatgtgccagtgtccccacaaagataccccctctttgctttccagcctcctcctggcccactgcacagagagcatgggtgtcctggagagtggaggggtcatcgcctggcccccactccttggggcctaggccaaacccactccctgcacagcccaggatacccagccctgctcatggccagaggccttgcttggacagctattctcgatggaccctctggagtggacagtgggtgattcagccagaggccgcagggcctgccctgtcctggcagagccaaattggtgacagtgcccatctgctcccacaggggccctaaccacccaggatgaaaatggccagaccaagcgcaagttgcaggcaggcaagaagagtcaggacaagcagaaaaagcggcagcgagaccgcatggtggaaaggtaaccagcttccctccacccctctgcctctgcctcgctgtggggctgccgccaggagagcagggccatagctctgccagctcgccgccctctggcctcccttgggagccgccacctgctcggccgtgcatggaccctgcttcccgccaggcccagctcccaaggcctgactcatcccctgcccctctgcggccgcctggcgaccgctggcgtctgtgggccgagacctgacaccgctcggcaccgttgctcagaagctctggcgctaggtcactcggcgcacgaaccccaaggtgcactgggggcctgatgcccctgagggagggggccagctcatcagagactcaaggtccaaggcgcctgtgccgccccagctagctgccaagaggccaccgccgtgcccaggagagatggcagcacctgtgggctgtggcagcctcgggcctgccttctgccctgcccgccggccctgtcaggccgggcctgtctgcggctgagcccttcacgccccttggtcgggtctgtctgccctcagggctcccgcactggcgcttgcctcctccgcctcagactcttgctcttgctggaccttcctcagcctcgccggcgcccggcccctgggctctccagacaaagctgaccccgtggcccagataaggacgtccggcagaggatccagtttgtgtgttctctgtgcaaataccggaccttctatgaggacgagatggccagccatcttgacagcaagttccacaaggaacactttaagtacgtaggcaccaagctccctaagcagacggctgactttctgcaggagtacgtcactaacaagaccaagaagacagaggagctccgaaaaaccgtggaggaccttgatggcctcatccagcaaatctacagagaccaggatctgacccaggaaattgccatggagcattttgtgaagaaggtggaggcagcccattgtgcagcctgcgacctcttcattcccatgcagtttgggatcatccagaagcatctgaagaccatggatcacaaccggaaccgcaggctcatgatggagcagtccaagaagtcctccctcatggtggcccgcagtattctcaacaacaagctcatcagcaagaagctggagcgctacctgaagggcgagaaccctttcaccgacagccccgaggaggagaaggagcaggaggaggctgagggcggtgccctggacgagggggcgcagggcgaagcggcagggatctcggagggcgcagagggcgtgccggcgcagcctcccgtgcccccagagccagcccccggggccgtgtcgccgccaccgccgccgcccccagaggaggaggaggagggcgccgtgcccttgctgggaggggcgctgcaacgccagatccgcggcatcccgggcctcgacgtggaggacgacgaggagggcggcgggggcgccccgtgacccgagctcggggcgggcggagcccgcgtggccgaagctggaaaccaaacctaataaagttttcccatccca

SEQ ID NO: 283483 - DNA, 3558 bp, Homo sapiens
tagcctagtagaggcgggtggtaatcggccgcagcgtcggatgttcagagcagcagaagccggcgtcgtcggatgttgtgttgcccgccaccatgagctacacaggctttgtccagggatctgaaaccactttgcagtcgacatactcggataccagcgctcagcccacctgtgattatggatatggaacttggaactctgggacaaatagaggctacgagggctatggctatggctatggctatggccaggataacaccaccaactatggaattaaccagcgcttagatatggtgccgcatttggagacagacatgatgcaaggaggcgtgtacggctcaggtggagaaaggtatgactcttatgagtcctgcgactcgagggccgtcctgagtgagcgcgacctgtaccggtcaggctatgactacagcgagcttgaccctgagatggaaatggcctatgagggccaatacgatgcctaccgcgaccagttccgcatgcgtggcaacgacaccttcggtcccagggcacagggctgggcccgggatgcccggagcggccggccaatggcctcaggctatgggcgcatgtgggaagaccccatgggggcccggggccagtgcatgtctggtgcctctcggctgcctccctcttctcccagaacatcatccccgagtacggcatgttccagggcatgcgaggtgggggcgccttcccgggcggctcccgctttggtttcgggtttggcaatggcatgaagcagatgaggcggacctggaagacctggaccacagccgacttccgaaccaagaagaagaagagaaagcagggcggcagtcctgatgagccagatagcaaagccacccgcacggactgctcggacaacagcgactcagacaatgatgagggcaccgagggggaagccacagagggccttgaaggcaccgaggctgtggagaagggctccagagtggacggagaggatgaggagggaaaagaggatgggagagaagaaggcaaagaggatccagagaagggtgagttttcctggggtgcctggtgctagggcggctcttccaggggctcacagtgggagggacccagctgagggcagggttgcggcagacatgcggccagttggggacctcccttgtgggcccgagtgtgtgctggcagggggctttcttttcgccgcctccacccccttcccactcttcctcctccttcccaggcggaggctgtggatggtggtgacccctgcctagcacactggttttgccttcagatgggggcagctagtaaaagtgtggggaaccccaggcacgccccctgccctcggtccctcagtaacgcgcagttccaagtcctcagtggctggtgtccgatctgggaccctcggtgcagtttttacggctctggtgtgcgtatcctctcccttagcacctctccagcccctgttgggattccgtgtccccccacctgagtgatgagcgccagcaggtacctaacagcaaatccagcgtcagcccactgttgccgcggtgcccggttgggggtgggcagggccatgtgagcagcctccctgcatcccaccacctggcccctctgaacatgtgccagtgtccccacaaagataccccctctttgctttccagcctcctcctggcccactgcacagagagcatgggtgtcctggagagtggaggggtcatcgcctggcccccactccttggggcctaggccaaacccactccctgcacagcccaggatacccagccctgctcatggccagaggccttgcttggacagctattctcgatggaccctctggagtggacagtgggtgattcagccagaggccgcagggcctgccctgtcctggcagagccaaattggtgacagtgcccatctgctcccacaggggccctaaccacccaggatgaaaatggccagaccaagcgcaagttgcaggcaggcaagaagagtcaggacaagcagaaaaagcggcagcgagaccgcatggtggaaaggtaaccagcttccctccacccctctgcctctgcctcgctgtggggctgccgccaggagagcagggccatagctctgccagctcgccgccctctggcctcccttgggagccgccacctgctcggccgtgcatggaccctgcttcccgccaggcccagctcccaaggcctgactcatcccctgcccctctgcggccgcctggcgaccgctggcgtctgtgggccgagacctgacaccgctcggcaccgttgctcagaagctctggcgctaggtcactcggcgcacgaaccccaaggtgcactgggggcctgatgcccctgagggagggggccagctcatcagagactcaaggtccaaggcgcctgtgccgccccagctagctgccaagaggccaccgccgtgcccaggagagatggcagcacctgtgggctgtggcagcctcgggcctgccttctgccctgcccgccggccctgtcaggccgggcctgtctgcggctgagcccttcacgccccttggtcgggtctgtctgccctcagggctcccgcactggcgcttgcctcctccgcctcagactcttgctcttgctggaccttcctcagcctcgccggcgcccggcccctgggctctccagacaaagctgaccccgtggcccagataaggacgtccggcagaggatccagtttgtgtgttctctgtgcaaataccggaccttctatgaggacgagatggccagccatcttgacagcaagttccacaaggaacactttaagtacgtaggcaccaagctccctaagcagacggctgactttctgcaggagtacgtcactaacaagaccaagaagacagaggagctccgaaaaaccgtggaggaccttgatggcctcatccagcaaatctacagagaccaggatctgacccaggaaattgccatggagcattttgtgaagaaggtggaggcagcccattgtgcagcctgcgacctcttcattcccatgcagtttgggatcatccagaagcatctgaagaccatggatcacaaccggaaccgcaggctcatgatggagcagtccaagaagtcctccctcatggtggcccgcagtattctcaacaacaagctcatcagcaagaagctggagcgctacctgaagggcgagaaccctttcaccgacagccccgaggaggagaaggagcaggaggaggctgagggcggtgccctggacgagggggcgcagggcgaagcggcagggatctcggagggcgcagagggcgtgccggcgcagcctcccgtgcccccagagccagcccccggggccgtgtcgccgccaccgccgccgcccccagaggaggaggaggagggcgccgtgcccttgctgggaggggcgctgcaacgccagatccgcggcatcccgggcctcgacgtggaggacgacgaggagggcggcgggggcgccccgtgacccgagctcggggcgggcggagcccgcgtggccgaagctggaaaccaaacctaataaagttttcccatccca

SEQ ID NO: 283484 - DNA, 3059 bp, Homo sapiens
tgccgtcgctctgaggatcctccctggttgtcagggctgggcccgggatgcccggagcggccggccaatggcctcaggctatgggcgcatgtgggaagaccccatgggggcccggggccagtgcatgtctggtgcctctcggctgcctccctcttctcccagaacatcatccccgagtacggcatgttccagggcatgcgaggtgggggcgccttcccgggcggctcccgctttggtttcgggtttggcaatggcatgaagcagatgaggcggacctggaagacctggaccacagccgacttccgaaccaagaagaagaagagaaagcagggcggcagtcctgatgagccagatagcaaagccacccgcacggactgctcggacaacagcgactcagacaatgatgagggcaccgagggggaagccacagagggccttgaaggcaccgaggctgtggagaagggctccagagtggacggagaggatgaggagggaaaagaggatgggagagaagaaggcaaagaggatccagagaagggtgagttttcctggggtgcctggtgctagggcggctcttccaggggctcacagtgggagggacccagctgagggcagggttgcggcagacatgcggccagttggggacctcccttgtgggcccgagtgtgtgctggcagggggctttcttttcgccgcctccacccccttcccactcttcctcctccttcccaggcggaggctgtggatggtggtgacccctgcctagcacactggttttgccttcagatgggggcagctagtaaaagtgtggggaaccccaggcacgccccctgccctcggtccctcagtaacgcgcagttccaagtcctcagtggctggtgtccgatctgggaccctcggtgcagtttttacggctctggtgtgcgtatcctctcccttagcacctctccagcccctgttgggattccgtgtccccccacctgagtgatgagcgccagcaggtacctaacagcaaatccagcgtcagcccactgttgccgcggtgcccggttgggggtgggcagggccatgtgagcagcctccctgcatcccaccacctggcccctctgaacatgtgccagtgtccccacaaagataccccctctttgctttccagcctcctcctggcccactgcacagagagcatgggtgtcctggagagtggaggggtcatcgcctggcccccactccttggggcctaggccaaacccactccctgcacagcccaggatacccagccctgctcatggccagaggccttgcttggacagctattctcgatggaccctctggagtggacagtgggtgattcagccagaggccgcagggcctgccctgtcctggcagagccaaattggtgacagtgcccatctgctcccacaggggccctaaccacccaggatgaaaatggccagaccaagcgcaagttgcaggcaggcaagaagagtcaggacaagcagaaaaagcggcagcgagaccgcatggtggaaaggtaaccagcttccctccacccctctgcctctgcctcgctgtggggctgccgccaggagagcagggccatagctctgccagctcgccgccctctggcctcccttgggagccgccacctgctcggccgtgcatggaccctgcttcccgccaggcccagctcccaaggcctgactcatcccctgcccctctgcggccgcctggcgaccgctggcgtctgtgggccgagacctgacaccgctcggcaccgttgctcagaagctctggcgctaggtcactcggcgcacgaaccccaaggtgcactgggggcctgatgcccctgagggagggggccagctcatcagagactcaaggtccaaggcgcctgtgccgccccagctagctgccaagaggccaccgccgtgcccaggagagatggcagcacctgtgggctgtggcagcctcgggcctgccttctgccctgcccgccggccctgtcaggccgggcctgtctgcggctgagcccttcacgccccttggtcgggtctgtctgccctcagggctcccgcactggcgcttgcctcctccgcctcagactcttgctcttgctggaccttcctcagcctcgccggcgcccggcccctgggctctccagacaaagctgaccccgtggcccagataaggacgtccggcagaggatccagtttgtgtgttctctgtgcaaataccggaccttctatgaggacgagatggccagccatcttgacagcaagttccacaaggaacactttaagtacgtaggcaccaagctccctaagcagacggctgactttctgcaggagtacgtcactaacaagaccaagaagacagaggagctccgaaaaaccgtggaggaccttgatggcctcatccagcaaatctacagagaccaggatctgacccaggaaattgccatggagcattttgtgaagaaggtggaggcagcccattgtgcagcctgcgacctcttcattcccatgcagtttgggatcatccagaagcatctgaagaccatggatcacaaccggaaccgcaggctcatgatggagcagtccaagaagtcctccctcatggtggcccgcagtattctcaacaacaagctcatcagcaagaagctggagcgctacctgaagggcgagaaccctttcaccgacagccccgaggaggagaaggagcaggaggaggctgagggcggtgccctggacgagggggcgcagggcgaagcggcagggatctcggagggcgcagagggcgtgccggcgcagcctcccgtgcccccagagccagcccccggggccgtgtcgccgccaccgccgccgcccccagaggaggaggaggagggcgccgtgcccttgctgggaggggcgctgcaacgccagatccgcggcatcccgggcctcgacgtggaggacgacgaggagggcggcgggggcgccccgtgacccgagctcggggcgggcggagcccgcgtggccgaagctggaaaccaaacctaataaagttttcccatccca

SEQ ID NO: 283485 - DNA, 1236 bp, Homo sapiens
ttgctggggcactctagaggatcttccgctgcgtcttcgaccaagaagaagaagagaaagcagggcggcagtcctgatgagccagatagcaaagccacccgcacggactgctcggacaacagcgactcagacaatgatgagggcaccgagggggaagccacagagggccttgaaggcaccgaggctgtggagaagggctccagagtggacggagaggatgaggagggaaaagaggatgggagagaagaaggcaaagaggatccagagaagggggccctaaccacccaggatgaaaatggccagaccaagcgcaagttgcaggcaggcaagaagagtcaggacaagcagaaaaagcggcagcgagaccgcatggtggaaaggatccagtttgtgtgttctctgtgcaaataccggaccttctatgaggacgagatggccagccatcttgacagcaagttccacaaggaacactttaagtacgtaggcaccaagctccctaagcagacggctgactttctgcaggagtacgtcactaacaagaccaagaagacagaggagctccgaaaaaccgtggaggaccttgatggcctcatccagcaaatctacagagaccaggatctgacccaggaaattgccatggagcattttgtgaagaaggtggaggcagcccattgtgcagcctgcgacctcttcattcccatgcagtttgggatcatccagaagcatctgaagaccatggatcacaaccggaaccgcaggctcatgatggagcagtccaagaagtcctccctcatggtggcccgcagtattctcaacaacaagctcatcagcaagaagctggagcgctacctgaagggcgagaaccctttcaccgacagccccgaggaggagaaggagcaggaggaggctgagggcggtgccctggacgagggggcgcagggcgaagcggcagggatctcggagggcgcagagggcgtgccggcgcagcctcccgtgcccccagagccagcccccggggccgtgtcgccgccaccgccgccgcccccagaggaggaggaggagggcgccgtgcccttgctgggaggggcgctgcaacgccagatccgcggcatcccgggcctcgacgtggaggacgacgaggagggcggcgggggcgccccgtgacccgagctcggggcgggcggagcccgcgtggccgaagctggaaaccaaacctaataaagttttcccatccca

SEQ ID NO: 283486 - DNA, 869 bp, Homo sapiens
aggaggaggaggagtcactaacaaactcagcatcagtgtccagaacaaccgaagtgttcggcatattaatggtgggtgtgtaggacggaaggttggatgtatgcagaactggcgactcagtagaaggctgagcatattccccgtcataggatgagacgttacttctctcagtctgagcatgagaaaaggagctccgaaaaaccgtggaggaccttgatggcctcatccagcaaatctacagagaccaggatctgacccaggaaattgccatggagcattttgtgaagaaggtggaggcagcccattgtgcagcctgcgacctcttcattcccatgcagtttgggatcatccagaagcatctgaagaccatggatcacaaccggaaccgcaggctcatgatggagcagtccaagaagtcctccctcatggtggcccgcagtattctcaacaacaagctcatcagcaagaagctggagcgctacctgaagggcgagaaccctttcaccgacagccccgaggaggagaaggagcaggaggaggctgagggcggtgccctggacgagggggcgcagggcgaagcggcagggatctcggagggcgcagagggcgtgccggcgcagcctcccgtgcccccagagccagcccccggggccgtgtcgccgccaccgccgccgcccccagaggaggaggaggagggcgccgtgcccttgctgggaggggcgctgcaacgccagatccgcggcatcccgggcctcgacgtggaggacgacgaggagggcggcgggggcgccccgtgacccgagctcggggcgggcggagcccgcgtggccgaagctggaaaccaaacctaataaagttttcccatccca

SEQ ID NO: 283487 - DNA, 619 bp, Homo sapiens
aagaccatggatgatcccaaactgcatgggaatgaagaggtcgcaggcagcccattgtgcagcctgcgacctcttcattcccatgcagtttgggatcatccagaagcatctgaagaccatggatcacaaccggaaccgcaggctcatgatggagcagtccaagaagtcctccctcatggtggcccgcagtattctcaacaacaagctcatcagcaagaagctggagcgctacctgaagggcgagaaccctttcaccgacagccccgaggaggagaaggagcaggaggaggctgagggcggtgccctggacgagggggcgcagggcgaagcggcagggatctcggagggcgcagagggcgtgccggcgcagcctcccgtgcccccagagccagcccccggggccgtgtcgccgccaccgccgccgcccccagaggaggaggaggagggcgccgtgcccttgctgggaggggcgctgcaacgccagatccgcggcatcccgggcctcgacgtggaggacgacgaggagggcggcgggggcgccccgtgacccgagctcggggcgggcggagcccgcgtggccgaagctggaaaccaaacctaataaagttttcccatccca

SEQ ID NO: 283488 - DNA, 429 bp, Homo sapiens
cgcgaccagttccgcatgcgtggcaacgacaccttcggtcccagggcacagggctgggcccgggatgcccggagcggccggccaatggcctcaggctatgggcgcatgtgggaagaccccatgggggcccggggccagtgcatgtctggtgcctctcggctgcctccctcttctcccagaacatcatccccgagtacggcatgttccagggcatgcgaggtgggggcgccttcccgggcggctcccgctttggtttcgggtttggcaatggcatgaagcagatgaggcggacctggaagacctggaccacagccgacttccgagtgagtggaggcagccttcccctctgggaagcttagttcccactggggcggagctaagggccgggtgccatgcaccctgacacggcttcccccccttatgacccag

SEQ ID NO: 283489 - DNA, 416 bp, Homo sapiens
aatcctataccaaaggttaggtagtctcaggtcatttccctgtgacttgcttgtggaaattaaccccactgtctttatgtttaggctttgtccagggatctgaaaccactttgcagtcgacatactcggataccagcgctcagcccacctgtgattatggtaagtgtggacttctggtgggaaccaaagtgttctgcagagcagttccttgtcttcttagttgcctttggctttgctgtcaccctgtcatgcttttttaaacctaaacttgtgtgaaatggtgtggccatttgaatagctagtgcttccctttcaggcaattatgggaaaagtagctgtgttcctgagcaagttaggctctttgataaaaggcctggcttcaaatccccatgggggagggactgggagtcacagtg

SEQ ID NO: 283490 - DNA, 212 bp, Homo sapiens
ggctcccgcactggcgcttgcctcctccgcctcagactcttgctcttgctggaccttcctcagcctcgccggcgcccggcccctgggctctccagacaaagctgaccccgtggcccagataaggacgtccggcagaggtagggacccgccccgaggtctcggtggcggctggcctcctccgccccttgccacggcggcctgctccggcccag

SEQ ID NO: 283491 - DNA, 2793 bp, Homo sapiens
gggctagggtgtgtgtggaggggaccctgtggttagcagcagctatcgcagcgtcggatgttcagagcagcagaagccggcgtcgtcggatgttgtgttgcccgccaccatgagctacacaggctttgtccagggatctgaaaccactttgcagtcgacatactcggataccagcgctcagcccacctgtgattatggatatggaacttggaactctgggacaaatagaggctacgagggctatggctatggctatggctatggccaggataacaccaccaactatgggtatggtatggccacttcacactcttgggaaatgcctagctctgacacaaatgcaaacactagtgcctcgggtagcgccagtgccgattccgttttatccagaattaaccagcgcttagatatggtgccgcatttggagacagacatgatgcaaggaggcgtgtacggctcaggtggagaaaggtatgactcttatgagtcctgcgactcgagggccgtcctgagtgagcgcgacctgtaccggtcaggctatgactacagcgagcttgaccctgagatggaaatggcctatgagggccaatacgatgcctaccgcgaccagttccgcatgcgtggcaacgacaccttcggtcccagggcacagggctgggcccgggatgcccggagcggccggccaatggcctcaggctatgggcgcatgtgggaagaccccatgggggcccggggccagtgcatgtctggtgcctctcggctgcctccctcttctcccagaacatcatccccgagtacggcatgttccagggcatgcgaggtgggggcgccttcccgggcggctcccgctttggtttcgggtttggcaatggcatgaagcagatgaggcggacctggaagacctggaccacagccgacttccgaaccaagaagaagaagagaaagcagggcggcagtcctgatgagccagatagcaaagccacccgcacggactgctcggacaacagcgactcagacaatgatgagggcaccgagggggaagccacagagggccttgaaggcaccgaggctgtggagaagggctccagagtggacggagaggatgaggagggaaaagaggatgggagagaagaaggcaaagaggatccagagaagggggccctaaccacccaggatgaaaatggccagaccaagcgcaagttgcaggcaggcaagaagagtcaggacaagcagaaaaagcggcagcgagaccgcatggtggaaaggtaaccagcttccctccacccctctgcctctgcctcgctgtggggctgccgccaggagagcagggccatagctctgccagctcgccgccctctggcctcccttgggagccgccacctgctcggccgtgcatggaccctgcttcccgccaggcccagctcccaaggcctgactcatcccctgcccctctgcggccgcctggcgaccgctggcgtctgtgggccgagacctgacaccgctcggcaccgttgctcagaagctctggcgctaggtcactcggcgcacgaaccccaaggtgcactgggggcctgatgcccctgagggagggggccagctcatcagagactcaaggtccaaggcgcctgtgccgccccagctagctgccaagaggccaccgccgtgcccaggagagatggcagcacctgtgggctgtggcagcctcgggcctgccttctgccctgcccgccggccctgtcaggccgggcctgtctgcggctgagcccttcacgccccttggtcgggtctgtctgccctcagggctcccgcactggcgcttgcctcctccgcctcagactcttgctcttgctggaccttcctcagcctcgccggcgcccggcccctgggctctccagacaaagctgaccccgtggcccagataaggacgtccggcagaggatccagtttgtgtgttctctgtgcaaataccggaccttctatgaggacgagatggccagccatcttgacagcaagttccacaaggaacactttaagtacgtaggcaccaagctccctaagcagacggctgactttctgcaggagtacgtcactaacaagaccaagaagacagaggagctccgaaaaaccgtggaggaccttgatggcctcatccagcaaatctacagagaccaggatctgacccaggaaattgccatggagcattttgtgaagaaggtggaggcagcccattgtgcagcctgcgacctcttcattcccatgcagtttgggatcatccagaagcatctgaagaccatggatcacaaccggaaccgcaggctcatgatggagcagtccaagaagtcctccctcatggtggcccgcagtattctcaacaacaagctcatcagcaagaagctggagcgctacctgaagggcgagaaccctttcaccgacagccccgaggaggagaaggagcaggaggaggctgagggcggtgccctggacgagggggcgcagggcgaagcggcagggatctcggagggcgcagagggcgtgccggcgcagcctcccgtgcccccagagccagcccccggggccgtgtcgccgccaccgccgccgcccccagaggaggaggaggagggcgccgtgcccttgctgggaggggcgctgcaacgccagatccgcggcatcccgggcctcgacgtggaggacgacgaggagggcggcgggggcgccccgtgacccgagctcggggcgggcggagcccgcgtggccgaagctggaaaccaaacctaataaagttttcccatccca

SEQ ID NO: 283492 - DNA, 2103 bp, Homo sapiens
cggacgcgtgggtcgacccacgcgtcgtcgcagcgtcggatgttcagagcagcagaagccggcgtcgtcggatgttgtgttgcccgccaccatgagctacacaggctttgtccagggatctgaaaccactttgcagtcgacatactcggataccagcgctcagcccacctgtgattatggatatggaacttggaactctgggacaaatagaggctacgagggctatggctatggctatggctatggccaggataacaccaccaactatgggtatggtatggccacttcacactcttgggaaatgcctagctctgacacaaatgcaaacactagtgcctcgggtagcgccagtgccgattccgttttatccagaattaaccagcgcttagatatggtgccgcatttggagacagacatgatgcaaggaggcgtgtacggctcaggtggagaaaggtatgactcttatgagtcctgcgactcgagggccgtcctgagtgagcgcgacctgtaccggtcaggctatgactacagcgagcttgaccctgagatggaaatggcctatgagggccaatacgatgcctaccgcgaccagttccgcatgcgtggcaacgacaccttcggtcccagggcacagggctgggcccgggatgcccggagcggccggccaatggcctcaggctatgggcgcatgtgggaagaccccatgggggcccggggccagtgcatgtctggtgcctctcggctgcctccctcttctcccagaacatcatccccgagtacggcatgttccagggcatgcgaggtgggggcgccttcccgggcggctcccgctttggtttcgggtttggcaatggcatgaagcagatgaggcggacctggaagacctggaccacagccgacttccgaaccaagaagaagaagagaaagcagggcggcagtcctgatgagccagatagcaaagccacccgcacggactgctcggacaacagcgactcagacaatgatgagggcaccgagggggaagccacagagggccttgaaggcaccgaggctgtggagaagggctccagagtggacggagaggatgaggagggaaaagaggatgggagagaagaaggcaaagaggatccagagaagggggccctaaccacccaggatgaaaatggccagaccaagcgcaagttgcaggcaggcaagaagagtcaggacaagcagaaaaagcggcagcgagaccgcatggtggaaaggatccagtttgtgtgttctctgtgcaaataccggaccttctatgaggacgagatggccagccatcttgacagcaagttccacaaggaacactttaagtacgtaggcaccaagctccctaagcagacggctgactttctgcaggagtacgtcactaacaagaccaagaagacagaggagctccgaaaaaccgtggaggaccttgatggcctcatccagcaaatctacagagaccaggatctgacccaggaaattgccatggagcattttgtgaagaaggtggaggcagcccattgtgcagcctgcgacctcttcattcccatgcagtttgggatcatccagaagcatctgaagaccatggatcacaaccggaaccgcaggctcatgatggagcagtccaagaagtcctccctcatggtggcccgcagtattctcaacaacaagctcatcagcaagaagctggagcgctacctgaagggcgagaaccctttcaccgacagccccgaggaggagaaggagcaggaggaggctgagggcggtgccctggacgagggggcgcagggcgaagcggcagggatctcggagggcgcagagggcgtgccggcgcagcctcccgtgcccccagagccagcccccggggccgtgtcgccgccaccgccgccgcccccagaggaggaggaggagggcgccgtgcccttgctgggaggggcgctgcaacgccagatccgcggcatcccgggcctcgacgtggaggacgacgaggagggcggcgggggcgccccgtgacccgagctcggggcgggcggagcccgcgtggccgaagctggaaaccaaacctaataaagttttcccatccca

SEQ ID NO: 283493 - DNA, 3142 bp, Homo sapiens
gggctagggtgtgtgtggaggggaccctgtggttagcagcagctatcgcagcgtcggatgttcagagcagcagaagccggcgtcgtcggatgttgtgttgcccgccaccatgagctacacaggctttgtccagggatctgaaaccactttgcagtcgacatactcggataccagcgctcagcccacctgtgattatggatatggaacttggaactctgggacaaatagaggctacgagggctatggctatggctatggctatggccaggataacaccaccaactatgggtatggtatggccacttcacactcttgggaaatgcctagctctgacacaaatgcaaacactagtgcctcgggtagcgccagtgccgattccgttttatccagaattaaccagcgcttagatatggtgccgcatttggagacagacatgatgcaaggaggcgtgtacggctcaggtggagaaaggtatgactcttatgagtcctgcgactcgagggccgtcctgagtgagcgcgacctgtaccggtcaggctatgactacagcgagcttgaccctgagatggaaatggcctatgagggccaatacgatgcctaccgcgaccagttccgcatgcgtggcaacgacaccttcggtcccagggcacagggctgggcccgggatgcccggagcggccggccaatggcctcaggctatgggcgcatgtgggaagaccccatgggggcccggggccagtgcatgtctggtgcctctcggctgcctccctcttctcccagaacatcatccccgagtacggcatgttccagggcatgcgaggtgggggcgccttcccgggcggctcccgctttggtttcgggtttggcaatggcatgaagcagatgaggcggacctggaagacctggaccacagccgacttccgaaccaagaagaagaagagaaagcagggcggcagtcctgatgagccagatagcaaagccacccgcacggactgctcggacaacagcgactcagacaatgatgagggcaccgagggggaagccacagagggccttgaaggcaccgaggctgtggagaagggctccagagtggacggagaggatgaggagggaaaagaggatgggagagaagaaggcaaagaggatccagagaagggtgagttttcctggggtgcctggtgctagggcggctcttccaggggctcacagtgggagggacccagctgagggcagggttgcggcagacatgcggccagttggggacctcccttgtgggcccgagtgtgtgctggcagggggctttcttttcgccgcctccacccccttcccactcttcctcctccttcccaggcggaggctgtggatggtggtgacccctgcctagcacactggttttgccttcagatgggggcagctagtaaaagtgtggggaaccccaggcacgccccctgccctcggtccctcagtaacgcgcagttccaagtcctcagtggctggtgtccgatctgggaccctcggtgcagtttttacggctctggtgtgcgtatcctctcccttagcacctctccagcccctgttgggattccgtgtccccccacctgagtgatgagcgccagcaggtacctaacagcaaatccagcgtcagcccactgttgccgcggtgcccggttgggggtgggcagggccatgtgagcagcctccctgcatcccaccacctggcccctctgaacatgtgccagtgtccccacaaagataccccctctttgctttccagcctcctcctggcccactgcacagagagcatgggtgtcctggagagtggaggggtcatcgcctggcccccactccttggggcctaggccaaacccactccctgcacagcccaggatacccagccctgctcatggccagaggccttgcttggacagctattctcgatggaccctctggagtggacagtgggtgattcagccagaggccgcagggcctgccctgtcctggcagagccaaattggtgacagtgcccatctgctcccacaggggccctaaccacccaggatgaaaatggccagaccaagcgcaagttgcaggcaggcaagaagagtcaggacaagcagaaaaagcggcagcgagaccgcatggtggaaagggctcccgcactggcgcttgcctcctccgcctcagactcttgctcttgctggaccttcctcagcctcgccggcgcccggcccctgggctctccagacaaagctgaccccgtggcccagataaggacgtccggcagaggatccagtttgtgtgttctctgtgcaaataccggaccttctatgaggacgagatggccagccatcttgacagcaagttccacaaggaacactttaagtacgtaggcaccaagctccctaagcagacggctgactttctgcaggagtacgtcactaacaagaccaagaagacagaggagctccgaaaaaccgtggaggaccttgatggcctcatccagcaaatctacagagaccaggatctgacccaggaaattgccatggagcattttgtgaagaaggtggaggcagcccattgtgcagcctgcgacctcttcattcccatgcagtttgggatcatccagaagcatctgaagaccatggatcacaaccggaaccgcaggctcatgatggagcagtccaagaagtcctccctcatggtggcccgcagtattctcaacaacaagctcatcagcaagaagctggagcgctacctgaagggcgagaaccctttcaccgacagccccgaggaggagaaggagcaggaggaggctgagggcggtgccctggacgagggggcgcagggcgaagcggcagggatctcggagggcgcagagggcgtgccggcgcagcctcccgtgcccccagagccagcccccggggccgtgtcgccgccaccgccgccgcccccagaggaggaggaggagggcgccgtgcccttgctgggaggggcgctgcaacgccagatccgcggcatcccgggcctcgacgtggaggacgacgaggagggcggcgggggcgccccgtgacccgagctcggggcgggcggagcccgcgtggccgaagctggaaaccaaacctaataaagttttcccatccca

SEQ ID NO: 283494 - DNA, 3512 bp, Homo sapiens
gggctagggtgtgtgtggaggggaccctgtggttagcagcagctatcgcagcgtcggatgttcagagcagcagaagccggcgtcgtcggatgttgtgttgcccgccaccatgagctacacaggctttgtccagggatctgaaaccactttgcagtcgacatactcggataccagcgctcagcccacctgtgattatggatatggaacttggaactctgggacaaatagaggctacgagggctatggctatggctatggctatggccaggataacaccaccaactatgggtatggtatggccacttcacactcttgggaaatgcctagctctgacacaaatgcaaacactagtgcctcgggtagcgccagtgccgattccgttttatccagaattaaccagcgcttagatatggtgccgcatttggagacagacatgatgcaaggaggcgtgtacggctcaggtggagaaaggtatgactcttatgagtcctgcgactcgagggccgtcctgagtgagcgcgacctgtaccggtcaggctatgactacagcgagcttgaccctgagatggaaatggcctatgagggccaatacgatgcctaccgcgaccagttccgcatgcgtggcaacgacaccttcggtcccagggcacagggctgggcccgggatgcccggagcggccggccaatggcctcaggctatgggcgcatgtgggaagaccccatgggggcccggggccagtgcatgtctggtgcctctcggctgcctccctcttctcccagaacatcatccccgagtacggcatgttccagggcatgcgaggtgggggcgccttcccgggcggctcccgctttggtttcgggtttggcaatggcatgaagcagatgaggcggacctggaagacctggaccacagccgacttccgaaccaagaagaagaagagaaagcagggcggcagtcctgatgagccagatagcaaagccacccgcacggactgctcggacaacagcgactcagacaatgatgagggcaccgagggggaagccacagagggccttgaaggcaccgaggctgtggagaagggctccagagtggacggagaggatgaggagggaaaagaggatgggagagaagaaggcaaagaggatccagagaagggtgagttttcctggggtgcctggtgctagggcggctcttccaggggctcacagtgggagggacccagctgagggcagggttgcggcagacatgcggccagttggggacctcccttgtgggcccgagtgtgtgctggcagggggctttcttttcgccgcctccacccccttcccactcttcctcctccttcccaggcggaggctgtggatggtggtgacccctgcctagcacactggttttgccttcagatgggggcagctagtaaaagtgtggggaaccccaggcacgccccctgccctcggtccctcagtaacgcgcagttccaagtcctcagtggctggtgtccgatctgggaccctcggtgcagtttttacggctctggtgtgcgtatcctctcccttagcacctctccagcccctgttgggattccgtgtccccccacctgagtgatgagcgccagcaggtacctaacagcaaatccagcgtcagcccactgttgccgcggtgcccggttgggggtgggcagggccatgtgagcagcctccctgcatcccaccacctggcccctctgaacatgtgccagtgtccccacaaagataccccctctttgctttccagcctcctcctggcccactgcacagagagcatgggtgtcctggagagtggaggggtcatcgcctggcccccactccttggggcctaggccaaacccactccctgcacagcccaggatacccagccctgctcatggccagaggccttgcttggacagctattctcgatggaccctctggagtggacagtgggtgattcagccagaggccgcagggcctgccctgtcctggcagagccaaattggtgacagtgcccatctgctcccacaggggccctaaccacccaggatgaaaatggccagaccaagcgcaagttgcaggcaggcaagaagagtcaggacaagcagaaaaagcggcagcgagaccgcatggtggaaaggtaaccagcttccctccacccctctgcctctgcctcgctgtggggctgccgccaggagagcagggccatagctctgccagctcgccgccctctggcctcccttgggagccgccacctgctcggccgtgcatggaccctgcttcccgccaggcccagctcccaaggcctgactcatcccctgcccctctgcggccgcctggcgaccgctggcgtctgtgggccgagacctgacaccgctcggcaccgttgctcagaagctctggcgctaggtcactcggcgcacgaaccccaaggtgcactgggggcctgatgcccctgagggagggggccagctcatcagagactcaaggtccaaggcgcctgtgccgccccagctagctgccaagaggccaccgccgtgcccaggagagatggcagcacctgtgggctgtggcagcctcgggcctgccttctgccctgcccgccggccctgtcaggccgggcctgtctgcggctgagcccttcacgccccttggtcgggtctgtctgccctcagggctcccgcactggcgcttgcctcctccgcctcagactcttgctcttgctggaccttcctcagcctcgccggcgcccggcccctgggctctccagacaaagctgaccccgtggcccagataaggacgtccggcagaggatccagtttgtgtgttctctgtgcaaataccggaccttctatgaggacgagatggccagccatcttgacagcaagttccacaaggaacactttaagtacgtaggcaccaagctccctaagcagacggctgactttctgcaggagtacgtcactaacaagaccaagaagacagaggagctccgaaaaaccgtggaggaccttgatggcctcatccagcaaatctacagagaccaggatctgacccaggaaattgccatggagcattttgtgaagaaggtggaggcagcccattgtgcagcctgcgacctcttcattcccatgcagtttgggatcatccagaagcatctgaagaccatggatcacaaccggaaccgcaggctcatgatggagcagtccaagaagtcctccctcatggtggcccgcagtattctcaacaacaagctcatcagcaagaagctggagcgctacctgaagggcgagaaccctttcaccgacagccccgaggaggaggaggagggcgccgtgcccttgctgggaggggcgctgcaacgccagatccgcggcatcccgggcctcgacgtggaggacgacgaggagggcggcgggggcgccccgtgacccgagctcggggcgggcggagcccgcgtggccgaagctggaaaccaaacctaataaagttttcccatccca

SEQ ID NO: 283495 - DNA, 1486 bp, Homo sapiens
gggctagggtgtgtgtggaggggaccctgtggttagcagcagctatcgcagcgtcggatgttcagagcagcagaagccggcgtcgtcggatgttgtgttgcccgccaccatgagctacacaggctttgtccagggatctgaaaccactttgcagtcgacatactcggataccagcgctcagcccacctgtgattatggatatggaacttggaactctgggacaaatagaggctacgagggctatggctatggctatggctatggccaggataacaccaccaactatgggtatggtatggccacttcacactcttgggaaatgcctagctctgacacaaatgcaaacactagtgcctcgggtagcgccagtgccgattccgttttatccagaattaaccagcgcttagatatggtgccgcatttggagacagacatgatgcaaggaggcgtgtacggctcaggtggagaaaggtatgactcttatgagtcctgcgactcgagggccgtcctgagtgagcgcgacctgtaccggtcaggctatgactacagcgagcttgaccctgagatggaaatggcctatgagggccaatacgatgcctaccgcgaccagttccgcatgcgtggcaacgacaccttcggtcccagggcacagggctgggcccgggatgcccggagcggccggccaatggcctcaggctatgggcgcatgtgggaagaccccatgggggcccggggccagtgcatgtctggtgcctctcggctgcctccctcttctcccagaacatcatccccgagtacggcatgttccagggcatgcgaggtgggggcgccttcccgggcggctcccgctttggtttcgggtttggcaatggcatgaagcagatgaggcggacctggaagacctggaccacagccgacttccgaaccaagaagaagaagagaaagcagggcggcagtcctgatgagccagatagcaaagccacccgcacggactgctcggacaacagcgactcagacaatgatgagggcaccgagggggaagccacagagggccttgaaggcaccgaggctgtggagaagggctccagagtggtaagtggctctggctgggcattttctgtctgcaggcagggcgagctggcctaaagagtggtgctctccctgggggccagaggcaatgctgtgtcagctctgcgtgcatggtgaccagcatggggaggcagtgtggtctggcagaaagcacaggctgcctagctggaggcacagtttccttgttggaaaatgggatgagcccctgtgcaccaggtagtgggaggatgtgaggtttctggcacatagccgggccttgtcatttaaagccattgtaaataactgggctactctgggccaccctgcctataggatagccctgctctgtctatggagcaagcagctgttttactatataccgttgctctaataaacttggtttcttttaaaaaaaaaa

SEQ ID NO: 283496 - DNA, 3632 bp, Homo sapiens
  misc_feature (63)..(63): n is a, c, g, or t
  misc_feature (69)..(69): n is a, c, g, or t
ctgctcttgagtatcccataaatctggaatccgcagtcaccacgatgttgtgttgcccgccancatganctacacaggctttgtccagggatctgaaaccactttgcagtcgacatactcggataccagcgctcagcccacctgtgattatggatatggaacttggaactctgggacaaatagaggctacgagggctatggctatggctatggctatggccaggataacaccaccaactatgggtatggtatggccacttcacactcttgggaaatgcctagctctgacacaaatgcaaacactagtgcctcgggtagcgccagtgccgattccgttttatccagaattaaccagcgcttagatatggtgccgcatttggagacagacatgatgcaaggaggcgtgtacggctcaggtggagaaaggtatgactcttatgagtcctgcgactcgagggccgtcctgagtgagcgcgacctgtaccggtcaggctatgactacagcgagcttgaccctgagatggaaatggcctatgagggccaatacgatgcctaccgcgaccagttccgcatgcgtggcaacgacaccttcggtcccagggcacagggctgggcccgggatgcccggagcggccggccaatggcctcaggctatgggcgcatgtgggaagaccccatgggggcccggggccagtgcatgtctggtgcctctcggctgcctccctcttctcccagaacatcatccccgagtacggcatgttccagggcatgcgaggtgggggcgccttcccgggcggctcccgctttggtttcgggtttggcaatggcatgaagcagatgaggcggacctggaagacctggaccacagccgacttccgaaccaagaagaagaagagaaagcagggcggcagtcctgatgagccagatagcaaagccacccgcacggactgctcggacaacagcgactcagacaatgatgagggcaccgagggggaagccacagagggccttgaaggcaccgaggctgtggagaagggctccagagtggacggagaggatgaggagggaaaagaggatgggagagaagaaggcaaagaggatccagagaagggtgagttttcctggggtgcctggtgctagggcggctcttccaggggctcacagtgggagggacccagctgagggcagggttgcggcagacatgcggccagttggggacctcccttgtgggcccgagtgtgtgctggcagggggctttcttttcgccgcctccacccccttcccactcttcctcctccttcccaggcggaggctgtggatggtggtgacccctgcctagcacactggttttgccttcagatgggggcagctagtaaaagtgtggggaaccccaggcacgccccctgccctcggtccctcagtaacgcgcagttccaagtcctcagtggctggtgtccgatctgggaccctcggtgcagtttttacggctctggtgtgcgtatcctctcccttagcacctctccagcccctgttgggattccgtgtccccccacctgagtgatgagcgccagcaggtacctaacagcaaatccagcgtcagcccactgttgccgcggtgcccggttgggggtgggcagggccatgtgagcagcctccctgcatcccaccacctggcccctctgaacatgtgccagtgtccccacaaagataccccctctttgctttccagcctcctcctggcccactgcacagagagcatgggtgtcctggagagtggaggggtcatcgcctggcccccactccttggggcctaggccaaacccactccctgcacagcccaggatacccagccctgctcatggccagaggccttgcttggacagctattctcgatggaccctctggagtggacagtgggtgattcagccagaggccgcagggcctgccctgtcctggcagagccaaattggtgacagtgcccatctgctcccacaggggccctaaccacccaggatgaaaatggccagaccaagcgcaagttgcaggcaggcaagaagagtcaggacaagcagaaaaagcggcagcgagaccgcatggtggaaaggtaaccagcttccctccacccctctgcctctgcctcgctgtggggctgccgccaggagagcagggccatagctctgccagctcgccgccctctggcctcccttgggagccgccacctgctcggccgtgcatggaccctgcttcccgccaggcccagctcccaaggcctgactcatcccctgcccctctgcggccgcctggcgaccgctggcgtctgtgggccgagacctgacaccgctcggcaccgttgctcagaagctctggcgctaggtcactcggcgcacgaaccccaaggtgcactgggggcctgatgcccctgagggagggggccagctcatcagagactcaaggtccaaggcgcctgtgccgccccagctagctgccaagaggccaccgccgtgcccaggagagatggcagcacctgtgggctgtggcagcctcgggcctgccttctgccctgcccgccggccctgtcaggccgggcctgtctgcggctgagcccttcacgccccttggtcgggtctgtctgccctcagggctcccgcactggcgcttgcctcctccgcctcagactcttgctcttgctggaccttcctcagcctcgccggcgcccggcccctgggctctccagacaaagctgaccccgtggcccagataaggacgtccggcagaggatccagtttgtgtgttctctgtgcaaataccggaccttctatgaggacgagatggccagccatcttgacagcaagttccacaaggaacactttaagtacgtaggcaccaagctccctaagcagacggctgactttctgcaggagtacgtcactaacaagaccaagaagacagaggagctccgaaaaaccgtggaggaccttgatggcctcatccagcaaatctacagagaccaggatctgacccaggaaattgccatggagcattttgtgaagaaggtggaggcagcccattgtgcagcctgcgacctcttcattcccatgcagtttgggatcatccagaagcatctgaagaccatggatcacaaccggaaccgcaggctcatgatggagcagtccaagaagtcctccctcatggtggcccgcagtattctcaacaacaagctcatcagcaagaagctggagcgctacctgaagggcgagaaccctttcaccgacagccccgaggaggagaaggagcaggaggaggctgagggcggtgccctggacgagggggcgcagggcgaagcggcagggatctcggagggcgcagagggcgtgccggcgcagcctcccgtgcccccagagccagcccccggggccgtgtcgccgccaccgccgccgcccccagaggaggaggaggagggcgccgtgcccttgctgggaggggcgctgcaacgccagatccgcggcatcccgggcctcgacgtggaggacgacgaggagggcggcgggggcgccccgtgacccgagctcggggcgggcggagcccgcgtggccgaagctggaaaccaaacctaataaagttttcccatccca

SEQ ID NO: 283497 - DNA, 3575 bp, Homo sapiens
gggctagggtgtgtgtggaggggaccctgtggttagcagcagctatcgcagcgtcggatgttcagagcagcagaagccggcgtcgtcggatgttgtgttgcccgccaccatgagctacacaggctttgtccagggatctgaaaccactttgcagtcgacatactcggataccagcgctcagcccacctgtgattatggatatggaacttggaactctgggacaaatagaggctacgagggctatggctatggctatggctatggccaggataacaccaccaactatggaattaaccagcgcttagatatggtgccgcatttggagacagacatgatgcaaggaggcgtgtacggctcaggtggagaaaggtatgactcttatgagtcctgcgactcgagggccgtcctgagtgagcgcgacctgtaccggtcaggctatgactacagcgagcttgaccctgagatggaaatggcctatgagggccaatacgatgcctaccgcgaccagttccgcatgcgtggcaacgacaccttcggtcccagggcacagggctgggcccgggatgcccggagcggccggccaatggcctcaggctatgggcgcatgtgggaagaccccatgggggcccggggccagtgcatgtctggtgcctctcggctgcctccctcttctcccagaacatcatccccgagtacggcatgttccagggcatgcgaggtgggggcgccttcccgggcggctcccgctttggtttcgggtttggcaatggcatgaagcagatgaggcggacctggaagacctggaccacagccgacttccgaaccaagaagaagaagagaaagcagggcggcagtcctgatgagccagatagcaaagccacccgcacggactgctcggacaacagcgactcagacaatgatgagggcaccgagggggaagccacagagggccttgaaggcaccgaggctgtggagaagggctccagagtggacggagaggatgaggagggaaaagaggatgggagagaagaaggcaaagaggatccagagaagggtgagttttcctggggtgcctggtgctagggcggctcttccaggggctcacagtgggagggacccagctgagggcagggttgcggcagacatgcggccagttggggacctcccttgtgggcccgagtgtgtgctggcagggggctttcttttcgccgcctccacccccttcccactcttcctcctccttcccaggcggaggctgtggatggtggtgacccctgcctagcacactggttttgccttcagatgggggcagctagtaaaagtgtggggaaccccaggcacgccccctgccctcggtccctcagtaacgcgcagttccaagtcctcagtggctggtgtccgatctgggaccctcggtgcagtttttacggctctggtgtgcgtatcctctcccttagcacctctccagcccctgttgggattccgtgtccccccacctgagtgatgagcgccagcaggtacctaacagcaaatccagcgtcagcccactgttgccgcggtgcccggttgggggtgggcagggccatgtgagcagcctccctgcatcccaccacctggcccctctgaacatgtgccagtgtccccacaaagataccccctctttgctttccagcctcctcctggcccactgcacagagagcatgggtgtcctggagagtggaggggtcatcgcctggcccccactccttggggcctaggccaaacccactccctgcacagcccaggatacccagccctgctcatggccagaggccttgcttggacagctattctcgatggaccctctggagtggacagtgggtgattcagccagaggccgcagggcctgccctgtcctggcagagccaaattggtgacagtgcccatctgctcccacaggggccctaaccacccaggatgaaaatggccagaccaagcgcaagttgcaggcaggcaagaagagtcaggacaagcagaaaaagcggcagcgagaccgcatggtggaaaggtaaccagcttccctccacccctctgcctctgcctcgctgtggggctgccgccaggagagcagggccatagctctgccagctcgccgccctctggcctcccttgggagccgccacctgctcggccgtgcatggaccctgcttcccgccaggcccagctcccaaggcctgactcatcccctgcccctctgcggccgcctggcgaccgctggcgtctgtgggccgagacctgacaccgctcggcaccgttgctcagaagctctggcgctaggtcactcggcgcacgaaccccaaggtgcactgggggcctgatgcccctgagggagggggccagctcatcagagactcaaggtccaaggcgcctgtgccgccccagctagctgccaagaggccaccgccgtgcccaggagagatggcagcacctgtgggctgtggcagcctcgggcctgccttctgccctgcccgccggccctgtcaggccgggcctgtctgcggctgagcccttcacgccccttggtcgggtctgtctgccctcagggctcccgcactggcgcttgcctcctccgcctcagactcttgctcttgctggaccttcctcagcctcgccggcgcccggcccctgggctctccagacaaagctgaccccgtggcccagataaggacgtccggcagaggatccagtttgtgtgttctctgtgcaaataccggaccttctatgaggacgagatggccagccatcttgacagcaagttccacaaggaacactttaagtacgtaggcaccaagctccctaagcagacggctgactttctgcaggagtacgtcactaacaagaccaagaagacagaggagctccgaaaaaccgtggaggaccttgatggcctcatccagcaaatctacagagaccaggatctgacccaggaaattgccatggagcattttgtgaagaaggtggaggcagcccattgtgcagcctgcgacctcttcattcccatgcagtttgggatcatccagaagcatctgaagaccatggatcacaaccggaaccgcaggctcatgatggagcagtccaagaagtcctccctcatggtggcccgcagtattctcaacaacaagctcatcagcaagaagctggagcgctacctgaagggcgagaaccctttcaccgacagccccgaggaggagaaggagcaggaggaggctgagggcggtgccctggacgagggggcgcagggcgaagcggcagggatctcggagggcgcagagggcgtgccggcgcagcctcccgtgcccccagagccagcccccggggccgtgtcgccgccaccgccgccgcccccagaggaggaggaggagggcgccgtgcccttgctgggaggggcgctgcaacgccagatccgcggcatcccgggcctcgacgtggaggacgacgaggagggcggcgggggcgccccgtgacccgagctcggggcgggcggagcccgcgtggccgaagctggaaaccaaacctaataaagttttcccatccca

SEQ ID NO: 283498 - DNA, 2878 bp, Homo sapiens
gtttttatttagaaattatatccccaaacaagcttggaagcggctcccgctttggtttcgggtttggcaatggcatgaagcagatgaggcggacctggaagacctggaccacagccgacttccgaaccaagaagaagaagagaaagcagggcggcagtcctgatgagccagatagcaaagccacccgcacggactgctcggacaacagcgactcagacaatgatgagggcaccgagggggaagccacagagggccttgaaggcaccgaggctgtggagaagggctccagagtggacggagaggatgaggagggaaaagaggatgggagagaagaaggcaaagaggatccagagaagggtgagttttcctggggtgcctggtgctagggcggctcttccaggggctcacagtgggagggacccagctgagggcagggttgcggcagacatgcggccagttggggacctcccttgtgggcccgagtgtgtgctggcagggggctttcttttcgccgcctccacccccttcccactcttcctcctccttcccaggcggaggctgtggatggtggtgacccctgcctagcacactggttttgccttcagatgggggcagctagtaaaagtgtggggaaccccaggcacgccccctgccctcggtccctcagtaacgcgcagttccaagtcctcagtggctggtgtccgatctgggaccctcggtgcagtttttacggctctggtgtgcgtatcctctcccttagcacctctccagcccctgttgggattccgtgtccccccacctgagtgatgagcgccagcaggtacctaacagcaaatccagcgtcagcccactgttgccgcggtgcccggttgggggtgggcagggccatgtgagcagcctccctgcatcccaccacctggcccctctgaacatgtgccagtgtccccacaaagataccccctctttgctttccagcctcctcctggcccactgcacagagagcatgggtgtcctggagagtggaggggtcatcgcctggcccccactccttggggcctaggccaaacccactccctgcacagcccaggatacccagccctgctcatggccagaggccttgcttggacagctattctcgatggaccctctggagtggacagtgggtgattcagccagaggccgcagggcctgccctgtcctggcagagccaaattggtgacagtgcccatctgctcccacaggggccctaaccacccaggatgaaaatggccagaccaagcgcaagttgcaggcaggcaagaagagtcaggacaagcagaaaaagcggcagcgagaccgcatggtggaaaggtaaccagcttccctccacccctctgcctctgcctcgctgtggggctgccgccaggagagcagggccatagctctgccagctcgccgccctctggcctcccttgggagccgccacctgctcggccgtgcatggaccctgcttcccgccaggcccagctcccaaggcctgactcatcccctgcccctctgcggccgcctggcgaccgctggcgtctgtgggccgagacctgacaccgctcggcaccgttgctcagaagctctggcgctaggtcactcggcgcacgaaccccaaggtgcactgggggcctgatgcccctgagggagggggccagctcatcagagactcaaggtccaaggcgcctgtgccgccccagctagctgccaagaggccaccgccgtgcccaggagagatggcagcacctgtgggctgtggcagcctcgggcctgccttctgccctgcccgccggccctgtcaggccgggcctgtctgcggctgagcccttcacgccccttggtcgggtctgtctgccctcagggctcccgcactggcgcttgcctcctccgcctcagactcttgctcttgctggaccttcctcagcctcgccggcgcccggcccctgggctctccagacaaagctgaccccgtggcccagataaggacgtccggcagaggatccagtttgtgtgttctctgtgcaaataccggaccttctatgaggacgagatggccagccatcttgacagcaagttccacaaggaacactttaagtacgtaggcaccaagctccctaagcagacggctgactttctgcaggagtacgtcactaacaagaccaagaagacagaggagctccgaaaaaccgtggaggaccttgatggcctcatccagcaaatctacagagaccaggatctgacccaggaaattgccatggagcattttgtgaagaaggtggaggcagcccattgtgcagcctgcgacctcttcattcccatgcagtttgggatcatccagaagcatctgaagaccatggatcacaaccggaaccgcaggctcatgatggagcagtccaagaagtcctccctcatggtggcccgcagtattctcaacaacaagctcatcagcaagaagctggagcgctacctgaagggcgagaaccctttcaccgacagccccgaggaggagaaggagcaggaggaggctgagggcggtgccctggacgagggggcgcagggcgaagcggcagggatctcggagggcgcagagggcgtgccggcgcagcctcccgtgcccccagagccagcccccggggccgtgtcgccgccaccgccgccgcccccagaggaggaggaggagggcgccgtgcccttgctgggaggggcgctgcaacgccagatccgcggcatcccgggcctcgacgtggaggacgacgaggagggcggcgggggcgccccgtgacccgagctcggggcgggcggagcccgcgtggccgaagctggaaaccaaacctaataaagttttcccatccca

SEQ ID NO: 283499 - DNA, 1349 bp, Homo sapiens
cggtaccagatgagcagagaactcccccagatcccagaaggaagatgcagcaccttttcgggccctgcctcgggactgcgtactccactctgcacctcagggccacctggctcacgccagggcatccttccttccggtccccacctgggccaagtgcacacgctcctgcccagccttggtagcgaggccctccagcaactttccagcgactcgttgcctgttgcagcagctgctgtctcaggcttcagcctcctgcctgtgggaaggaagagctcctcccctgtcccctacgttgcagtaactgcagcctgcagactttctggccctttctactcccgaccccactggtcccagcctgtccctctgctgggaccgtacttcagaggcccgtgagcaaggcctgtttcagggcttgtgtctgggttgggtgaggcggcagcactatcccctgggacacttgcagcctcagcccctcgtttccttcctgtggcaggatccagtttgtgtgttctctgtgcaaataccggaccttctatgaggacgagatggccagccatcttgacagcaagttccacaaggaacactttaagtacgtaggcaccaagctccctaagcagacggctgactttctgcaggagtacgtcactaacaagaccaagaagacagaggagctccgaaaaaccgtggaggaccttgatggcctcatccagcaaatctacagagaccaggatctgacccaggaaattgccatggagcattttgtgaagaaggtggaggcagcccattgtgcagcctgcgacctcttcattcccatgcagtttgggatcatccagaagcatctgaagaccatggatcacaaccggaaccgcaggctcatgatggagcagtccaagaagtcctccctcatggtggcccgcagtattctcaacaacaagctcatcagcaagaagctggagcgctacctgaagggcgagaaccctttcaccgacagccccgaggaggagaaggagcaggaggaggctgagggcggtgccctggacgagggggcgcagggcgaagcggcagggatctcggagggcgcagagggcgtgccggcgcagcctcccgtgcccccagagccagcccccggggccgtgtcgccgccaccgccgccgcccccagaggaggaggaggagggcgccgtgcccttgctgggaggggcgctgcaacgccagatccgcggcatcccgggcctcgacgtggaggacgacgaggagggcggcgggggcgccccgtgacccgagctcggggcgggcggagcccgcgtggccgaagctggaaaccaaacctaataaagttttcccatccca

SEQ ID NO: 283500 - DNA, 960 bp, Homo sapiens
cggacgcgtgggtcgacccacgcgtcgtcgcagcgtcggatgttcagagcagcagaagccggcgtcgtcggatgttgtgttgcccgccaccatgagctacacaggctttgtccagggatctgaaaccactttgcagtcgacatactcggataccagcgctcagcccacctgtgattatggatatggaacttggaactctgggacaaatagaggcaagtgtcattcctgtgattgctgtcctgtcccttggggttgtcctggctgtgtttctctgccactgccctgcttggccaaggttgggagtggggagggggcatgtttctggggttacctactccttaacaggaggccctcatcagaatgaccagggcccatctagcttcagtggctagggtcttctctctctgtgacagaagatacccttgtatctgtgtttgtctctgtctctgtctgcctcccctctgcctgcccccaccatctgtctgtctctgtctccctcactgcaggctacgagggctatggctatggctatggctatggccaggataacaccaccaactatggaattaaccagcgcttagatatggtgccgcatttggagacagacatgatgcaaggaggcgtgtacggctcaggtggagaaaggtatgactcttatgagtcctgcgactcgagggccgtcctgagtgagcgcgacctgtaccggtcaggctatgactacagcgagcttgaccctgagatggaaatggcctatgagggccaatacgatgcccggagcggccggccaatggcctcaggctatgggcgcatgtgggaagaccccatgggggcccggggccagtgcatgtctggtgcctctcggctgcctccctcttctcccagaacatcatccccgagtacgggggcggagcccgcgtggccgaagctggaaaccaaacctaataaagttttcccatccca

SEQ ID NO: 283501 - DNA, 537 bp, Homo sapiens
ctccctcatggtggcccgcagtattctcaacaacaagctcatcagcaagaagctggagcgctacctgaaggtgaggcactggtccgggcctgccctgtccccagcttagtccccgcctgtgctccctcccttcagtgtccgcgcccctccccacagggcgagaaccctttcaccgacagccccgaggaggagaaggagcaggaggaggctgagggcggtgccctggacgagggggcgcagggcgaagcggcagggatctcggagggcgcagagggcgtgccggcgcagcctcccgtgcccccagagccagcccccggggccgtgtcgccgccaccgccgccgcccccagaggaggaggaggagggcgccgtgcccttgctgggaggggcgctgcaacgccagatccgcggcatcccgggcctcgacgtggaggacgacgaggagggcggcgggggcgccccgtgacccgagctcggggcgggcggagcccgcgtggccgaagctggaaaccaaacctaataaagttttcccatccca

SEQ ID NO: 283502 - DNA, 195 bp, Homo sapiens
cgtccagttggcggccgcctggccggtggcgcccgggccgtggaaggtccagtcgtggctgacggcgggcaccaggcgcgcgggccgcatcttgcggcggtcgtggatgaagaagagcaggcggaggtagacgaggtgcgtggcgcccaccaccacggccagcagcagcaggaagcccagcgcgccgggggcgcc

SEQ ID NO: 283503 - DNA, 6128 bp, Homo sapiens
gcggccgccgcacgccgcgccgccagcatgacggccgggaggcaggcgagcgcgcgcagcccgtcggccaggcacaggtcgagcagcaggggctgtggggtcaccttctcttcctctcttctgccaccccaagtcgtctgtgttgcgtgtcatgcagtgggacagcacgttggtccggacctcaagctacccacgttctagtcccgcctctgtcatttcctagagctgtggcctcggatccctccctggtgccacagcagctgagtgcgcatcaaatctgaagaaaatctacacagtacagacagtacagatattttggagtgtatacaataatatccctcctgtgactagcctgcctttgagatgtagttatcatttaatgagaggagagaggcgaccactttgggaagaggagagtaatgcaaagggtggcgtatggaagatgaaagtccccaaggacagcacgtccacagtttggaaagagttgctgttagcaaccatcggggaacagttcacagactgtgccgcagcagatgatgaagtaataggagttagtgtcagtgttcgggaccgagaagacgtcgtccaagtctggaatgtaaatgcctctttagtgggtgaagcgactgttttagaaaagatctatgaacttctgccccacataacttttaaagcagtattttataaaccccatgaagagcatcatgcttttgaaggtggacgtggaaaacactaattgcactctgtaaagaattctttgtcctttgctgattggttttggaaacggtcttaacaggagggagagtgaagagaagacttgccgaagccgatgctggtcaatttagagtgggtttctgtccttgcagatgggcaattaggactcaaagtggcaggtggggtggggggagattgtgtgggtttctaccgtcacattacttgctttttaaaaaaaacacacacaaaaaactttttttttggctttctaaattctctgttcttttcactctgattttttttttttttttgccgtttaaaattccttattcagcctaattattgttttctacactcccctttcattgaggcacaagaaatgggtttccctttaagtagctctgctgtacctagttaatgagaatatgcataatcgtgacaatactgcttttgaataccacactgtacaaggaggaacactagcttggagaaatctgtcttctgattatttgttgtgacacattcctatgtactgtgagctgggcattgtttttttctgtcccagggaaaagaaaaaccatacttaatgtgattttgcactgacagcacacaaatctttaattttcctttttaaaacatttttttttagtgataaaaggaaaataatagttggattgcataacatgaaaactataatcacaattcagtatcaggatataaatcaagctctaagtctttggaccctctgtggaaacatttctaacccgaattttaatttggccttttcaaccaaaggcttagagtggtagcaagggatttcttccaataggaaacctgatgtttctgatttaaagagaaggtgatattttaattgtttgaattaagctccttgcaaagttcgggtgtgtttacccacttagggctttctttcccagtcaacgctaacacattttgttaaatgatccctttccctgctcacattgtgtgtcatttctcatcatcagtagtcctccagcctgggcagctgtccccaccctttttcatgtaggtgcaggaagttaaatctcatttccaggatgcatgtgaacatttacaaagttgaactttgagtgcattctgctcatatgaattattgggattgttgatatatattgtattatgctaccaaagaaatattggttttattagaaggaaatggtcatcctctggaccatggagactagctcagaatacgctgatttccctctcctgactttgccaagcctttggctgcttttgcctgataaagggcagggccatctgaagacacttcccccagtcggctttggagtcacgggagctagtgcctgctcacacatttttcaaaagggcagtgcactcagaacttcactgtacctgggatttttaattcctcttgcagtgttgaccagcagagagacttgaggctactttaagcctccactatgtgtttgtagataaaattctccattcaaacattttaaaggactttgaacattatctgcttatggaagttgtgcccttcacttggttagtaaccacctcagccataatacttaccatcataggtttcttaaaatgctttttttttttccctaaacttgagtttccttagtgatttcaaaatgaagtataagaatatcagatccagttagcaaaagcctaggacttgtttctccaaacattgtactaacattcaacttgttttaaaattatgactcaagaattttaaaaaattattctggacatgaattaaaacttttttataatataagtatttttctgattgaaaaaaggatataattgacttcactctaattgtcatgtatatttccataagtaaatggattttgaagtatttttattttttgaactttatttaaagcatttgtgatgacatgttcaacttttgcatgtatgtagcctttgaagtaaaaataaataggaatgttaggctcacgttaatatttctagtttctgtttatgatcatggaacatgactagcacacaaagtagatttttgccccagtgaacttctgcaactgtttctgaccctttagaaaataccaactgtgagaaggatttaatttgcctaatgttaaaaacctatcatctaaattactttcagagaggattttgtcagattttggtttggaaattgttttaattgaatatttaatcataatagactttgtatgaactaagctgatttaatcagtttaaaaacctctcattaccttcttagattaaagaagctaatactgttttgagatagaaggaaatattttgtggggcatgtgacttttgtgttaaggcagtttacccatcttggctgatgtggggaaagtgcaaacttccagtagaatcccggtcttttcatccaagtgcttgcaggggcagccttgtagtctgcaaagaaccatgcagaaaccaaagagcttgcttttttgtctttgtaattccttagggtctgtgatatatgccaggaaatctgattgaaactaatatgctttttattctcccattattccctaaattgttatatcacaggcacttgcctacattgggaaagtaaggacaaataatacccatttaaagtaacttgcctatattttgactgtctttcgtaagcacttgctgaactgctgacttaactcagttttaagatttcctctttccccccaacttttccacatttcttaaatgagggtgtaatttactgcaaacatgtacatttaatataatattgctgttagattcgtggtacactttatgaagcaaaaacatgaaaaggaaaccacaactctaataaactttaaattaaagattaagatgactctttctcacccctcttcttgagtttagcccatgtctacaccatgcacacagtcacaagactttatagcttagaaactttaggtataattgggtcctatagacataatatacaatccaccaactgagccttggccgaacttgtcccttgttaaagacgtagggctagccagccacagagctgggtattgaagtcggcaagttgtatcccggtgcaggcgtccttaaatggagagtactcagaatctgccagccttaacctgcccactagccaccctaatcaagcattaaatatctgatccaatctggccactggtgtaactccgtaatcagacatcctgtttgtaaacagctcctccttctctccctctccctctcagagacagaagtggtgctggggtttggagtttgaaaataaccttcctatgacaggaagtgggcttttgctattagttgcccaactcttagaggatcccagcttgtgtctttagacaaaactgacagcctttggaacgatcgcatggtggcgctgccttccagccaacagttctggctcagcagcagaatttatccagctatgtttgtagaatttttttaagatcctactgcattttgctcttaagcttttataaaaatttgacgagaaaatgtaaaaatgatacttggcaataagacatttagttttcatgcacctaataaaaatgtgtcaaagctagatcgctccagatgtgcttaaaatatctcaaatcctaggctctcattggccttataagtgattgggaagaaaaagaataaaataaactcacatataggagatatggaaaatatttcatcaaatattatgcccaaagagagaaaattaggagttgattttttttagcactctgaatatggaacttccttttaaaaatgtaattctacccttcacctttcctacattgtatgtttctgtgagattttactcattacaagtgaaagtagaggactgcctgtgaattgtttacttctgaaaagaatatattgagatcagttaaaattactcaagagtttggtgactcaggattgtaaaaagcctggatctcaacagctgggaggagtcagagggtgaagtgggaaaaaatagggactgagaggcaacgaaaagtccctttgaacctgtggtcatttatagcaattagagtgggttgcccctctacttctcccaagaagaaatcccaaatagattcctttcatgtcagattatactgttctgattttattttctattatttttacatatacatccaaatctaagaatacttattcagattggcccactcaggccaaaagtcactgtcttgtgttctagaaattctttcatgttgctgacataaatccatttttaaaagaacattcagggactcttagaattttagagtggaagggacctttgagatcatctaccagtgcttctcaccccttagcatgcagcaaaatcactcagatacttacttattattcacatttcttgaccccagcactagaaatctgggaggatatctgcatttttaacaagtgccctagtgattctaatgctgatggtgctcagatcgctcttggagaacccctgattttatccaactcccacatatgacaaatgaggaaagcctcccaaccctaagctctgtcaggtgacctgattccaatgtatgataccaacaatcttatgaaggctggagaaaaccattaatactgagacttgagtagatgatgctcgtgaataagaactttatggctgggaccacagcagtcatgggagcccatccctggaagtccataatataaagcctttaatacagagtggtggtttttctcttttctaaataccatttcagtctgttaagagaaaagaaattagtgttcagaaaagtagttactccatatgtgcagtaactacttttctataatgtcttatggcatctggggttcagcatcattgaacaagattaaatgaacgttatagagctataaaattgcatgtaaaataacacaaaactgttcaaatgactatcaaagtagcctgggaatgaatttccactaaaattaattgtcactttcaaaacgtagcttagcaaagctgttactaaactggagagatcctttaatacatagaaatgtcaaaaaaatcaaataagtattccctaaacgatgtgagtgataagcaaaagtcattgcaaagtcagtatttttttgttcatcattgctactgaaattcagagttccattgtatatgtgtgtcttgagtgtaccttattagaatatccaatacaatagcttttggatattctatgcttttgtgtccttcagaaatcatgagattgaaggaatctgtgttaaatgtttttgttttggttgctgcctgaaaaaagttaccaactcatttagtgaaatgcaagatttctttatgaaaatttcaatttctaatatcgaagtcagataatttttcttgaacttttattttggaacagatgtttatttcggatctattaaagtgtcaactttgcattatagaactgaacatg

SEQ ID NO: 283504 - DNA, 6174 bp, Homo sapiens
cgtccagttggcggccgcctggccggtggcgcccgggccgtggaaggtccagtcgtggctgacggcgggcaccaggcgcgcgggccgcatcttgcggcggtcgtggatgaagaagagcaggcggaggtagacgaggggctgtggggtcaccttctcttcctctcttctgccaccccaagtcgtctgtgttgcgtgtcatgcagtgggacagcacgttggtccggacctcaagctacccacgttctagtcccgcctctgtcatttcctagagctgtggcctcggatccctccctggtgccacagcagctgagtgcgcatcaaatctgaagaaaatctacacagtacagacagtacagatattttggagtgtatacaataatatccctcctgtgactagcctgcctttgagatgtagttatcatttaatgagaggagagaggcgaccactttgggaagaggagagtaatgcaaagggtggcgtatggaagatgaaagtccccaaggacagcacgtccacagtttggaaagagttgctgttagcaaccatcggggaacagttcacagactgtgccgcagcagatgatgaagtaataggagttagtgtcagtgttcgggaccgagaagacgtcgtccaagtctggaatgtaaatgcctctttagtgggtgaagcgactgttttagaaaagatctatgaacttctgccccacataacttttaaagcagtattttataaaccccatgaagagcatcatgcttttgaaggtggacgtggaaaacactaattgcactctgtaaagaattctttgtcctttgctgattggttttggaaacggtcttaacaggagggagagtgaagagaagacttgccgaagccgatgctggtcaatttagagtgggtttctgtccttgcagatgggcaattaggactcaaagtggcaggtggggtggggggagattgtgtgggtttctaccgtcacattacttgctttttaaaaaaaacacacacaaaaaactttttttttggctttctaaattctctgttcttttcactctgattttttttttttttttgccgtttaaaattccttattcagcctaattattgttttctacactcccctttcattgaggcacaagaaatgggtttccctttaagtagctctgctgtacctagttaatgagaatatgcataatcgtgacaatactgcttttgaataccacactgtacaaggaggaacactagcttggagaaatctgtcttctgattatttgttgtgacacattcctatgtactgtgagctgggcattgtttttttctgtcccagggaaaagaaaaaccatacttaatgtgattttgcactgacagcacacaaatctttaattttcctttttaaaacatttttttttagtgataaaaggaaaataatagttggattgcataacatgaaaactataatcacaattcagtatcaggatataaatcaagctctaagtctttggaccctctgtggaaacatttctaacccgaattttaatttggccttttcaaccaaaggcttagagtggtagcaagggatttcttccaataggaaacctgatgtttctgatttaaagagaaggtgatattttaattgtttgaattaagctccttgcaaagttcgggtgtgtttacccacttagggctttctttcccagtcaacgctaacacattttgttaaatgatccctttccctgctcacattgtgtgtcatttctcatcatcagtagtcctccagcctgggcagctgtccccaccctttttcatgtaggtgcaggaagttaaatctcatttccaggatgcatgtgaacatttacaaagttgaactttgagtgcattctgctcatatgaattattgggattgttgatatatattgtattatgctaccaaagaaatattggttttattagaaggaaatggtcatcctctggaccatggagactagctcagaatacgctgatttccctctcctgactttgccaagcctttggctgcttttgcctgataaagggcagggccatctgaagacacttcccccagtcggctttggagtcacgggagctagtgcctgctcacacatttttcaaaagggcagtgcactcagaacttcactgtacctgggatttttaattcctcttgcagtgttgaccagcagagagacttgaggctactttaagcctccactatgtgtttgtagataaaattctccattcaaacattttaaaggactttgaacattatctgcttatggaagttgtgcccttcacttggttagtaaccacctcagccataatacttaccatcataggtttcttaaaatgctttttttttttccctaaacttgagtttccttagtgatttcaaaatgaagtataagaatatcagatccagttagcaaaagcctaggacttgtttctccaaacattgtactaacattcaacttgttttaaaattatgactcaagaattttaaaaaattattctggacatgaattaaaacttttttataatataagtatttttctgattgaaaaaaggatataattgacttcactctaattgtcatgtatatttccataagtaaatggattttgaagtatttttattttttgaactttatttaaagcatttgtgatgacatgttcaacttttgcatgtatgtagcctttgaagtaaaaataaataggaatgttaggctcacgttaatatttctagtttctgtttatgatcatggaacatgactagcacacaaagtagatttttgccccagtgaacttctgcaactgtttctgaccctttagaaaataccaactgtgagaaggatttaatttgcctaatgttaaaaacctatcatctaaattactttcagagaggattttgtcagattttggtttggaaattgttttaattgaatatttaatcataatagactttgtatgaactaagctgatttaatcagtttaaaaacctctcattaccttcttagattaaagaagctaatactgttttgagatagaaggaaatattttgtggggcatgtgacttttgtgttaaggcagtttacccatcttggctgatgtggggaaagtgcaaacttccagtagaatcccggtcttttcatccaagtgcttgcaggggcagccttgtagtctgcaaagaaccatgcagaaaccaaagagcttgcttttttgtctttgtaattccttagggtctgtgatatatgccaggaaatctgattgaaactaatatgctttttattctcccattattccctaaattgttatatcacaggcacttgcctacattgggaaagtaaggacaaataatacccatttaaagtaacttgcctatattttgactgtctttcgtaagcacttgctgaactgctgacttaactcagttttaagatttcctctttccccccaacttttccacatttcttaaatgagggtgtaatttactgcaaacatgtacatttaatataatattgctgttagattcgtggtacactttatgaagcaaaaacatgaaaaggaaaccacaactctaataaactttaaattaaagattaagatgactctttctcacccctcttcttgagtttagcccatgtctacaccatgcacacagtcacaagactttatagcttagaaactttaggtataattgggtcctatagacataatatacaatccaccaactgagccttggccgaacttgtcccttgttaaagacgtagggctagccagccacagagctgggtattgaagtcggcaagttgtatcccggtgcaggcgtccttaaatggagagtactcagaatctgccagccttaacctgcccactagccaccctaatcaagcattaaatatctgatccaatctggccactggtgtaactccgtaatcagacatcctgtttgtaaacagctcctccttctctccctctccctctcagagacagaagtggtgctggggtttggagtttgaaaataaccttcctatgacaggaagtgggcttttgctattagttgcccaactcttagaggatcccagcttgtgtctttagacaaaactgacagcctttggaacgatcgcatggtggcgctgccttccagccaacagttctggctcagcagcagaatttatccagctatgtttgtagaatttttttaagatcctactgcattttgctcttaagcttttataaaaatttgacgagaaaatgtaaaaatgatacttggcaataagacatttagttttcatgcacctaataaaaatgtgtcaaagctagatcgctccagatgtgcttaaaatatctcaaatcctaggctctcattggccttataagtgattgggaagaaaaagaataaaataaactcacatataggagatatggaaaatatttcatcaaatattatgcccaaagagagaaaattaggagttgattttttttagcactctgaatatggaacttccttttaaaaatgtaattctacccttcacctttcctacattgtatgtttctgtgagattttactcattacaagtgaaagtagaggactgcctgtgaattgtttacttctgaaaagaatatattgagatcagttaaaattactcaagagtttggtgactcaggattgtaaaaagcctggatctcaacagctgggaggagtcagagggtgaagtgggaaaaaatagggactgagaggcaacgaaaagtccctttgaacctgtggtcatttatagcaattagagtgggttgcccctctacttctcccaagaagaaatcccaaatagattcctttcatgtcagattatactgttctgattttattttctattatttttacatatacatccaaatctaagaatacttattcagattggcccactcaggccaaaagtcactgtcttgtgttctagaaattctttcatgttgctgacataaatccatttttaaaagaacattcagggactcttagaattttagagtggaagggacctttgagatcatctaccagtgcttctcaccccttagcatgcagcaaaatcactcagatacttacttattattcacatttcttgaccccagcactagaaatctgggaggatatctgcatttttaacaagtgccctagtgattctaatgctgatggtgctcagatcgctcttggagaacccctgattttatccaactcccacatatgacaaatgaggaaagcctcccaaccctaagctctgtcaggtgacctgattccaatgtatgataccaacaatcttatgaaggctggagaaaaccattaatactgagacttgagtagatgatgctcgtgaataagaactttatggctgggaccacagcagtcatgggagcccatccctggaagtccataatataaagcctttaatacagagtggtggtttttctcttttctaaataccatttcagtctgttaagagaaaagaaattagtgttcagaaaagtagttactccatatgtgcagtaactacttttctataatgtcttatggcatctggggttcagcatcattgaacaagattaaatgaacgttatagagctataaaattgcatgtaaaataacacaaaactgttcaaatgactatcaaagtagcctgggaatgaatttccactaaaattaattgtcactttcaaaacgtagcttagcaaagctgttactaaactggagagatcctttaatacatagaaatgtcaaaaaaatcaaataagtattccctaaacgatgtgagtgataagcaaaagtcattgcaaagtcagtatttttttgttcatcattgctactgaaattcagagttccattgtatatgtgtgtcttgagtgtaccttattagaatatccaatacaatagcttttggatattctatgcttttgtgtccttcagaaatcatgagattgaaggaatctgtgttaaatgtttttgttttggttgctgcctgaaaaaagttaccaactcatttagtgaaatgcaagatttctttatgaaaatttcaatttctaatatcgaagtcagataatttttcttgaacttttattttggaacagatgtttatttcggatctattaaagtgtcaactttgcattatagaactgaacatg

SEQ ID NO: 283505 - DNA, 6208 bp, Homo sapiens
cgccggagcgcgcagcgcggccgccgccgccagccccgccgaggcatcccgcaccgcctgggcccggctgggctgggggcgcctccgcagcagccgcggggtcgggaggcggccgggagggaggcagggcccaggacgcaaggtggcgacaagtcgcgtttggccccaggggctgtggggtcaccttctcttcctctcttctgccaccccaagtcgtctgtgttgcgtgtcatgcagtgggacagcacgttggtccggacctcaagctacccacgttctagtcccgcctctgtcatttcctagagctgtggcctcggatccctccctggtgccacagcagctgagtgcgcatcaaatctgaagaaaatctacacagtacagacagtacagatattttggagtgtatacaataatatccctcctgtgactagcctgcctttgagatgtagttatcatttaatgagaggagagaggcgaccactttgggaagaggagagtaatgcaaagggtggcgtatggaagatgaaagtccccaaggacagcacgtccacagtttggaaagagttgctgttagcaaccatcggggaacagttcacagactgtgccgcagcagatgatgaagtaataggagttagtgtcagtgttcgggaccgagaagacgtcgtccaagtctggaatgtaaatgcctctttagtgggtgaagcgactgttttagaaaagatctatgaacttctgccccacataacttttaaagcagtattttataaaccccatgaagagcatcatgcttttgaaggtggacgtggaaaacactaattgcactctgtaaagaattctttgtcctttgctgattggttttggaaacggtcttaacaggagggagagtgaagagaagacttgccgaagccgatgctggtcaatttagagtgggtttctgtccttgcagatgggcaattaggactcaaagtggcaggtggggtggggggagattgtgtgggtttctaccgtcacattacttgctttttaaaaaaaacacacacaaaaaactttttttttggctttctaaattctctgttcttttcactctgattttttttttttttttgccgtttaaaattccttattcagcctaattattgttttctacactcccctttcattgaggcacaagaaatgggtttccctttaagtagctctgctgtacctagttaatgagaatatgcataatcgtgacaatactgcttttgaataccacactgtacaaggaggaacactagcttggagaaatctgtcttctgattatttgttgtgacacattcctatgtactgtgagctgggcattgtttttttctgtcccagggaaaagaaaaaccatacttaatgtgattttgcactgacagcacacaaatctttaattttcctttttaaaacatttttttttagtgataaaaggaaaataatagttggattgcataacatgaaaactataatcacaattcagtatcaggatataaatcaagctctaagtctttggaccctctgtggaaacatttctaacccgaattttaatttggccttttcaaccaaaggcttagagtggtagcaagggatttcttccaataggaaacctgatgtttctgatttaaagagaaggtgatattttaattgtttgaattaagctccttgcaaagttcgggtgtgtttacccacttagggctttctttcccagtcaacgctaacacattttgttaaatgatccctttccctgctcacattgtgtgtcatttctcatcatcagtagtcctccagcctgggcagctgtccccaccctttttcatgtaggtgcaggaagttaaatctcatttccaggatgcatgtgaacatttacaaagttgaactttgagtgcattctgctcatatgaattattgggattgttgatatatattgtattatgctaccaaagaaatattggttttattagaaggaaatggtcatcctctggaccatggagactagctcagaatacgctgatttccctctcctgactttgccaagcctttggctgcttttgcctgataaagggcagggccatctgaagacacttcccccagtcggctttggagtcacgggagctagtgcctgctcacacatttttcaaaagggcagtgcactcagaacttcactgtacctgggatttttaattcctcttgcagtgttgaccagcagagagacttgaggctactttaagcctccactatgtgtttgtagataaaattctccattcaaacattttaaaggactttgaacattatctgcttatggaagttgtgcccttcacttggttagtaaccacctcagccataatacttaccatcataggtttcttaaaatgctttttttttttccctaaacttgagtttccttagtgatttcaaaatgaagtataagaatatcagatccagttagcaaaagcctaggacttgtttctccaaacattgtactaacattcaacttgttttaaaattatgactcaagaattttaaaaaattattctggacatgaattaaaacttttttataatataagtatttttctgattgaaaaaaggatataattgacttcactctaattgtcatgtatatttccataagtaaatggattttgaagtatttttattttttgaactttatttaaagcatttgtgatgacatgttcaacttttgcatgtatgtagcctttgaagtaaaaataaataggaatgttaggctcacgttaatatttctagtttctgtttatgatcatggaacatgactagcacacaaagtagatttttgccccagtgaacttctgcaactgtttctgaccctttagaaaataccaactgtgagaaggatttaatttgcctaatgttaaaaacctatcatctaaattactttcagagaggattttgtcagattttggtttggaaattgttttaattgaatatttaatcataatagactttgtatgaactaagctgatttaatcagtttaaaaacctctcattaccttcttagattaaagaagctaatactgttttgagatagaaggaaatattttgtggggcatgtgacttttgtgttaaggcagtttacccatcttggctgatgtggggaaagtgcaaacttccagtagaatcccggtcttttcatccaagtgcttgcaggggcagccttgtagtctgcaaagaaccatgcagaaaccaaagagcttgcttttttgtctttgtaattccttagggtctgtgatatatgccaggaaatctgattgaaactaatatgctttttattctcccattattccctaaattgttatatcacaggcacttgcctacattgggaaagtaaggacaaataatacccatttaaagtaacttgcctatattttgactgtctttcgtaagcacttgctgaactgctgacttaactcagttttaagatttcctctttccccccaacttttccacatttcttaaatgagggtgtaatttactgcaaacatgtacatttaatataatattgctgttagattcgtggtacactttatgaagcaaaaacatgaaaaggaaaccacaactctaataaactttaaattaaagattaagatgactctttctcacccctcttcttgagtttagcccatgtctacaccatgcacacagtcacaagactttatagcttagaaactttaggtataattgggtcctatagacataatatacaatccaccaactgagccttggccgaacttgtcccttgttaaagacgtagggctagccagccacagagctgggtattgaagtcggcaagttgtatcccggtgcaggcgtccttaaatggagagtactcagaatctgccagccttaacctgcccactagccaccctaatcaagcattaaatatctgatccaatctggccactggtgtaactccgtaatcagacatcctgtttgtaaacagctcctccttctctccctctccctctcagagacagaagtggtgctggggtttggagtttgaaaataaccttcctatgacaggaagtgggcttttgctattagttgcccaactcttagaggatcccagcttgtgtctttagacaaaactgacagcctttggaacgatcgcatggtggcgctgccttccagccaacagttctggctcagcagcagaatttatccagctatgtttgtagaatttttttaagatcctactgcattttgctcttaagcttttataaaaatttgacgagaaaatgtaaaaatgatacttggcaataagacatttagttttcatgcacctaataaaaatgtgtcaaagctagatcgctccagatgtgcttaaaatatctcaaatcctaggctctcattggccttataagtgattgggaagaaaaagaataaaataaactcacatataggagatatggaaaatatttcatcaaatattatgcccaaagagagaaaattaggagttgattttttttagcactctgaatatggaacttccttttaaaaatgtaattctacccttcacctttcctacattgtatgtttctgtgagattttactcattacaagtgaaagtagaggactgcctgtgaattgtttacttctgaaaagaatatattgagatcagttaaaattactcaagagtttggtgactcaggattgtaaaaagcctggatctcaacagctgggaggagtcagagggtgaagtgggaaaaaatagggactgagaggcaacgaaaagtccctttgaacctgtggtcatttatagcaattagagtgggttgcccctctacttctcccaagaagaaatcccaaatagattcctttcatgtcagattatactgttctgattttattttctattatttttacatatacatccaaatctaagaatacttattcagattggcccactcaggccaaaagtcactgtcttgtgttctagaaattctttcatgttgctgacataaatccatttttaaaagaacattcagggactcttagaattttagagtggaagggacctttgagatcatctaccagtgcttctcaccccttagcatgcagcaaaatcactcagatacttacttattattcacatttcttgaccccagcactagaaatctgggaggatatctgcatttttaacaagtgccctagtgattctaatgctgatggtgctcagatcgctcttggagaacccctgattttatccaactcccacatatgacaaatgaggaaagcctcccaaccctaagctctgtcaggtgacctgattccaatgtatgataccaacaatcttatgaaggctggagaaaaccattaatactgagacttgagtagatgatgctcgtgaataagaactttatggctgggaccacagcagtcatgggagcccatccctggaagtccataatataaagcctttaatacagagtggtggtttttctcttttctaaataccatttcagtctgttaagagaaaagaaattagtgttcagaaaagtagttactccatatgtgcagtaactacttttctataatgtcttatggcatctggggttcagcatcattgaacaagattaaatgaacgttatagagctataaaattgcatgtaaaataacacaaaactgttcaaatgactatcaaagtagcctgggaatgaatttccactaaaattaattgtcactttcaaaacgtagcttagcaaagctgttactaaactggagagatcctttaatacatagaaatgtcaaaaaaatcaaataagtattccctaaacgatgtgagtgataagcaaaagtcattgcaaagtcagtatttttttgttcatcattgctactgaaattcagagttccattgtatatgtgtgtcttgagtgtaccttattagaatatccaatacaatagcttttggatattctatgcttttgtgtccttcagaaatcatgagattgaaggaatctgtgttaaatgtttttgttttggttgctgcctgaaaaaagttaccaactcatttagtgaaatgcaagatttctttatgaaaatttcaatttctaatatcgaagtcagataatttttcttgaacttttattttggaacagatgtttatttcggatctattaaagtgtcaactttgcattatagaactgaacatg

SEQ ID NO: 283506 - DNA, 5911 bp, Homo sapiens
tcctgctcctgcttgcctagatccctccctggtgccacagcagctgagtgcgcatcaaatctgaagaaaatctacacagtacagacagtacagatattttggagtgtatacaataatatccctcctgtgactagcctgcctttgagatgtagttatcatttaatgagaggagagaggcgaccactttgggaagaggagagtaatgcaaagggtggcgtatggaagatgaaagtccccaaggacagcacgtccacagtttggaaagagttgctgttagcaaccatcggggaacagttcacagactgtgccgcagcagatgatgaagtaataggagttagtgtcagtgttcgggaccgagaagacgtcgtccaagtctggaatgtaaatgcctctttagtgggtgaagcgactgttttagaaaagatctatgaacttctgccccacataacttttaaagcagtattttataaaccccatgaagagcatcatgcttttgaaggtggacgtggaaaacactaattgcactctgtaaagaattctttgtcctttgctgattggttttggaaacggtcttaacaggagggagagtgaagagaagacttgccgaagccgatgctggtcaatttagagtgggtttctgtccttgcagatgggcaattaggactcaaagtggcaggtggggtggggggagattgtgtgggtttctaccgtcacattacttgctttttaaaaaaaacacacacaaaaaactttttttttggctttctaaattctctgttcttttcactctgattttttttttttttttgccgtttaaaattccttattcagcctaattattgttttctacactcccctttcattgaggcacaagaaatgggtttccctttaagtagctctgctgtacctagttaatgagaatatgcataatcgtgacaatactgcttttgaataccacactgtacaaggaggaacactagcttggagaaatctgtcttctgattatttgttgtgacacattcctatgtactgtgagctgggcattgtttttttctgtcccagggaaaagaaaaaccatacttaatgtgattttgcactgacagcacacaaatctttaattttcctttttaaaacatttttttttagtgataaaaggaaaataatagttggattgcataacatgaaaactataatcacaattcagtatcaggatataaatcaagctctaagtctttggaccctctgtggaaacatttctaacccgaattttaatttggccttttcaaccaaaggcttagagtggtagcaagggatttcttccaataggaaacctgatgtttctgatttaaagagaaggtgatattttaattgtttgaattaagctccttgcaaagttcgggtgtgtttacccacttagggctttctttcccagtcaacgctaacacattttgttaaatgatccctttccctgctcacattgtgtgtcatttctcatcatcagtagtcctccagcctgggcagctgtccccaccctttttcatgtaggtgcaggaagttaaatctcatttccaggatgcatgtgaacatttacaaagttgaactttgagtgcattctgctcatatgaattattgggattgttgatatatattgtattatgctaccaaagaaatattggttttattagaaggaaatggtcatcctctggaccatggagactagctcagaatacgctgatttccctctcctgactttgccaagcctttggctgcttttgcctgataaagggcagggccatctgaagacacttcccccagtcggctttggagtcacgggagctagtgcctgctcacacatttttcaaaagggcagtgcactcagaacttcactgtacctgggatttttaattcctcttgcagtgttgaccagcagagagacttgaggctactttaagcctccactatgtgtttgtagataaaattctccattcaaacattttaaaggactttgaacattatctgcttatggaagttgtgcccttcacttggttagtaaccacctcagccataatacttaccatcataggtttcttaaaatgctttttttttttccctaaacttgagtttccttagtgatttcaaaatgaagtataagaatatcagatccagttagcaaaagcctaggacttgtttctccaaacattgtactaacattcaacttgttttaaaattatgactcaagaattttaaaaaattattctggacatgaattaaaacttttttataatataagtatttttctgattgaaaaaaggatataattgacttcactctaattgtcatgtatatttccataagtaaatggattttgaagtatttttattttttgaactttatttaaagcatttgtgatgacatgttcaacttttgcatgtatgtagcctttgaagtaaaaataaataggaatgttaggctcacgttaatatttctagtttctgtttatgatcatggaacatgactagcacacaaagtagatttttgccccagtgaacttctgcaactgtttctgaccctttagaaaataccaactgtgagaaggatttaatttgcctaatgttaaaaacctatcatctaaattactttcagagaggattttgtcagattttggtttggaaattgttttaattgaatatttaatcataatagactttgtatgaactaagctgatttaatcagtttaaaaacctctcattaccttcttagattaaagaagctaatactgttttgagatagaaggaaatattttgtggggcatgtgacttttgtgttaaggcagtttacccatcttggctgatgtggggaaagtgcaaacttccagtagaatcccggtcttttcatccaagtgcttgcaggggcagccttgtagtctgcaaagaaccatgcagaaaccaaagagcttgcttttttgtctttgtaattccttagggtctgtgatatatgccaggaaatctgattgaaactaatatgctttttattctcccattattccctaaattgttatatcacaggcacttgcctacattgggaaagtaaggacaaataatacccatttaaagtaacttgcctatattttgactgtctttcgtaagcacttgctgaactgctgacttaactcagttttaagatttcctctttccccccaacttttccacatttcttaaatgagggtgtaatttactgcaaacatgtacatttaatataatattgctgttagattcgtggtacactttatgaagcaaaaacatgaaaaggaaaccacaactctaataaactttaaattaaagattaagatgactctttctcacccctcttcttgagtttagcccatgtctacaccatgcacacagtcacaagactttatagcttagaaactttaggtataattgggtcctatagacataatatacaatccaccaactgagccttggccgaacttgtcccttgttaaagacgtagggctagccagccacagagctgggtattgaagtcggcaagttgtatcccggtgcaggcgtccttaaatggagagtactcagaatctgccagccttaacctgcccactagccaccctaatcaagcattaaatatctgatccaatctggccactggtgtaactccgtaatcagacatcctgtttgtaaacagctcctccttctctccctctccctctcagagacagaagtggtgctggggtttggagtttgaaaataaccttcctatgacaggaagtgggcttttgctattagttgcccaactcttagaggatcccagcttgtgtctttagacaaaactgacagcctttggaacgatcgcatggtggcgctgccttccagccaacagttctggctcagcagcagaatttatccagctatgtttgtagaatttttttaagatcctactgcattttgctcttaagcttttataaaaatttgacgagaaaatgtaaaaatgatacttggcaataagacatttagttttcatgcacctaataaaaatgtgtcaaagctagatcgctccagatgtgcttaaaatatctcaaatcctaggctctcattggccttataagtgattgggaagaaaaagaataaaataaactcacatataggagatatggaaaatatttcatcaaatattatgcccaaagagagaaaattaggagttgattttttttagcactctgaatatggaacttccttttaaaaatgtaattctacccttcacctttcctacattgtatgtttctgtgagattttactcattacaagtgaaagtagaggactgcctgtgaattgtttacttctgaaaagaatatattgagatcagttaaaattactcaagagtttggtgactcaggattgtaaaaagcctggatctcaacagctgggaggagtcagagggtgaagtgggaaaaaatagggactgagaggcaacgaaaagtccctttgaacctgtggtcatttatagcaattagagtgggttgcccctctacttctcccaagaagaaatcccaaatagattcctttcatgtcagattatactgttctgattttattttctattatttttacatatacatccaaatctaagaatacttattcagattggcccactcaggccaaaagtcactgtcttgtgttctagaaattctttcatgttgctgacataaatccatttttaaaagaacattcagggactcttagaattttagagtggaagggacctttgagatcatctaccagtgcttctcaccccttagcatgcagcaaaatcactcagatacttacttattattcacatttcttgaccccagcactagaaatctgggaggatatctgcatttttaacaagtgccctagtgattctaatgctgatggtgctcagatcgctcttggagaacccctgattttatccaactcccacatatgacaaatgaggaaagcctcccaaccctaagctctgtcaggtgacctgattccaatgtatgataccaacaatcttatgaaggctggagaaaaccattaatactgagacttgagtagatgatgctcgtgaataagaactttatggctgggaccacagcagtcatgggagcccatccctggaagtccataatataaagcctttaatacagagtggtggtttttctcttttctaaataccatttcagtctgttaagagaaaagaaattagtgttcagaaaagtagttactccatatgtgcagtaactacttttctataatgtcttatggcatctggggttcagcatcattgaacaagattaaatgaacgttatagagctataaaattgcatgtaaaataacacaaaactgttcaaatgactatcaaagtagcctgggaatgaatttccactaaaattaattgtcactttcaaaacgtagcttagcaaagctgttactaaactggagagatcctttaatacatagaaatgtcaaaaaaatcaaataagtattccctaaacgatgtgagtgataagcaaaagtcattgcaaagtcagtatttttttgttcatcattgctactgaaattcagagttccattgtatatgtgtgtcttgagtgtaccttattagaatatccaatacaatagcttttggatattctatgcttttgtgtccttcagaaatcatgagattgaaggaatctgtgttaaatgtttttgttttggttgctgcctgaaaaaagttaccaactcatttagtgaaatgcaagatttctttatgaaaatttcaatttctaatatcgaagtcagataatttttcttgaacttttattttggaacagatgtttatttcggatctattaaagtgtcaactttgcattatagaactgaacatg

SEQ ID NO: 283507 - DNA, 6076 bp, Homo sapiens
ccaacttttaaagcagtattttataaaccccatgaagagcatcatgcttttgaaggtggacgtggaaaacactaattgcactctgtaaagaattctttgtcctttgctgattggctttgggaacggtcttaacaggagggagagtgaagagaagacttgccgaagccgatgctggtcaatttagaatccctccctggtgccacagcagctgagtgcgcatcaaatctgaagaaaatctacacagtacagacagtacagatattttggagtgtatacaataatatccctcctgtgactagcctgcctttgagatgtagttatcatttaatgagaggagagaggcgaccactttgggaagaggagagtaatgcaaagggtggcgtatggaagatgaaagtccccaaggacagcacgtccacagtttggaaagagttgctgttagcaaccatcggggaacagttcacagactgtgccgcagcagatgatgaagtaataggagttagtgtcagtgttcgggaccgagaagacgtcgtccaagtctggaatgtaaatgcctctttagtgggtgaagcgactgttttagaaaagatctatgaacttctgccccacataacttttaaagcagtattttataaaccccatgaagagcatcatgcttttgaaggtggacgtggaaaacactaattgcactctgtaaagaattctttgtcctttgctgattggttttggaaacggtcttaacaggagggagagtgaagagaagacttgccgaagccgatgctggtcaatttagagtgggtttctgtccttgcagatgggcaattaggactcaaagtggcaggtggggtggggggagattgtgtgggtttctaccgtcacattacttgctttttaaaaaaaacacacacaaaaaactttttttttggctttctaaattctctgttcttttcactctgattttttttttttttttgccgtttaaaattccttattcagcctaattattgttttctacactcccctttcattgaggcacaagaaatgggtttccctttaagtagctctgctgtacctagttaatgagaatatgcataatcgtgacaatactgcttttgaataccacactgtacaaggaggaacactagcttggagaaatctgtcttctgattatttgttgtgacacattcctatgtactgtgagctgggcattgtttttttctgtcccagggaaaagaaaaaccatacttaatgtgattttgcactgacagcacacaaatctttaattttcctttttaaaacatttttttttagtgataaaaggaaaataatagttggattgcataacatgaaaactataatcacaattcagtatcaggatataaatcaagctctaagtctttggaccctctgtggaaacatttctaacccgaattttaatttggccttttcaaccaaaggcttagagtggtagcaagggatttcttccaataggaaacctgatgtttctgatttaaagagaaggtgatattttaattgtttgaattaagctccttgcaaagttcgggtgtgtttacccacttagggctttctttcccagtcaacgctaacacattttgttaaatgatccctttccctgctcacattgtgtgtcatttctcatcatcagtagtcctccagcctgggcagctgtccccaccctttttcatgtaggtgcaggaagttaaatctcatttccaggatgcatgtgaacatttacaaagttgaactttgagtgcattctgctcatatgaattattgggattgttgatatatattgtattatgctaccaaagaaatattggttttattagaaggaaatggtcatcctctggaccatggagactagctcagaatacgctgatttccctctcctgactttgccaagcctttggctgcttttgcctgataaagggcagggccatctgaagacacttcccccagtcggctttggagtcacgggagctagtgcctgctcacacatttttcaaaagggcagtgcactcagaacttcactgtacctgggatttttaattcctcttgcagtgttgaccagcagagagacttgaggctactttaagcctccactatgtgtttgtagataaaattctccattcaaacattttaaaggactttgaacattatctgcttatggaagttgtgcccttcacttggttagtaaccacctcagccataatacttaccatcataggtttcttaaaatgctttttttttttccctaaacttgagtttccttagtgatttcaaaatgaagtataagaatatcagatccagttagcaaaagcctaggacttgtttctccaaacattgtactaacattcaacttgttttaaaattatgactcaagaattttaaaaaattattctggacatgaattaaaacttttttataatataagtatttttctgattgaaaaaaggatataattgacttcactctaattgtcatgtatatttccataagtaaatggattttgaagtatttttattttttgaactttatttaaagcatttgtgatgacatgttcaacttttgcatgtatgtagcctttgaagtaaaaataaataggaatgttaggctcacgttaatatttctagtttctgtttatgatcatggaacatgactagcacacaaagtagatttttgccccagtgaacttctgcaactgtttctgaccctttagaaaataccaactgtgagaaggatttaatttgcctaatgttaaaaacctatcatctaaattactttcagagaggattttgtcagattttggtttggaaattgttttaattgaatatttaatcataatagactttgtatgaactaagctgatttaatcagtttaaaaacctctcattaccttcttagattaaagaagctaatactgttttgagatagaaggaaatattttgtggggcatgtgacttttgtgttaaggcagtttacccatcttggctgatgtggggaaagtgcaaacttccagtagaatcccggtcttttcatccaagtgcttgcaggggcagccttgtagtctgcaaagaaccatgcagaaaccaaagagcttgcttttttgtctttgtaattccttagggtctgtgatatatgccaggaaatctgattgaaactaatatgctttttattctcccattattccctaaattgttatatcacaggcacttgcctacattgggaaagtaaggacaaataatacccatttaaagtaacttgcctatattttgactgtctttcgtaagcacttgctgaactgctgacttaactcagttttaagatttcctctttccccccaacttttccacatttcttaaatgagggtgtaatttactgcaaacatgtacatttaatataatattgctgttagattcgtggtacactttatgaagcaaaaacatgaaaaggaaaccacaactctaataaactttaaattaaagattaagatgactctttctcacccctcttcttgagtttagcccatgtctacaccatgcacacagtcacaagactttatagcttagaaactttaggtataattgggtcctatagacataatatacaatccaccaactgagccttggccgaacttgtcccttgttaaagacgtagggctagccagccacagagctgggtattgaagtcggcaagttgtatcccggtgcaggcgtccttaaatggagagtactcagaatctgccagccttaacctgcccactagccaccctaatcaagcattaaatatctgatccaatctggccactggtgtaactccgtaatcagacatcctgtttgtaaacagctcctccttctctccctctccctctcagagacagaagtggtgctggggtttggagtttgaaaataaccttcctatgacaggaagtgggcttttgctattagttgcccaactcttagaggatcccagcttgtgtctttagacaaaactgacagcctttggaacgatcgcatggtggcgctgccttccagccaacagttctggctcagcagcagaatttatccagctatgtttgtagaatttttttaagatcctactgcattttgctcttaagcttttataaaaatttgacgagaaaatgtaaaaatgatacttggcaataagacatttagttttcatgcacctaataaaaatgtgtcaaagctagatcgctccagatgtgcttaaaatatctcaaatcctaggctctcattggccttataagtgattgggaagaaaaagaataaaataaactcacatataggagatatggaaaatatttcatcaaatattatgcccaaagagagaaaattaggagttgattttttttagcactctgaatatggaacttccttttaaaaatgtaattctacccttcacctttcctacattgtatgtttctgtgagattttactcattacaagtgaaagtagaggactgcctgtgaattgtttacttctgaaaagaatatattgagatcagttaaaattactcaagagtttggtgactcaggattgtaaaaagcctggatctcaacagctgggaggagtcagagggtgaagtgggaaaaaatagggactgagaggcaacgaaaagtccctttgaacctgtggtcatttatagcaattagagtgggttgcccctctacttctcccaagaagaaatcccaaatagattcctttcatgtcagattatactgttctgattttattttctattatttttacatatacatccaaatctaagaatacttattcagattggcccactcaggccaaaagtcactgtcttgtgttctagaaattctttcatgttgctgacataaatccatttttaaaagaacattcagggactcttagaattttagagtggaagggacctttgagatcatctaccagtgcttctcaccccttagcatgcagcaaaatcactcagatacttacttattattcacatttcttgaccccagcactagaaatctgggaggatatctgcatttttaacaagtgccctagtgattctaatgctgatggtgctcagatcgctcttggagaacccctgattttatccaactcccacatatgacaaatgaggaaagcctcccaaccctaagctctgtcaggtgacctgattccaatgtatgataccaacaatcttatgaaggctggagaaaaccattaatactgagacttgagtagatgatgctcgtgaataagaactttatggctgggaccacagcagtcatgggagcccatccctggaagtccataatataaagcctttaatacagagtggtggtttttctcttttctaaataccatttcagtctgttaagagaaaagaaattagtgttcagaaaagtagttactccatatgtgcagtaactacttttctataatgtcttatggcatctggggttcagcatcattgaacaagattaaatgaacgttatagagctataaaattgcatgtaaaataacacaaaactgttcaaatgactatcaaagtagcctgggaatgaatttccactaaaattaattgtcactttcaaaacgtagcttagcaaagctgttactaaactggagagatcctttaatacatagaaatgtcaaaaaaatcaaataagtattccctaaacgatgtgagtgataagcaaaagtcattgcaaagtcagtatttttttgttcatcattgctactgaaattcagagttccattgtatatgtgtgtcttgagtgtaccttattagaatatccaatacaatagcttttggatattctatgcttttgtgtccttcagaaatcatgagattgaaggaatctgtgttaaatgtttttgttttggttgctgcctgaaaaaagttaccaactcatttagtgaaatgcaagatttctttatgaaaatttcaatttctaatatcgaagtcagataatttttcttgaacttttattttggaacagatgtttatttcggatctattaaagtgtcaactttgcattatagaactgaacatg

SEQ ID NO: 283508 - DNA, 6298 bp, Homo sapiens
gcggccgccgcacgccgcgccgccagcatgacggccgggaggcaggcgagcgcgcgcagcccgtcggccaggcacaggtcgagcagcaggggctgtggggtcaccttctcttcctctcttctgccaccccaagtcgtctgtgttgcgtgtcatgcagtgggacagcacgttggtccggacctcaagctacccacgttctagtcccgcctctgtcatttcctagagctgtggcctcggatccctccctggtgccacagcagctgagtgcgcatcaaatctgaagaaaatctacacagtacagacagtacagatattttggagtgtatacaataatatccctcctgtgactagcctgcctttgagatgtagttatcatttaatgagaggagagaggcgaccactttgggaagaggagagtaatgcaaagggtggcgtatggaagatgaaagtccccaaggacagcacgtccacagtttggaaagagttgctgttagcaaccatcggggaacagttcacagactgtgccgcagcagatgatgaagtaataggagttagtgtcagtgttcgggaccgagaagacgtcgtccaagtctggaatgtaaatgcctctttagtgggtgaagcgactgttttagaaaagatctatgaacttctgccccacataacttttaaagcagtattttataaaccccatgaagagcatcatgcttttgaaggtggacgtggaaaacactaattgcactctgtaaagaattctttgtcctttgctgattggttttggaaacggtcttaacaggagggagagtgaagagaagacttgccgaagccgatgctggtcaatttagagtgggtttctgtccttgcagatgggcaattaggactcaaagtggcaggtggggtggggggagattgtgtgggtttctaccgtcacattacttgctttttaaaaaaaacacacacaaaaaactttttttttggctttctaaattctctgttcttttcactctgattttttttttttttttgccgtttaaaattccttattcagcctaattattgttttctacactcccctttcattgaggcacaagaaatgggtttccctttaagtagctctgctgtacctagttaatgagaatatgcataatcgtgacaatactgcttttgaataccacactgtacaaggaggaacactagcttggagaaatctgtcttctgattatttgttgtgacacattcctatgtactgtgagctgggcattgtttttttctgtcccagggaaaagaaaaaccatacttaatgtgattttgcactgacagcacacaaatctttaattttcctttttaaaacatttttttttagtgataaaaggaaaataatagttggattgcataacatgaaaactataatcacaattcagtatcaggatataaatcaagctctaagtctttggaccctctgtggaaacatttctaacccgaattttaatttggccttttcaaccaaaggcttagagtggtagcaagggatttcttccaataggaaacctgatgtttctgatttaaagagaaggtgatattttaattgtttgaattaagctccttgcaaagttcgggtgtgtttacccacttagggctttctttcccagtcaacgctaacacattttgttaaatgatccctttccctgctcacattgtgtgtcatttctcatcatcagtagtcctccagcctgggcagctgtccccaccctttttcatgtaggtgcaggaagttaaatctcatttccaggatgcatgtgaacatttacaaagttgaactttgagtgcattctgctcatatgaattattgggattgttgatatatattgtattatgctaccaaagaaatattggttttattagaaggaaatggtcatcctctggaccatggagactagctcagaatacgctgatttccctctcctgactttgccaagcctttggctgcttttgcctgataaagggcagggccatctgaagacacttcccccagtcggctttggagtcacgggagctagtgcctgctcacacatttttcaaaagggcagtgcactcagaacttcactgtacctgggatttttaattcctcttgcagtgttgaccagcagagagacttgaggctactttaagcctccactatgtgtttgtagataaaattctccattcaaacattttaaaggactttgaacattatctgcttatggaagttgtgcccttcacttggttagtaaccacctcagccataatacttaccatcataggtttcttaaaatgctttttttttttccctaaacttgagtttccttagtgatttcaaaatgaagtataagaatatcagatccagttagcaaaagcctaggacttgtttctccaaacattgtactaacattcaacttgttttaaaattatgactcaagaattttaaaaaattattctggacatgaattaaaacttttttataatataagtatttttctgattgaaaaaaggatataattgacttcactctaattgtcatgtatatttccataagtaaatggattttgaagtatttttattttttgaactttatttaaagcatttgtgatgacatgttcaacttttgcatgtatgtagcctttgaagtaaaaataaataggaatgttaggctcacgttaatatttctagtttctgtttatgatcatggaacatgactagcacacaaagtagatttttgccccagtgaacttctgcaactgtttctgaccctttagaaaataccaactgtgagaaggatttaatttgcctaatgttaaaaacctatcatctaaattactttcagagaggattttgtcagattttggtttggaaattgttttaattgaatatttaatcataatagactttgtatgaactaagctgatttaatcagtttaaaaacctctcattaccttcttagattaaagaagctaatactgttttgagatagaaggaaatattttgtggggcatgtgacttttgtgttaaggcagtttacccatcttggctgatgtggggaaagtgcaaacttccagtagaatcccggtcttttcatccaagtgcttgcaggggcagccttgtagtctgcaaagaaccatgcagaaaccaaagagcttgcttttttgtctttgtaattccttagggtctgtgatatatgccaggaaatctgattgaaactaatatgctttttattctcccattattccctaaattgttatatcacaggcacttgcctacattgggaaagtaaggacaaataatacccatttaaagtaacttgcctatattttgactgtctttcgtaagcacttgctgaactgctgacttaactcagttttaagatttcctctttccccccaacttttccacatttcttaaatgagggtgtaatttactgcaaacatgtacatttaatataatattgctgttagattcgtggtacactttatgaagcaaaaacatgaaaaggaaaccacaactctaataaactttaaattaaagattaagatgactctttctcacccctcttcttgagtttagcccatgtctacaccatgcacacagtcacaagactttatagcttagaaactttaggtataattgggtcctatagacataatatacaatccaccaactgagccttggccgaacttgtcccttgttaaagacgtagggctagccagccacagagctgggtattgaagtcggcaagttgtatcccggtgcaggcgtccttaaatggagagtactcagaatctgccagccttaacctgcccactagccaccctaatcaagcattaaatatctgatccaatctggccactggtgtaactccgtaatcagacatcctgtttgtaaacagctcctccttctctccctctccctctcagagacagaagtggtgctggggtttggagtttgaaaataaccttcctatgacaggaagtgggcttttgctattagttgcccaactcttagaggatcccagcttgtgtctttagacaaaactgacagcctttggaacgatcgcatggtggcgctgccttccagccaacagttctggctcagcagcagaatttatccagctatgtttgtagaatttttttaagatcctactgcattttgctcttaagcttttataaaaatttgacgagaaaatgtaaaaatgatacttggcaataagacatttagttttcatgcacctaataaaaatgtgtcaaagctagatcgctccagatgtgcttaaaatatctcaaatcctaggctctcattggccttataagtgattgggaagaaaaagaataaaataaactcacatataggagatatggaaaatatttcatcaaatattatgcccaaagagagaaaattaggagttgattttttttagcactctgaatatggaacttccttttaaaaatgtaattctacccttcacctttcctacattgtatgtttctgtgagattttactcattacaagtgaaagtagaggactgcctgtgaattgtttacttctgaaaagaatatattgagatcagttaaaattactcaagagtttggtgactcaggattgtaaaaagcctggatctcaacagctgggaggagtcagagggtgaagtgggaaaaaatagggactgagaggcaacgaaaagtccctttgaacctgtggtcatttatagcaattagagtgggttgcccctctacttctcccaagaagaaatcccaaatagattcctttcatgtcagattatactgttctgattttattttctattatttttacatatacatccaaatctaagaatacttattcagattggcccactcaggccaaaagtcactgtcttgtgttctagaaattctttcatgttgctgacataaatccatttttaaaagaacattcagggactcttagaattttagagtggaagggacctttgagatcatctaccagtgcttctcaccccttagcatgcagcaaaatcactcagatacttacttattattcacatttcttgaccccagcactagaaatctgggaggatatctgcatttttaacaagtgccctagtgattctaatgctgatggtgctcagatcgctcttggagaacccctgattttatccaactcccacatatgacaaatgaggaaagcctcccaaccctaagctctgtcaggtgacctgattccaatgtatgataccaacaatcttatgaaggctggagaaaaccattaatactgagacttgagtagatgatgctcgtgaataagaactttatggctgggaccacagcagtcatgggagcccatccctggaagtccataatataaagcctttaatacagagtggtggtttttctcttttctaaataccatttcagtctgttaagagaaaagaaattagtgttcagaaaagtagttactccatatgtgcagtaactacttttctataatgtcttatggcatctggggttcagcatcattgaacaagattaaatgaacgttatagagctataaaattgcatgtaaaataacacaaaactgttcaaatgactatcaaagtagcctgggaatgaatttccactaaaattaattgtcactttcaaaacgtagcttagcaaagctgttactaaactggagagatcctttaatacatagaaatgtcaaaaaaatcaaataagtattccctaaacgatgtgagtgataagcaaaagtcattgcaaagtcagtatttttttgttcatcattgctactgaaattcagagttccattgtatatgtgtgtcttgagtgtaccttattagaatatccaatacaatagcttttggatattctatgcttttgtgtccttcagaaatcatgagattgaaggaatctgtgttaaatgtttttgttttggttgctgcctgaaaaaagttaccaactcatttagtgaaatgcaagatttctttatgaaaatttcaatttctaatatcgaagtcagataatttttcttgaacttttattttggaacagatgtttatttcggatctattaaagtgtcaactttgcattatagaactgaacatgaagtaaattgagtgtttctgagttttctatagaaaatttatgctacctctcatcttttcacatacaaataagcaacttttaatgaaggcttagggtgaaaattttaattttagcactttacattacatgatgaatggtgaatattaaaggactttgaacattttaataaa

SEQ ID NO: 283509 - DNA, 3562 bp, Homo sapiens
gcggccgccgcacgccgcgccgccagcatgacggccgggaggcaggcgagcgcgcgcagcccgtcggccaggcacaggtcgagcagcaggggctgtggggtcaccttctcttcctctcttctgccaccccaagtcgtctgtgttgcgtgtcatgcagtgggacagcacgttggtccggacctcaagctacccacgttctagtcccgcctctgtcatttcctagagctgtggcctcggatccctccctggtgccacagcagctgagtgcgcatcaaatctgaagaaaatctacacagtacagacagtacagatattttggagtgtatacaataatatccctcctgtgactagcctgcctttgagatgtagttatcatttaatgagaggagagaggcgaccactttgggaagaggagagtaatgcaaagggtggcgtatggaagatgaaagtccccaaggacagcacgtccacagtttggaaagagttgctgttagcaaccatcggggaacagttcacagactgtgccgcagcagatgatgaagtaataggagttagtgtcagtgttcgggaccgagaagacgtcgtccaagtctggaatgtaaatgcctctttagtgggtgaagcgactgttttagaaaagatctatgaacttctgccccacataacttttaaagcagtattttataaaccccatgaagagcatcatgcttttgaaggtggacgtggaaaacactaattgcactctgtaaagaattctttgtcctttgctgattggttttggaaacggtcttaacaggagggagagtgaagagaagacttgccgaagccgatgctggtcaatttagagtgggtttctgtccttgcagatgggcaattaggactcaaagtggcaggtggggtggggggagattgtgtgggtttctaccgtcacattacttgctttttaaaaaaaacacacacaaaaaactttttttttggctttctaaattctctgttcttttcactctgattttttttttttttttgccgtttaaaattccttattcagcctaattattgttttctacactcccctttcattgaggcacaagaaatgggtttccctttaagtagctctgctgtacctagttaatgagaatatgcataatcgtgacaatactgcttttgaataccacactgtacaaggaggaacactagcttggagaaatctgtcttctgattatttgttgtgacacattcctatgtactgtgagctgggcattgtttttttctgtcccagggaaaagaaaaaccatacttaatgtgattttgcactgacagcacacaaatctttaattttcctttttaaaacatttttttttagtgataaaaggaaaataatagttggattgcataacatgaaaactataatcacaattcagtatcaggatataaatcaagctctaagtctttggaccctctgtggaaacatttctaacccgaattttaatttggccttttcaaccaaaggcttagagtggtagcaagggatttcttccaataggaaacctgatgtttctgatttaaagagaaggtgatattttaattgtttgaattaagctccttgcaaagttcgggtgtgtttacccacttagggctttctttcccagtcaacgctaacacattttgttaaatgatccctttccctgctcacattgtgtgtcatttctcatcatcagtagtcctccagcctgggcagctgtccccaccctttttcatgtaggtgcaggaagttaaatctcatttccaggatgcatgtgaacatttacaaagttgaactttgagtgcattctgctcatatgaattattgggattgttgatatatattgtattatgctaccaaagaaatattggttttattagaaggaaatggtcatcctctggaccatggagactagctcagaatacgctgatttccctctcctgactttgccaagcctttggctgcttttgcctgataaagggcagggccatctgaagacacttcccccagtcggctttggagtcacgggagctagtgcctgctcacacatttttcaaaagggcagtgcactcagaacttcactgtacctgggatttttaattcctcttgcagtgttgaccagcagagagacttgaggctactttaagcctccactatgtgtttgtagataaaattctccattcaaacattttaaaggactttgaacattatctgcttatggaagttgtgcccttcacttggttagtaaccacctcagccataatacttaccatcataggtttcttaaaatgctttttttttttccctaaacttgagtttccttagtgatttcaaaatgaagtataagaatatcagatccagttagcaaaagcctaggacttgtttctccaaacattgtactaacattcaacttgttttaaaattatgactcaagaattttaaaaaattattctggacatgaattaaaacttttttataatataagtatttttctgattgaaaaaaggatataattgacttcactctaattgtcatgtatatttccataagtaaatggattttgaagtatttttattttttgaactttatttaaagcatttgtgatgacatgttcaacttttgcatgtatgtagcctttgaagtaaaaataaataggaatgttaggctcacgttaatatttctagtttctgtttatgatcatggaacatgactagcacacaaagtagatttttgccccagtgaacttctgcaactgtttctgaccctttagaaaataccaactgtgagaaggatttaatttgcctaatgttaaaaacctatcatctaaattactttcagagaggattttgtcagattttggtttggaaattgttttaattgaatatttaatcataatagactttgtatgaactaagctgatttaatcagtttaaaaacctctcattaccttcttagattaaagaagctaatactgttttgagatagaaggaaatattttgtggggcatgtgacttttgtgttaaggcagtttacccatcttggctgatgtggggaaagtgcaaacttccagtagaatcccggtcttttcatccaagtgcttgcaggggcagccttgtagtctgcaaagaaccatgcagaaaccaaagagcttgcttttttgtctttgtaattccttagggtctgtgatatatgccaggaaatctgattgaaactaatatgctttttattctcccattattccctaaattgttatatcacaggcacttgcctacattgggaaagtaaggacaaataatacccatttaaagtaacttgcctatattttgactgtctttcgtaagcacttgctgaactgctgacttaactcagttttaagatttcctctttccccccaacttttccacatttcttaaatgagggtgtaatttactgcaaacatgtacatttaatataatattgctgttagattcgtggtacactttatgaagcaaaaacatgaaaaggaaaccacaactctaataaactttaaattaaagatta

SEQ ID NO: 283510 - DNA, 2590 bp, Homo sapiens
gcggccgccgcacgccgcgccgccagcatgacggccgggaggcaggcgagcgcgcgcagcccgtcggccaggcacaggtcgagcagcaggggctgtggggtcaccttctcttcctctcttctgccaccccaagtcgtctgtgttgcgtgtcatgcagtgggacagcacgttggtccggacctcaagctacccacgttctagtcccgcctctgtcatttcctagagctgtggcctcggatccctccctggtgccacagcagctgagtgcgcatcaaatctgaagaaaatctacacagtacagacagtacagatattttggagtgtatacaataatatccctcctgtgactagcctgcctttgagatgtagttatcatttaatgagaggagagaggcgaccactttgggaagaggagagtaatgcaaagggtggcgtatggaagatgaaagtccccaaggacagcacgtccacagtttggaaagagttgctgttagcaaccatcggggaacagttcacagactgtgccgcagcagatgatgaagtaataggagttagtgtcagtgttcgggaccgagaagacgtcgtccaagtctggaatgtaaatgcctctttagtgggtgaagcgactgttttagaaaagatctatgaacttctgccccacataacttttaaagcagtattttataaaccccatgaagagcatcatgcttttgaaggtggacgtggaaaacactaattgcactctgtaaagaattctttgtcctttgctgattggttttggaaacggtcttaacaggagggagagtgaagagaagacttgccgaagccgatgctggtcaatttagagtgggtttctgtccttgcagatgggcaattaggactcaaagtggcaggtggggtggggggagattgtgtgggtttctaccgtcacattacttgctttttaaaaaaaacacacacaaaaaactttttttttggctttctaaattctctgttcttttcactctgattttttttttttttttgccgtttaaaattccttattcagcctaattattgttttctacactcccctttcattgaggcacaagaaatgggtttccctttaagtagctctgctgtacctagttaatgagaatatgcataatcgtgacaatactgcttttgaataccacactgtacaaggaggaacactagcttggagaaatctgtcttctgattatttgttgtgacacattcctatgtactgtgagctgggcattgtttttttctgtcccagggaaaagaaaaaccatacttaatgtgattttgcactgacagcacacaaatctttaattttcctttttaaaacatttttttttagtgataaaaggaaaataatagttggattgcataacatgaaaactataatcacaattcagtatcaggatataaatcaagctctaagtctttggaccctctgtggaaacatttctaacccgaattttaatttggccttttcaaccaaaggcttagagtggtagcaagggatttcttccaataggaaacctgatgtttctgatttaaagagaaggtgatattttaattgtttgaattaagctccttgcaaagttcgggtgtgtttacccacttagggctttctttcccagtcaacgctaacacattttgttaaatgatccctttccctgctcacattgtgtgtcatttctcatcatcagtagtcctccagcctgggcagctgtccccaccctttttcatgtaggtgcaggaagttaaatctcatttccaggatgcatgtgaacatttacaaagttgaactttgagtgcattctgctcatatgaattattgggattgttgatatatattgtattatgctaccaaagaaatattggttttattagaaggaaatggtcatcctctggaccatggagactagctcagaatacgctgatttccctctcctgactttgccaagcctttggctgcttttgcctgataaagggcagggccatctgaagacacttcccccagtcggctttggagtcacgggagctagtgcctgctcacacatttttcaaaagggcagtgcactcagaacttcactgtacctgggatttttaattcctcttgcagtgttgaccagcagagagacttgaggctactttaagcctccactatgtgtttgtagataaaattctccattcaaacattttaaaggactttgaacattatctgcttatggaagttgtgcccttcacttggttagtaaccacctcagccataatacttaccatcataggtttcttaaaatgctttttttttttccctaaacttgagtttccttagtgatttcaaaatgaagtataagaatatcagatccagttagcaaaagcctaggacttgtttctccaaacattgtactaacattcaacttgttttaaaattatgactcaagaattttaaaaaattattctggacatgaattaaaacttttttataatataagtatttttctgattgaaaaaaggatataattgacttcactctaattgtcatgtatatttccataagtaaatggattttgaagta

SEQ ID NO: 283511 - DNA, 879 bp, Homo sapiens
ttatgattattttttcccgcccaccgtataagggacggagcagacgaccccctatccacaaatttatgggatacttcatgttgcccatgctgttctcaaattcctgggcttcatcaatcctcctgccttggcctcccaagtagctgagaccacctacagtcatgatccactgttgactctagattgaaggatcctattggacagataagccactatttagggaagtccagtaacctgcctgaggccacataaccaggggacagcagagcccagggtcagcatccatgcctgctaacttttccacttcccactgccctcagtacacctcggcctggcaggcttcaggatgacctccgacctctgggagtgcaagttcctctgggatagctgtgagagacccaaactcacctcttctaaccgtgtgcgcttctcagaaggctctgacccatcactgtcatttcctgaatgctcttcatcctcctcttcatccctgaagatgtcttcataggcgggaacttcaaggtcatcatcttgtttaatgagtaatttgatctaagttcaaaacaaaaaggaattaagcctctcctctttctacggaaaactatacaatatgttcttctgcagaatcttatcatttcctaataagctgactcagtttcctgttcatacaaatagctacctatttaacaagagttccaggcttctaaggaattttcttgttttcattaccagtgaggcaccagagttacaccatacgtggtatgcagaaattatgaaaatctgaaaacagttctttgagaaccatctagtctacttaagtctggaaacacagcatcctcttacgtcatacaccaataaaatgaacgccccacaaaaagg

SEQ ID NO: 283512 - DNA, 669 bp, Homo sapiens
ttatgattattttttcccgcccaccgtataagggacggagcagacgaccccctatccacaaatttatgggatacttcatgttgcccatgctgttctcaaattcctgggcttcatcaatcctcctgccttggcctcccaagtagctgagaccacctacagtcatgatccactgttgactctagattgaaggatcctattggacagataagccactatttagggaagtccagtaacctgcctgaggccacataaccaggggacagcagagcccagggtcagcatccatgcctgctaacttttccacttcccactgccctcagtacacctcggcctggcaggcttcaggatgacctccgacctctgggagtgcaagttcctctgggatagctgtgagagacccaaactcacctcttctaaccgtgtgcgcttctcagaaggctctgacccatcactgtcatttcctgaatgctcttcatcctcctcttcatccctgaagatgtcttcataggcgggaacttcaagtgaggcaccagagttacaccatacgtggtatgcagaaattatgaaaatctgaaaacagttctttgagaaccatctagtctacttaagtctggaaacacagcatcctcttacgtcatacaccaataaaatgaacgccccacaaaaagg

SEQ ID NO: 283513 - DNA, 607 bp, Homo sapiens
gggccgcggcgcttctggtcccggagacttggggctcccgggcttctgagcggctcgggttccgcgctgccggcagggcttgggggcgccttagagccgaaccccgttttttcaggaaagggcgctgcgaccacccccgtcccgggcctcagcccctctgctgcagaccctcgggatcgtcgctggaaagattctgaagcttggcggagaggggtgtgtgagtggacaccagtgaagtaacggtttttgtgttacgatgatttctgttttcctctgctgccctgtaatggcaggaactcggatagtctggtcttcagaccaggaggactcccaggagagaacggagagccagtgtgctgtgtgtcacggtccctggatgaacgtttgtggaactggattgaattaaacaagacgtgcaaagcaagtggttcacgaggtagtgtgggggtgtagggatggggactgacccgggaggcaggacacagcccaagccctgccttggcctcacctctaacttgctgatgaccttggatgattcccttcccatcctgggcctctgttttctcatctgtaaaatgggcagattggcaatgtggcctccaggtct

SEQ ID NO: 283514 - DNA, 6041 bp, Homo sapiens
  misc_feature (4411)..(4411): n is a, c, g, or t
  misc_feature (4962)..(4962): n is a, c, g, or t
gggccgcggcgcttctggtcccggagacttggggctcccgggcttctgagcggctcgggttccgcgctgccggcagggcttgggggcgccttagagccgaaccccgttttttcaggaaagggcgctgcgaccacccccgtcccgggcctcagcccctctgctgcagaccctcgggatcgtcgctggtaggagctctgtcccccgtgtctgtgtccaggacccccgaagcgccgcgcctaggaaccccctagcgctgggagcccggccctgctcgaccacgggctttgggctggaggcgtcatcgtcgccacagcgaacgcttatttggcaccgagtgtccgccaggcatcgctctaagcgctttatacccataactcacttcatctcagccacccggttccgtagaagcgtttcatccgcgttttacagacgtgtgcaggaaagattctgaagcttggcggagaggggtgtgtgagtggacaccagtgaagtaacggtttttgtgttacgatgatttctgttttcctctgctgccctgtaatggcaggaactcggatagtctggtcttcagaccaggaggactcccaggagagaacggagagccagtgtgctgtgtgtcacggtccctggatgaacgtttgtggaactggattgaattaaacaagacgtgcaaagcaagtggttcacgagattcgattgctgtagggaccccgtgggtgtggaatcagacagtattggtcctttcatgactggcttatttcacaaaacccgatgccgtcgaggtccatccatgctgagatatttacggagcatccccagctgctggatgctgggacccaccagtgggcaagagggccgtgcccaccccttcctggaagagacactcactcagtaaatgcagagattcagtgttggggtaaccccagcacacagccctgagggaggaagcccagtgatttgatcggatttgcttttctcttctgcctcggattctgtccaacccctggaaggacctctgaggtgtcccgtggctggttctaggccccattcaagcctcctcctccaggaagccttcccagtcctgggcatctgtagccagctcggtgtttctcacctggggcctgggacgtctcccattctgaactgccgtgttttgggtttactgttctctggcttttggtcccagccggacggtggcctcttgtgttcagggacaaggcaaggagcatccatgcacccccacagtacccaggctgggtctgtgcccgccaggcccccggcaaagcttggatgatccgggctgggctgttctcctgctgctctcctgctgctggcctcgctgtatcagctgatggccatcgcgcctcctgcacccgtcatcccgccctgcacgcccccgccacgtggatgagctccctggggagttaatggctaatggagtctccgctctctcttgtcaaatgcagccatcatccgctggtgctttaagggactctctcccgtccccaccctattctcaggtggctcctaccgacaccacctaatggtgaaccccaacacgaggacacaggcagtgccctctcaggaccactgtgggtgccaccaggcacgacttcctaaacacccacagagcaaaaacctggaaattcagccgaggcactgggaccccaacctctcccagagtggccccagctccacggcgtctgcatggctctggccgtgagcagagcagccccgacctccgtcctgacccagggcgccggagcgccactgcggatctcaccaccacacaagccagacctgctaggaagcccttcccggccaccagctctcgggcgatgcacacaacagggccttttgaattccctgaggttaaggttccccttgagtctcctgggctacaagcaaatcccccgaggggagaagtccaggctgacacagcctcctgcacccctgccttgggaggccacacctcgtttgcctctagaaccgacgactggggagcactgtttgcagagttctctctctctgggtaagttccggagccacatctcactggatccaccacggcctgggtggacggctctcgtgtgtttatagctgggtccctcgcttgggagctgcctccgggtgggcggcctctccagcctgtttgagtgctccacccggagcaggaagagggccgtgtgctctgggcagtggttccttgggcactgcatggtccttgcttccctccagggcccaccttccctggccgctgcatcccagccgagggcaggccccttttgccagctgaaggcagaaaggccggcagccctggggtggcggcgggcagagaaaccccccggagtggtctccgttcttctaaaagtgatgttgacccccgtgtcgcaggcagctggcagggtggcagttcgatctgtcgttacgggcttgcaccactgcggtctcccacccagggagcagctctgtccaaccacagcgagcctccagctcctaccctctgcctgggctggggcagagcctggggtctgggtgggagaagcgtgactctgggatgagaccttacaaagcaggttcctcctgggagtcagcccgggtctaaacgcagctgggcatgaaggggtgccatcggatgtcgagttaggaggacgagagacctccagccccggcacccgcatgtctctttggaaaccagctttggctgcgcccctggggacactgtctgccgtggcctcccgctctcctccccggcacaggcagggggtctccctcctccaccgccactcccttggcctcgccctccccgccaggcacctggcttttccccaccgacccccccgggggactgcggcccccagaaaggctgcactctgggagcaaagtggcctgaaaccagagaaaagaacgccgggggatttggcttaaactcgttaaacccaatgaaccctcttgccgaacgatcgcagtctgcgcccggtcttttaatctcgttcgggcctcggggtaatttgtttagctgtgctgatcagctgaaggttaattcaattggacttgggttatttatttgtgcccggatttgctaagtgtcattggaggtacatgaggtctttattatggcggcaagatggcttcattagggtgagggccactccctccggatccgccccctcccgccagctccaggctgaggcagtcttgggaggctggagccctgggaggctggagccccaggtgcagtggctcttgttcctggatgcaggggatatctgagcactgtgctgggagtccagcctcgcccagctctggtgttgatactggacggttctgtcacatgacctatcctaaccgaggctgaaggacctgcttcccaggacccgtcccctccctcagggggacctaaaggcgttttccccaccctgcctcagtgttcccattcacacattgggaacagcaccctgttctcctgcggcctcccaggctgggctttgtagctgcagcccccaccccgcctggcgaccggggcagaaggacgctgaggtcgcagagcgggcagacgggttggccgggcgggcagacctcctgcacggagccgggatccttctcaggcagcggcagatgatggattgcacgtggacactgcctgggatgcgtgcgacttggcagcctgcccctttcctgccctgggatcagacgccctggcgggtgtccttttcctggtcccctgtcctcctagcctggggcggcgtctggagcggggaggctcacccctgtgcccacgtcctcaggccacctgccagtccctgcccaccccggccgcggaggggctgtggagactcagggagttctgggatggcacagagggcccaggctggtagcaaccaaagccgtgggaaatgtgggagggatggcaggtgtcccccgaggagtagcccaggtgccccggaggctgctgagagggttgagagtgcagagacgaggggcccagggaagtcttggattctctcgccatcttcaatgtcggagcccagacggggcaaggcgaggaggagcccggggcgaagacgccacccacattcctccttcccgcaggcttcttctccttctagcccttccaggagagaaaccatcccacaagtccagagtagtggcgtccccggggccatgtctcctgagcaaacactgttttctaggagtccgaggggcctcagccatctaggtcaatccctttgcagaacggtgaaggaatctgaagcccagagagggaaaacaatgcctcctgggtcacacagcccatcaggggcagggcagggacgaacggcgagaaaaggaccagcgcgagaggagatccccagcagtgattcctcagccaagcccagcgtctacccacatccacacctcacagccaccngatggggaaggcaccattgccccttttcaaaggtgagaaaacagaggctcagagaggttcagcaacttctcccacagctacttcgttgtagaactgcagttccaggtgtccccgagctctcccttcccgagccatctgctcctgccctcctatccgagccctggccctcccagtcaaagccgggtagtggctgttcagaagccttggggctagtcaatcccagctgtctcggaccagggccccccccaggaggagaccctgaaggatgcagttgagaatatgtgctttctttggtaggtgatctcaggaattgcaggggaaagagggggagcgtgttagtgtaggctctccggagaagcagaaccaacgcacagaggagatttaggatgaggaatctggtttatgtgactctgggggctgagaaggcccaccatctgtgttgcaagctggaaacccagggaagcctgaggtgtgattcaaactcagctcaggtctggaggcctgagaaccagggcagccgatggtggacatccagtccaggggcaagagangacgagatgtcccggctccagtggcgaggcaggaaatgaggggtgaactcctcctccctctgctgtctgttctattcaagttcttgagggattggattatgcccagccacttggggagggcagtccaccttcctgagtccacaattcaaatgctgatctaatccagaaacactctcacagacacagtgtgtagtctgggcaccccacagtgcacttaagtggacacataaaattaaccatcccagggagtgagatgggtaagggaagatgggccacagtgggtgtgtctccatgcctacccccactgtgggcagctgctggagcacacgcctcaaagtcttccctgagggagagggagctgaggtgtttatatcccagctctgtcaggcattggctgaatgtccacactcctggatcaccgcctctcatcctcatgatgtcccatggtcctcatttcacaagtgagctctgggtacatggggagcatcagtcacaccctgggtcagtacctcagctgtctctcacatgacatcctcattatccacactgcaaagccaaccatccctatgatgggttcattgtggatcatgacttagtgggtcaagagtttggaagtggctcagctgggcggttcttctgctccatgtggctgccagatggtaccctgctggtgggcagtctggtctagagggtccatgatggctttactcacatgcctggcatcttgacagggacagctggaaggcaaggttcagctgggactgtccacagagctcctccctgtggcctttccagcatggtggtctcagggtagctggacttcctgcatgacagctcagggctcccagagctactgtcccaagagatagaaggtggaaactgccagtctcttaggctaggaccagaaaccagcacccctgcacccacagccttttggtagtgatgaaataaacataagatttatcattttaatcattcgtaagtgggattaaatacatttacaacattgtgtaaccatcggcactgtctatatctaaaactttttcatcatctgcaataaaaactctgtatgcattaaa

SEQ ID NO: 283515 - DNA, 490 bp, Homo sapiens
gggccgcggcgcttctggtcccggagacttggggctcccgggcttctgagcggctcgggttccgcgctgccggcagggcttgggggcgccttagagccgaaccccgttttttcaggaaagggcgctgcgaccacccccgtcccgggcctcagcccctctgctgcagaccctcgggatcgtcgctggaaagattctgaagcttggcggagaggggtgtgtgagtggacaccagtgaagtaacggtttttgtgttacgatgatttctgttttcctctgctgccctgtaatggcaggaactcggatagtctggtcttcagaccaggaggactcccaggagagaacggagagccagtgtgctgtgtgtcacggtccctggatgaacgtttgtggaactggattgaattaaacaagacgtgcaaagcaagtggttcacgagttgcaccgctgcaccccagcctgggtgacagagccagacagactgtgtctctta

SEQ ID NO: 283516 - DNA, 5709 bp, Homo sapiens
  misc_feature (4079)..(4079): n is a, c, g, or t
  misc_feature (4630)..(4630): n is a, c, g, or t
agttcgacggagactctcatcgccttccatcatggcgcagaattgagagtcgagcacgtcgctttgttttctgccaaacttagccaagctccggtcttaaaatcttttcgttcctagcgtgaggctttctgtctttgttgcaaatattgaaacctgccacgtcacctcttgcactatttgtttagttctttaagaaatgaaaccttaatccatgtacaatttctaaaagcctttatttcaatattttaagaagttatttcccctggcaaagaagccgccctgttgcccggtgtggagctcgatgacaaagctcatcagcctgagtggaagctcattcattattgctgcgttttcgctcttccaggagagaacggagagccagtgtgctgtgtgtcacggtccctggatgaacgtttgtggaactggattgaattaaacaagacgtgcaaagcaagtggttcacgagatatttacggagcatccccagctgctggatgctgggacccaccagtgggcaagagggccgtgcccaccccttcctggaagagacactcactcagtaaatgcagagattcagtgttggggtaaccccagcacacagccctgagggaggaagcccagtgatttgatcggatttgcttttctcttctgcctcggattctgtccaacccctggaaggacctctgaggtgtcccgtggctggttctaggccccattcaagcctcctcctccaggaagccttcccagtcctgggcatctgtagccagctcggtgtttctcacctggggcctgggacgtctcccattctgaactgccgtgttttgggtttactgttctctggcttttggtcccagccggacggtggcctcttgtgttcagggacaaggcaaggagcatccatgcacccccacagtacccaggctgggtctgtgcccgccaggcccccggcaaagcttggatgatccgggctgggctgttctcctgctgctctcctgctgctggcctcgctgtatcagctgatggccatcgcgcctcctgcacccgtcatcccgccctgcacgcccccgccacgtggatgagctccctggggagttaatggctaatggagtctccgctctctcttgtcaaatgcagccatcatccgctggtgctttaagggactctctcccgtccccaccctattctcaggtggctcctaccgacaccacctaatggtgaaccccaacacgaggacacaggcagtgccctctcaggaccactgtgggtgccaccaggcacgacttcctaaacacccacagagcaaaaacctggaaattcagccgaggcactgggaccccaacctctcccagagtggccccagctccacggcgtctgcatggctctggccgtgagcagagcagccccgacctccgtcctgacccagggcgccggagcgccactgcggatctcaccaccacacaagccagacctgctaggaagcccttcccggccaccagctctcgggcgatgcacacaacagggccttttgaattccctgaggttaaggttccccttgagtctcctgggctacaagcaaatcccccgaggggagaagtccaggctgacacagcctcctgcacccctgccttgggaggccacacctcgtttgcctctagaaccgacgactggggagcactgtttgcagagttctctctctctgggtaagttccggagccacatctcactggatccaccacggcctgggtggacggctctcgtgtgtttatagctgggtccctcgcttgggagctgcctccgggtgggcggcctctccagcctgtttgagtgctccacccggagcaggaagagggccgtgtgctctgggcagtggttccttgggcactgcatggtccttgcttccctccagggcccaccttccctggccgctgcatcccagccgagggcaggccccttttgccagctgaaggcagaaaggccggcagccctggggtggcggcgggcagagaaaccccccggagtggtctccgttcttctaaaagtgatgttgacccccgtgtcgcaggcagctggcagggtggcagttcgatctgtcgttacgggcttgcaccactgcggtctcccacccagggagcagctctgtccaaccacagcgagcctccagctcctaccctctgcctgggctggggcagagcctggggtctgggtgggagaagcgtgactctgggatgagaccttacaaagcaggttcctcctgggagtcagcccgggtctaaacgcagctgggcatgaaggggtgccatcggatgtcgagttaggaggacgagagacctccagccccggcacccgcatgtctctttggaaaccagctttggctgcgcccctggggacactgtctgccgtggcctcccgctctcctccccggcacaggcagggggtctccctcctccaccgccactcccttggcctcgccctccccgccaggcacctggcttttccccaccgacccccccgggggactgcggcccccagaaaggctgcactctgggagcaaagtggcctgaaaccagagaaaagaacgccgggggatttggcttaaactcgttaaacccaatgaaccctcttgccgaacgatcgcagtctgcgcccggtcttttaatctcgttcgggcctcggggtaatttgtttagctgtgctgatcagctgaaggttaattcaattggacttgggttatttatttgtgcccggatttgctaagtgtcattggaggtacatgaggtctttattatggcggcaagatggcttcattagggtgagggccactccctccggatccgccccctcccgccagctccaggctgaggcagtcttgggaggctggagccctgggaggctggagccccaggtgcagtggctcttgttcctggatgcaggggatatctgagcactgtgctgggagtccagcctcgcccagctctggtgttgatactggacggttctgtcacatgacctatcctaaccgaggctgaaggacctgcttcccaggacccgtcccctccctcagggggacctaaaggcgttttccccaccctgcctcagtgttcccattcacacattgggaacagcaccctgttctcctgcggcctcccaggctgggctttgtagctgcagcccccaccccgcctggcgaccggggcagaaggacgctgaggtcgcagagcgggcagacgggttggccgggcgggcagacctcctgcacggagccgggatccttctcaggcagcggcagatgatggattgcacgtggacactgcctgggatgcgtgcgacttggcagcctgcccctttcctgccctgggatcagacgccctggcgggtgtccttttcctggtcccctgtcctcctagcctggggcggcgtctggagcggggaggctcacccctgtgcccacgtcctcaggccacctgccagtccctgcccaccccggccgcggaggggctgtggagactcagggagttctgggatggcacagagggcccaggctggtagcaaccaaagccgtgggaaatgtgggagggatggcaggtgtcccccgaggagtagcccaggtgccccggaggctgctgagagggttgagagtgcagagacgaggggcccagggaagtcttggattctctcgccatcttcaatgtcggagcccagacggggcaaggcgaggaggagcccggggcgaagacgccacccacattcctccttcccgcaggcttcttctccttctagcccttccaggagagaaaccatcccacaagtccagagtagtggcgtccccggggccatgtctcctgagcaaacactgttttctaggagtccgaggggcctcagccatctaggtcaatccctttgcagaacggtgaaggaatctgaagcccagagagggaaaacaatgcctcctgggtcacacagcccatcaggggcagggcagggacgaacggcgagaaaaggaccagcgcgagaggagatccccagcagtgattcctcagccaagcccagcgtctacccacatccacacctcacagccaccngatggggaaggcaccattgccccttttcaaaggtgagaaaacagaggctcagagaggttcagcaacttctcccacagctacttcgttgtagaactgcagttccaggtgtccccgagctctcccttcccgagccatctgctcctgccctcctatccgagccctggccctcccagtcaaagccgggtagtggctgttcagaagccttggggctagtcaatcccagctgtctcggaccagggccccccccaggaggagaccctgaaggatgcagttgagaatatgtgctttctttggtaggtgatctcaggaattgcaggggaaagagggggagcgtgttagtgtaggctctccggagaagcagaaccaacgcacagaggagatttaggatgaggaatctggtttatgtgactctgggggctgagaaggcccaccatctgtgttgcaagctggaaacccagggaagcctgaggtgtgattcaaactcagctcaggtctggaggcctgagaaccagggcagccgatggtggacatccagtccaggggcaagagangacgagatgtcccggctccagtggcgaggcaggaaatgaggggtgaactcctcctccctctgctgtctgttctattcaagttcttgagggattggattatgcccagccacttggggagggcagtccaccttcctgagtccacaattcaaatgctgatctaatccagaaacactctcacagacacagtgtgtagtctgggcaccccacagtgcacttaagtggacacataaaattaaccatcccagggagtgagatgggtaagggaagatgggccacagtgggtgtgtctccatgcctacccccactgtgggcagctgctggagcacacgcctcaaagtcttccctgagggagagggagctgaggtgtttatatcccagctctgtcaggcattggctgaatgtccacactcctggatcaccgcctctcatcctcatgatgtcccatggtcctcatttcacaagtgagctctgggtacatggggagcatcagtcacaccctgggtcagtacctcagctgtctctcacatgacatcctcattatccacactgcaaagccaaccatccctatgatgggttcattgtggatcatgacttagtgggtcaagagtttggaagtggctcagctgggcggttcttctgctccatgtggctgccagatggtaccctgctggtgggcagtctggtctagagggtccatgatggctttactcacatgcctggcatcttgacagggacagctggaaggcaaggttcagctgggactgtccacagagctcctccctgtggcctttccagcatggtggtctcagggtagctggacttcctgcatgacagctcagggctcccagagctactgtcccaagagatagaaggtggaaactgccagtctcttaggctaggaccagaaaccagcacccctgcacccacagccttttggtagtgatgaaataaacataagatttatcattttaatcattcgtaagtgggattaaatacatttacaacattgtgtaaccatcggcactgtctatatctaaaactttttcatcatctgcaataaaaactctgtatgcattaaa

SEQ ID NO: 283517 - DNA, 534 bp, Homo sapiens
gggccgcggcgcttctggtcccggagacttggggctcccgggcttctgagcggctcgggttccgcgctgccggcagggcttgggggcgccttagagccgaaccccgttttttcaggaaagggcgctgcgaccacccccgtcccgggcctcagcccctctgctgcagaccctcgggatcgtcgctggaaagattctgaagcttggcggagaggggtgtgtgagtggacaccagtgaagtaacggtttttgtgttacgatgatttctgttttcctctgctgccctgtaatggcaggaactcggatagtctggtcttcagaccaggaggactcccaggagagaacggagagccagtgtgctgtgtgtcacggtccctggatgaacgtttgtggaactggattgaattaaacaagacgtgcaaagcaagtggttcacgagggtcttgctccgtcgcccagtctggagtgcagtggcaagatctctgctcagtgcagccttgaactctcaggctcaagaaatcttcccgcctcagcctc

SEQ ID NO: 283518 - DNA, 386 bp, Homo sapiens
acaccacacagtaaacacaaaggaaacccaccgttgctgggccgccttccatcatggcgcagaattgagagtcgagcacgtcgctttgttttctgccaaacttagccaagctccggtcttaaaatcttttcgttcctagcgtgaggctttctgtctttgttgcaaatattgaaacctgccacgtcacctcttgcactatttgtttagttctttaagaaatgaaaccttaatccatgtacaatttctaaaagcctttatttcaatattttaagaagttatttcccctggcaaagaagccgccctgttgcccggtgtggagctcgatgacaaagctcatcagcctgagtggaagctcattcattattgctgcgttttcgctcttccag

SEQ ID NO: 283519 - DNA, 5679 bp, Homo sapiens
  misc_feature (4049)..(4049): n is a, c, g, or t
  misc_feature (4600)..(4600): n is a, c, g, or t
gggccgcggcgcttctggtcccggagacttggggctcccgggcttctgagcggctcgggttccgcgctgccggcagggcttgggggcgccttagagccgaaccccgttttttcaggaaagggcgctgcgaccacccccgtcccgggcctcagcccctctgctgcagaccctcgggatcgtcgctggaaagattctgaagcttggcggagaggggtgtgtgagtggacaccagtgaagtaacggtttttgtgttacgatgatttctgttttcctctgctgccctgtaatggcaggaactcggatagtctggtcttcagaccaggaggactcccaggagagaacggagagccagtgtgctgtgtgtcacggtccctggatgaacgtttgtggaactggattgaattaaacaagacgtgcaaagcaagtggttcacgagatatttacggagcatccccagctgctggatgctgggacccaccagtgggcaagagggccgtgcccaccccttcctggaagagacactcactcagtaaatgcagagattcagtgttggggtaaccccagcacacagccctgagggaggaagcccagtgatttgatcggatttgcttttctcttctgcctcggattctgtccaacccctggaaggacctctgaggtgtcccgtggctggttctaggccccattcaagcctcctcctccaggaagccttcccagtcctgggcatctgtagccagctcggtgtttctcacctggggcctgggacgtctcccattctgaactgccgtgttttgggtttactgttctctggcttttggtcccagccggacggtggcctcttgtgttcagggacaaggcaaggagcatccatgcacccccacagtacccaggctgggtctgtgcccgccaggcccccggcaaagcttggatgatccgggctgggctgttctcctgctgctctcctgctgctggcctcgctgtatcagctgatggccatcgcgcctcctgcacccgtcatcccgccctgcacgcccccgccacgtggatgagctccctggggagttaatggctaatggagtctccgctctctcttgtcaaatgcagccatcatccgctggtgctttaagggactctctcccgtccccaccctattctcaggtggctcctaccgacaccacctaatggtgaaccccaacacgaggacacaggcagtgccctctcaggaccactgtgggtgccaccaggcacgacttcctaaacacccacagagcaaaaacctggaaattcagccgaggcactgggaccccaacctctcccagagtggccccagctccacggcgtctgcatggctctggccgtgagcagagcagccccgacctccgtcctgacccagggcgccggagcgccactgcggatctcaccaccacacaagccagacctgctaggaagcccttcccggccaccagctctcgggcgatgcacacaacagggccttttgaattccctgaggttaaggttccccttgagtctcctgggctacaagcaaatcccccgaggggagaagtccaggctgacacagcctcctgcacccctgccttgggaggccacacctcgtttgcctctagaaccgacgactggggagcactgtttgcagagttctctctctctgggtaagttccggagccacatctcactggatccaccacggcctgggtggacggctctcgtgtgtttatagctgggtccctcgcttgggagctgcctccgggtgggcggcctctccagcctgtttgagtgctccacccggagcaggaagagggccgtgtgctctgggcagtggttccttgggcactgcatggtccttgcttccctccagggcccaccttccctggccgctgcatcccagccgagggcaggccccttttgccagctgaaggcagaaaggccggcagccctggggtggcggcgggcagagaaaccccccggagtggtctccgttcttctaaaagtgatgttgacccccgtgtcgcaggcagctggcagggtggcagttcgatctgtcgttacgggcttgcaccactgcggtctcccacccagggagcagctctgtccaaccacagcgagcctccagctcctaccctctgcctgggctggggcagagcctggggtctgggtgggagaagcgtgactctgggatgagaccttacaaagcaggttcctcctgggagtcagcccgggtctaaacgcagctgggcatgaaggggtgccatcggatgtcgagttaggaggacgagagacctccagccccggcacccgcatgtctctttggaaaccagctttggctgcgcccctggggacactgtctgccgtggcctcccgctctcctccccggcacaggcagggggtctccctcctccaccgccactcccttggcctcgccctccccgccaggcacctggcttttccccaccgacccccccgggggactgcggcccccagaaaggctgcactctgggagcaaagtggcctgaaaccagagaaaagaacgccgggggatttggcttaaactcgttaaacccaatgaaccctcttgccgaacgatcgcagtctgcgcccggtcttttaatctcgttcgggcctcggggtaatttgtttagctgtgctgatcagctgaaggttaattcaattggacttgggttatttatttgtgcccggatttgctaagtgtcattggaggtacatgaggtctttattatggcggcaagatggcttcattagggtgagggccactccctccggatccgccccctcccgccagctccaggctgaggcagtcttgggaggctggagccctgggaggctggagccccaggtgcagtggctcttgttcctggatgcaggggatatctgagcactgtgctgggagtccagcctcgcccagctctggtgttgatactggacggttctgtcacatgacctatcctaaccgaggctgaaggacctgcttcccaggacccgtcccctccctcagggggacctaaaggcgttttccccaccctgcctcagtgttcccattcacacattgggaacagcaccctgttctcctgcggcctcccaggctgggctttgtagctgcagcccccaccccgcctggcgaccggggcagaaggacgctgaggtcgcagagcgggcagacgggttggccgggcgggcagacctcctgcacggagccgggatccttctcaggcagcggcagatgatggattgcacgtggacactgcctgggatgcgtgcgacttggcagcctgcccctttcctgccctgggatcagacgccctggcgggtgtccttttcctggtcccctgtcctcctagcctggggcggcgtctggagcggggaggctcacccctgtgcccacgtcctcaggccacctgccagtccctgcccaccccggccgcggaggggctgtggagactcagggagttctgggatggcacagagggcccaggctggtagcaaccaaagccgtgggaaatgtgggagggatggcaggtgtcccccgaggagtagcccaggtgccccggaggctgctgagagggttgagagtgcagagacgaggggcccagggaagtcttggattctctcgccatcttcaatgtcggagcccagacggggcaaggcgaggaggagcccggggcgaagacgccacccacattcctccttcccgcaggcttcttctccttctagcccttccaggagagaaaccatcccacaagtccagagtagtggcgtccccggggccatgtctcctgagcaaacactgttttctaggagtccgaggggcctcagccatctaggtcaatccctttgcagaacggtgaaggaatctgaagcccagagagggaaaacaatgcctcctgggtcacacagcccatcaggggcagggcagggacgaacggcgagaaaaggaccagcgcgagaggagatccccagcagtgattcctcagccaagcccagcgtctacccacatccacacctcacagccaccngatggggaaggcaccattgccccttttcaaaggtgagaaaacagaggctcagagaggttcagcaacttctcccacagctacttcgttgtagaactgcagttccaggtgtccccgagctctcccttcccgagccatctgctcctgccctcctatccgagccctggccctcccagtcaaagccgggtagtggctgttcagaagccttggggctagtcaatcccagctgtctcggaccagggccccccccaggaggagaccctgaaggatgcagttgagaatatgtgctttctttggtaggtgatctcaggaattgcaggggaaagagggggagcgtgttagtgtaggctctccggagaagcagaaccaacgcacagaggagatttaggatgaggaatctggtttatgtgactctgggggctgagaaggcccaccatctgtgttgcaagctggaaacccagggaagcctgaggtgtgattcaaactcagctcaggtctggaggcctgagaaccagggcagccgatggtggacatccagtccaggggcaagagangacgagatgtcccggctccagtggcgaggcaggaaatgaggggtgaactcctcctccctctgctgtctgttctattcaagttcttgagggattggattatgcccagccacttggggagggcagtccaccttcctgagtccacaattcaaatgctgatctaatccagaaacactctcacagacacagtgtgtagtctgggcaccccacagtgcacttaagtggacacataaaattaaccatcccagggagtgagatgggtaagggaagatgggccacagtgggtgtgtctccatgcctacccccactgtgggcagctgctggagcacacgcctcaaagtcttccctgagggagagggagctgaggtgtttatatcccagctctgtcaggcattggctgaatgtccacactcctggatcaccgcctctcatcctcatgatgtcccatggtcctcatttcacaagtgagctctgggtacatggggagcatcagtcacaccctgggtcagtacctcagctgtctctcacatgacatcctcattatccacactgcaaagccaaccatccctatgatgggttcattgtggatcatgacttagtgggtcaagagtttggaagtggctcagctgggcggttcttctgctccatgtggctgccagatggtaccctgctggtgggcagtctggtctagagggtccatgatggctttactcacatgcctggcatcttgacagggacagctggaaggcaaggttcagctgggactgtccacagagctcctccctgtggcctttccagcatggtggtctcagggtagctggacttcctgcatgacagctcagggctcccagagctactgtcccaagagatagaaggtggaaactgccagtctcttaggctaggaccagaaaccagcacccctgcacccacagccttttggtagtgatgaaataaacataagatttatcattttaatcattcgtaagtgggattaaatacatttacaacattgtgtaaccatcggcactgtctatatctaaaactttttcatcatctgcaataaaaactctgtatgcattaaa

SEQ ID NO: 283520 - DNA, 5793 bp, Homo sapiens
  misc_feature (4163)..(4163): n is a, c, g, or t
  misc_feature (4714)..(4714): n is a, c, g, or t
gggccgcggcgcttctggtcccggagacttggggctcccgggcttctgagcggctcgggttccgcgctgccggcagggcttgggggcgccttagagccgaaccccgttttttcaggaaagggcgctgcgaccacccccgtcccgggcctcagcccctctgctgcagaccctcgggatcgtcgctggaaagattctgaagcttggcggagaggggtgtgtgagtggacaccagtgaagtaacggtttttgtgttacgatgatttctgttttcctctgctgccctgtaatggcaggaactcggatagtctggtcttcagaccaggaggactcccagaagttatttcccctggcaaagaagccgccctgttgcccggtgtggagctcgatgacaaagctcatcagcctgagtggaagctcattcattattgctgcgttttcgctcttccaggagagaacggagagccagtgtgctgtgtgtcacggtccctggatgaacgtttgtggaactggattgaattaaacaagacgtgcaaagcaagtggttcacgagatatttacggagcatccccagctgctggatgctgggacccaccagtgggcaagagggccgtgcccaccccttcctggaagagacactcactcagtaaatgcagagattcagtgttggggtaaccccagcacacagccctgagggaggaagcccagtgatttgatcggatttgcttttctcttctgcctcggattctgtccaacccctggaaggacctctgaggtgtcccgtggctggttctaggccccattcaagcctcctcctccaggaagccttcccagtcctgggcatctgtagccagctcggtgtttctcacctggggcctgggacgtctcccattctgaactgccgtgttttgggtttactgttctctggcttttggtcccagccggacggtggcctcttgtgttcagggacaaggcaaggagcatccatgcacccccacagtacccaggctgggtctgtgcccgccaggcccccggcaaagcttggatgatccgggctgggctgttctcctgctgctctcctgctgctggcctcgctgtatcagctgatggccatcgcgcctcctgcacccgtcatcccgccctgcacgcccccgccacgtggatgagctccctggggagttaatggctaatggagtctccgctctctcttgtcaaatgcagccatcatccgctggtgctttaagggactctctcccgtccccaccctattctcaggtggctcctaccgacaccacctaatggtgaaccccaacacgaggacacaggcagtgccctctcaggaccactgtgggtgccaccaggcacgacttcctaaacacccacagagcaaaaacctggaaattcagccgaggcactgggaccccaacctctcccagagtggccccagctccacggcgtctgcatggctctggccgtgagcagagcagccccgacctccgtcctgacccagggcgccggagcgccactgcggatctcaccaccacacaagccagacctgctaggaagcccttcccggccaccagctctcgggcgatgcacacaacagggccttttgaattccctgaggttaaggttccccttgagtctcctgggctacaagcaaatcccccgaggggagaagtccaggctgacacagcctcctgcacccctgccttgggaggccacacctcgtttgcctctagaaccgacgactggggagcactgtttgcagagttctctctctctgggtaagttccggagccacatctcactggatccaccacggcctgggtggacggctctcgtgtgtttatagctgggtccctcgcttgggagctgcctccgggtgggcggcctctccagcctgtttgagtgctccacccggagcaggaagagggccgtgtgctctgggcagtggttccttgggcactgcatggtccttgcttccctccagggcccaccttccctggccgctgcatcccagccgagggcaggccccttttgccagctgaaggcagaaaggccggcagccctggggtggcggcgggcagagaaaccccccggagtggtctccgttcttctaaaagtgatgttgacccccgtgtcgcaggcagctggcagggtggcagttcgatctgtcgttacgggcttgcaccactgcggtctcccacccagggagcagctctgtccaaccacagcgagcctccagctcctaccctctgcctgggctggggcagagcctggggtctgggtgggagaagcgtgactctgggatgagaccttacaaagcaggttcctcctgggagtcagcccgggtctaaacgcagctgggcatgaaggggtgccatcggatgtcgagttaggaggacgagagacctccagccccggcacccgcatgtctctttggaaaccagctttggctgcgcccctggggacactgtctgccgtggcctcccgctctcctccccggcacaggcagggggtctccctcctccaccgccactcccttggcctcgccctccccgccaggcacctggcttttccccaccgacccccccgggggactgcggcccccagaaaggctgcactctgggagcaaagtggcctgaaaccagagaaaagaacgccgggggatttggcttaaactcgttaaacccaatgaaccctcttgccgaacgatcgcagtctgcgcccggtcttttaatctcgttcgggcctcggggtaatttgtttagctgtgctgatcagctgaaggttaattcaattggacttgggttatttatttgtgcccggatttgctaagtgtcattggaggtacatgaggtctttattatggcggcaagatggcttcattagggtgagggccactccctccggatccgccccctcccgccagctccaggctgaggcagtcttgggaggctggagccctgggaggctggagccccaggtgcagtggctcttgttcctggatgcaggggatatctgagcactgtgctgggagtccagcctcgcccagctctggtgttgatactggacggttctgtcacatgacctatcctaaccgaggctgaaggacctgcttcccaggacccgtcccctccctcagggggacctaaaggcgttttccccaccctgcctcagtgttcccattcacacattgggaacagcaccctgttctcctgcggcctcccaggctgggctttgtagctgcagcccccaccccgcctggcgaccggggcagaaggacgctgaggtcgcagagcgggcagacgggttggccgggcgggcagacctcctgcacggagccgggatccttctcaggcagcggcagatgatggattgcacgtggacactgcctgggatgcgtgcgacttggcagcctgcccctttcctgccctgggatcagacgccctggcgggtgtccttttcctggtcccctgtcctcctagcctggggcggcgtctggagcggggaggctcacccctgtgcccacgtcctcaggccacctgccagtccctgcccaccccggccgcggaggggctgtggagactcagggagttctgggatggcacagagggcccaggctggtagcaaccaaagccgtgggaaatgtgggagggatggcaggtgtcccccgaggagtagcccaggtgccccggaggctgctgagagggttgagagtgcagagacgaggggcccagggaagtcttggattctctcgccatcttcaatgtcggagcccagacggggcaaggcgaggaggagcccggggcgaagacgccacccacattcctccttcccgcaggcttcttctccttctagcccttccaggagagaaaccatcccacaagtccagagtagtggcgtccccggggccatgtctcctgagcaaacactgttttctaggagtccgaggggcctcagccatctaggtcaatccctttgcagaacggtgaaggaatctgaagcccagagagggaaaacaatgcctcctgggtcacacagcccatcaggggcagggcagggacgaacggcgagaaaaggaccagcgcgagaggagatccccagcagtgattcctcagccaagcccagcgtctacccacatccacacctcacagccaccngatggggaaggcaccattgccccttttcaaaggtgagaaaacagaggctcagagaggttcagcaacttctcccacagctacttcgttgtagaactgcagttccaggtgtccccgagctctcccttcccgagccatctgctcctgccctcctatccgagccctggccctcccagtcaaagccgggtagtggctgttcagaagccttggggctagtcaatcccagctgtctcggaccagggccccccccaggaggagaccctgaaggatgcagttgagaatatgtgctttctttggtaggtgatctcaggaattgcaggggaaagagggggagcgtgttagtgtaggctctccggagaagcagaaccaacgcacagaggagatttaggatgaggaatctggtttatgtgactctgggggctgagaaggcccaccatctgtgttgcaagctggaaacccagggaagcctgaggtgtgattcaaactcagctcaggtctggaggcctgagaaccagggcagccgatggtggacatccagtccaggggcaagagangacgagatgtcccggctccagtggcgaggcaggaaatgaggggtgaactcctcctccctctgctgtctgttctattcaagttcttgagggattggattatgcccagccacttggggagggcagtccaccttcctgagtccacaattcaaatgctgatctaatccagaaacactctcacagacacagtgtgtagtctgggcaccccacagtgcacttaagtggacacataaaattaaccatcccagggagtgagatgggtaagggaagatgggccacagtgggtgtgtctccatgcctacccccactgtgggcagctgctggagcacacgcctcaaagtcttccctgagggagagggagctgaggtgtttatatcccagctctgtcaggcattggctgaatgtccacactcctggatcaccgcctctcatcctcatgatgtcccatggtcctcatttcacaagtgagctctgggtacatggggagcatcagtcacaccctgggtcagtacctcagctgtctctcacatgacatcctcattatccacactgcaaagccaaccatccctatgatgggttcattgtggatcatgacttagtgggtcaagagtttggaagtggctcagctgggcggttcttctgctccatgtggctgccagatggtaccctgctggtgggcagtctggtctagagggtccatgatggctttactcacatgcctggcatcttgacagggacagctggaaggcaaggttcagctgggactgtccacagagctcctccctgtggcctttccagcatggtggtctcagggtagctggacttcctgcatgacagctcagggctcccagagctactgtcccaagagatagaaggtggaaactgccagtctcttaggctaggaccagaaaccagcacccctgcacccacagccttttggtagtgatgaaataaacataagatttatcattttaatcattcgtaagtgggattaaatacatttacaacattgtgtaaccatcggcactgtctatatctaaaactttttcatcatctgcaataaaaactctgtatgcattaaa

SEQ ID NO: 283521 - DNA, 328 bp, Homo sapiens
ttgcatatggcaaggccaaggctgcgaagagagtgtccaggagaaaccagtcaaatcagcagaatgggtccgcagatgctgggattctaaacagcaatggaggtcacaattttataagataacaacaaaacagtctctgtgaaaatcttgggagaaattccaagcaggagtgagagggaagaaccttcatccagtcaacaacctgtagcggtatccggaatacgcacagcactatgagctacaacaaagcacacggcagcacacagaacacagtaaaaaccttgggaagcttgggctgctcattctaaattgggactcggctcaacat

SEQ ID NO: 283522 - DNA, 4219 bp, Homo sapiens
catcccggggatcacgttttgcctgggggagctgatcgcaagactaggcaacctccagccagtccctgggtcgggcggatcctcccagaggtggcacaatggagcgatctccaggagagggccccagccccagccccatggaccagccctctgctccctccgaccccactgaccagccccccgctgctcacgcaaagccagacccaggttctgggggccaacctgctggccctggcgcggcgggtgaggccctggcggtgctgacttcattcgggaggcggttgctggtgctgatacctgtgtatttggccggggcagtgggactcagcgtgggtttcgtgctcttcggcctcgccctctacctgggctggcgccgggtccgcgacgagaaagaacggagccttcgagcagcgaggcagctactggacgacgaggagcagctcactgcgaaaactctctatatgagtcatcgagagctacctgcctgggtcagcttcccagacgtggaaaaggctgaatggctcaataagattgtggcccaggtctggcccttcctgggccagtatatggagaagcttctggctgaaactgtggctccggctgttaggggatctaacccccatctgcaaacatttacatttacacgagtggaactgggtgaaaagccattgcgcatcattggagtcaaggttcacccaggtcagagaaaagagcagatcctgctggacttgaacatcagctatgtaggtgatgtgcagattgatgtggaagtgaagaaatatttttgcaaagcaggagtcaagggcatgcagctacatggcgttttgcgggtgatactggagccactcattggggaccttcccttcgtgggggctgtgtcaatgttcttcatccgacgcccgaccctagacatcaactggacagggatgaccaacctgctggatatcccaggacttagctcactctctgacaccatgatcatggactccattgctgccttcctcgtgttgcccaaccgattactggtgccccttgtgcctgaccttcaagatgtggctcagttgcgttcccctctgcccaggggcattattcgaattcacctgctggctgctcgagggctgagttccaaggacaaatatgtgaagggcctgattgagggcaagtcagacccatatgcacttgtgcgtttgggtacccagacattctgcagtcgtgtcattgatgaagaactcaacccacagtggggagagacttatgaggtgatggtacacgaggtcccagggcaggagattgaagtggaggtgttcgacaaggatccagataaagatgactttctgggcagaatgaagctggatgtagggaaggtgttacaggctagcgttctggatgattggttccctctacaaggtgggcaaggccaagttcacttgaggctagaatggctgtcacttttgtcagatgcagagaaactggagcaggttctacagtggaattggggagtctcctctcgaccagatcccccgtcagctgccatcttagttgtctacctggatcgggcccaggatcttcctctgaagaaggggaacaaggaacccaaccctatggtacaactgtcaattcaggatgtgactcaggagagcaaggctgtctacagtaccaactgcccagtgtgggaggaagcgttccggttcttcctacaagaccctcaaagccaggagctcgatgtgcaagtgaaggatgattccagggccctgactttaggagcactgacgctgcctctggcccgcctgctgactgccccagaactcatcctggaccagtggttccagctcagcagctctggtccaaactccagactctatatgaaactagtcatgaggatcctgtacttggattcatcagaaatatgcttccccacggtgcctggttgtcctggtgcttgggacgtggacagtgagaatccccagagaggcagcagtgtggatgccccacctcgaccctgtcacacgactcctgatagccagtttgggactgagcatgtgcttcggatccatgtattagaggcccaggacctgattgccaaagaccgtttcttggggggactggtgaagggcaagtcagacccctatgtcaaactaaagttggcaggacgaagcttccggagccatgttgttcgggaagatctcaatccccgctggaatgaggtttttgaggtgatcgtcacatcagttccaggccaagagctagaggttgaagtctttgacaaggacttggacaaggatgattttctgggcaggtgtaaagtgcgtctcaccacagtcttaaacagtggcttccttgatgagtggctgaccctggaggatgtcccatctggccgcctgcacttgcgcctggagcgtctcaccccccgtcccactgctgctgagttagaggaggtgctgcaggtgaatagtttgatccagactcagaagagtgcggagctggctgcggccctgctatccatctatatggagcgggcagaggacctcccgctgcgaaaaggcaccaagcacctcagcccttatgctactctcactgtgggagatagttctcataaaaccaagactatttcgcaaacttcagcccctgtctgggatgagagtgcctcctttctcatcaggaaaccacacactgagagcctagagttgcaggttcggggtgagggcactggcgtgctgggctcattatccctgcccctctcagagctcctcgtggctgaccagctctgcttggaccgctggtttacactcagcagtggtcaggggcaggtgctactgagagcacagctagggatcctggtgtcccagcactcgggagtggaagctcatagccacagctacagccacagctcctcatcgctgagtgaagaaccagagctctcggggggaccccctcacatcacctcctcagccccagagctccggcagcgcctaacacatgttgacagtccccttgaggctccagccgggcctctgggccaggtgaaactgactctgtggtactacagtgaagaacgaaagctggtcagcattgttcatggttgccggtcccttcgacagaatggacgtgatcctcctgatccctatgtgtcactgttgctactgccagacaagaaccgaggcaccaagaggaggacctcacagaagaagaggaccctgagtcctgaatttaatgaacggtttgagtgggaactccccctggatgaggcccagagacgaaagctggatgtctctgtcaagtctaattcctccttcatgtcaagagagcgtgagctgctggggaaggtgcagctggacctagctgagacagacctttcccagggtgtagcccggtggtatgacctgatggacaacaaggacaagggcagctcctaggagctggcgagtcccagcctgactgctctgtcttcctgccttcgtctcgctccatcaccgcctcaatgtgatgagcctaaagctagggtccaagggcagagcctgtgcccttcagccctttcacctaacaggcccatattcgggcctttgcctgaccaaagagaagaaccgtatgttccctttactgcacggcctttatccttctgggcccctggggcggggacctgagctggctgtttcctgctttgcctgcacattgttctcccttcctcccaactcctcagggccttctgtatctgtgcctggccagtggcagcactagcagtggtattagcttatgccaaatacagctttggaaggatctttttttctttaactagatggtcaccttcttccctaccacacatgggtgggaaggtggacaggctaacctctccagctgtgagcctcttagactactgcatgtagcaaatgttcagcagctcaggcccccatgtccagttctgtccccactgtcctcaaccctgtcctgaaaattctactgctttgatggctggggccagtctcttgtcactttggaaactgaggacgcgtggattctactcaagcctccaagtagtggcatatcagtcttggagctcctagctggtgatacggagagggctttggaggacttgggacagcagggccaatttttttgcccaagtgcctaggctgctaactcactgactagaacttaatctggtactttacagttttgcaccaactctgccaagccactggatcttacattaaacatcatactc

SEQ ID NO: 283523 - DNA, 764 bp, Homo sapiens
gtaacctaggctaggtacgaggctgggtggtgacctaaagctagggtccaagggcagagcctgtgcccttcagccctttcacctaacaggcccatattcgggcctttgcctgaccaaagagaagaaccgtatgttccctttactgcacggcctttatccttctgggcccctggggcggggacctgagctggctgtttcctgctttgcctgcacattgttctcccttcctcccaactcctcagggccttctgtatctgtgcctggccagtggcagcactagcagtggtattagcttatgccaaatacagctttggaaggatctttttttctttaactagatggtcaccttcttccctaccacacatgggtgggaaggtggacaggctaacctctccagctgtgagcctcttagactactgcatgtagcaaatgttcagcagctcaggcccccatgtccagttctgtccccactgtcctcaaccctgtcctgaaaattctactgctttgatggctggggccagtctcttgtcactttggaaactgaggacgcgtggattctactcaagcctccaagtagtggcatatcagtcttggagctcctagctggtgatacggagagggctttggaggacttgggacagcagggccaatttttttgcccaagtgcctaggctgctaactcactgactagaacttaatctggtactttacagttttgcaccaactctgccaagccactggatcttacattaaacatcatactc

SEQ ID NO: 283524 - DNA, 1012 bp, Homo sapiens
gtaacctaggctaggtacgaggctgggtggtgacctaaagctagggtccaagggcagagcctgtgcccttcagccctttcacctaacaggcccatattcgggcctttgcctgaccaaagagaagaaccgtatgttccctttactgcacggcctttatccttctgggcccctggggcggggacctgagctggctgtttcctgctttgcctgcacattgttctcccttcctcccaactcctcagggccttctgtatctgtgcctggccagtggcagcactagcagtggtattagcttatgccaaatacagctttggaaggatctttttttctttaactagatggtcaccttcttccctaccacacatgggtgggaaggtggacaggctaacctctccagctgtgagcctcttagactactgcatgtagcaaatgttcagcagctcaggcccccatgtccagttctgtccccactgtcctcaaccctgtcctgaaaattctactgctttgatggctggggccagtctcttgtcactttggaaactgaggacgcgtggattctactcaagcctccaagtagtggcatatcagtcttggagctcctagctggtgatacggagagggctttggaggacttgggacagcagggccaatttttttgcccaagtgcctaggctgctaactcactgactagaacttaatctggtactttacagttttgcaccaactctgccaagccactggatcttacattaaacatcatactcaaaaaaatgacaacaaaaaaaaaaaccgcgggggaaaaagggggggcggaaaaaggtaagaaggaccaggccaagtgtctcggacccttttgggaccaggggaaagcgggccccaaggaggcgtaaaggtaggcgatttgaagagataagagagaacaagaaaattgaactatacaataagagaaacaaagaacatatataatagagagcaaacataacaaaggagagacaaacacatgatagaacga

SEQ ID NO: 283525 - DNA, 1127 bp, Homo sapiens
  misc_feature (887)..(887): n is a, c, g, or t
  misc_feature (889)..(889): n is a, c, g, or t
  misc_feature (891)..(891): n is a, c, g, or t
  misc_feature (894)..(894): n is a, c, g, or t
  misc_feature (897)..(897): n is a, c, g, or t
agaggcattatgtgaatatgaaaagcgctgttttcttgcaggctggtacggtcggaatttcgggactgaggatcctgtacttggattcatcagaaatatgcttccccacggtgcctggttgtcctggtgcttgggacgtggacagtgagaatccccagagaggcagcagtgtggatgccccacctcgaccctgtcacacgactcctgatagccagtttgggactgagcatgtgcttcggatccatgtattagaggcccaggacctgattgccaaagaccgtttcttggggggactggtgaagggcaagtcagacccctatgtcaaactaaagttggcaggacgaagcttccggagccatgttgttcgggaagatctcaatccccgctggaatgaggtttttgaggtgatcgtcacatcagttccaggccaagagctagaggttgaagtctttgacaaggacttggacaaggatgattttctgggcaggtgtaaagtgcgtctcaccacagtcttaaacagtggcttccttgatgagtggctgaccctggaggatgtcccatctggccgcctgcacttgcgcctggagcgtctcaccccccgtcccactgctgctgagttagaggaggtgctgcaggtgaatagtttgatccagactcagaagagtgcggagctggctgcggccctgctatccatctatatggagcgggcagaggacctcccgctgcgaaaaggcaccaagcacctcagcccttatgctactctcactgtgggagatagttctcataaaaccaagactatttcgcaaacttcagcccctgtctgggatgagagtgcctcctttctcatcaggaaaccacacactgagagcctagagttgcagtaaagngnangancgngagaaggcacggcggtgcaggggacaattaacccgcctataaagccctagtaggagcagtcgtgagcccgggtaaacacccagggcagggaggggcacgaacgccaaagagcggggccccccgagagacaacacagacaaggcctccgagaacagatagggcccaacaccagcaggggaagagccagcagcggcgaaaggcacaaggaagtgaggcgaccgggacaacga

SEQ ID NO: 283526 - DNA, 566 bp, Homo sapiens
catcccggggatcacgttttgcctgggggagctgatcgcaagactaggcaacctccagccagtccctgggtcgggcggatcctcccagaggtggcacaatggagcgatctccaggagagggccccagccccagccccatggaccagccctctgctccctccgaccccactgaccagccccccgctgctcacgcaaagccagacccaggttctgggggccaacctgctggccctggcgcggcgggtgaggccctggcggtgctgacttcattcgggaggcggttgctggtgctgatacctgtgtatttggccggggcagtgggactcagcgtgggtttcgtgctcttcggcctcgccctctacctgggctggcgccgggtccgcgacgagaaagaacggagccttcgagcagcgaggcagctactggacgacgaggagcagctcactgcgaaaactctctatatgagtcatcgagagctacctgcctgggtgagcgaccaccctcggtcctctgtgcagcatagcccccttccccagcccaccctcttcccagcccaggaccgccga

SEQ ID NO: 283527 - DNA, 3290 bp, Homo sapiens
gttctagaggatccgtgtaatccgtacagctcactctctgacaccatgatcatggactccattgctgccttcctcgtgttgcccaaccgattactggtgccccttgtgcctgaccttcaagatgtggctcagttgcgttcccctctgcccaggggcattattcgaattcacctgctggctgctcgagggctgagttccaaggacaaatatgtgaagggcctgattgagggcaagtcagacccatatgcacttgtgcgtttgggtacccagacattctgcagtcgtgtcattgatgaagaactcaacccacagtggggagagacttatgaggtgatggtacacgaggtcccagggcaggagattgaagtggaggtgttcgacaaggatccagataaagatgactttctgggcagaatgaagctggatgtagggaaggtgttacaggctagcgttctggatgattggttccctctacaaggtgggcaaggccaagttcacttgaggctagaatggctgtcacttttgtcagatgcagagaaactggagcaggttctacagtggaattggggagtctcctctcgaccagatcccccgtcagctgccatcttagttgtctacctggatcgggcccaggatcttcctctgaagaaggggaacaaggaacccaaccctatggtacaactgtcaattcaggatgtgactcaggagagcaaggctgtctacagtaccaactgcccagtgtgggaggaagcgttccggttcttcctacaagaccctcaaagccaggagctcgatgtgcaagtgaaggatgattccagggccctgactttaggagcactgacgctgcctctggcccgcctgctgactgccccagaactcatcctggaccagtggttccagctcagcagctctggtccaaactccagactctatatgaaactagtcatgaggatcctgtacttggattcatcagaaatatgcttccccacggtgcctggttgtcctggtgcttgggacgtggacagtgagaatccccagagaggcagcagtgtggatgccccacctcgaccctgtcacacgactcctgatagccagtttgggactgagcatgtgcttcggatccatgtattagaggcccaggacctgattgccaaagaccgtttcttggggggactggtgaagggcaagtcagacccctatgtcaaactaaagttggcaggacgaagcttccggagccatgttgttcgggaagatctcaatccccgctggaatgaggtttttgaggtgatcgtcacatcagttccaggccaagagctagaggttgaagtctttgacaaggacttggacaaggatgattttctgggcaggtgtaaagtgcgtctcaccacagtcttaaacagtggcttccttgatgagtggctgaccctggaggatgtcccatctggccgcctgcacttgcgcctggagcgtctcaccccccgtcccactgctgctgagttagaggaggtgctgcaggtgaatagtttgatccagactcagaagagtgcggagctggctgcggccctgctatccatctatatggagcgggcagaggacctcccgctgcgaaaaggcaccaagcacctcagcccttatgctactctcactgtgggagatagttctcataaaaccaagactatttcgcaaacttcagcccctgtctgggatgagagtgcctcctttctcatcaggaaaccacacactgagagcctagagttgcaggttcggggtgagggcactggcgtgctgggctcattatccctgcccctctcagagctcctcgtggctgaccagctctgcttggaccgctggtttacactcagcagtggtcaggggcaggtgctactgagagcacagctagggatcctggtgtcccagcactcgggagtggaagctcatagccacagctacagccacagctcctcatcgctgagtgaagaaccagagctctcggggggaccccctcacatcacctcctcagccccagagctccggcagcgcctaacacatgttgacagtccccttgaggctccagccgggcctctgggccaggtgaaactgactctgtggtactacagtgaagaacgaaagctggtcagcattgttcatggttgccggtcccttcgacagaatggacgtgatcctcctgatccctatgtgtcactgttgctactgccagacaagaaccgaggcaccaagaggaggacctcacagaagaagaggaccctgagtcctgaatttaatgaacggtttgagtgggaactccccctggatgaggcccagagacgaaagctggatgtctctgtcaagtctaattcctccttcatgtcaagagagcgtgagctgctggggaaggtgcagctggacctagctgagacagacctttcccagggtgtagcccggtggtatgacctgatggacaacaaggacaagggcagctcctaggagctggcgagtcccagcctgactgctctgtcttcctgccttcgtctcgctccatcaccgcctcaatgtgatgagcctaaagctagggtccaagggcagagcctgtgcccttcagccctttcacctaacaggcccatattcgggcctttgcctgaccaaagagaagaaccgtatgttccctttactgcacggcctttatccttctgggcccctggggcggggacctgagctggctgtttcctgctttgcctgcacattgttctcccttcctcccaactcctcagggccttctgtatctgtgcctggccagtggcagcactagcagtggtattagcttatgccaaatacagctttggaaggatctttttttctttaactagatggtcaccttcttccctaccacacatgggtgggaaggtggacaggctaacctctccagctgtgagcctcttagactactgcatgtagcaaatgttcagcagctcaggcccccatgtccagttctgtccccactgtcctcaaccctgtcctgaaaattctactgctttgatggctggggccagtctcttgtcactttggaaactgaggacgcgtggattctactcaagcctccaagtagtggcatatcagtcttggagctcctagctggtgatacggagagggctttggaggacttgggacagcagggccaatttttttgcccaagtgcctaggctgctaactcactgactagaacttaatctggtactttacagttttgcaccaactctgccaagccactggatcttacattaaacatcatactc

SEQ ID NO: 283528 - DNA, 4350 bp, Homo sapiens
catcccggggatcacgttttgcctgggggagctgatcgcaagactaggcaacctccagccagtccctgggtcgggcggatcctcccagaggtggcacaatggagcgatctccaggagagggccccagccccagccccatggaccagccctctgctccctccgaccccactgaccagccccccgctgctcacgcaaagccagacccaggttctgggggccaacctgctggccctggcgcggcgggtgaggccctggcggtgctgacttcattcgggaggcggttgctggtgctgatacctgtgtatttggccggggcagtgggactcagcgtgggtttcgtgctcttcggcctcgccctctacctgggctggcgccgggtccgcgacgagaaagaacggagccttcgagcagcgaggcagctactggacgacgaggagcagctcactgcgaaaactctctatatgagtcatcgagagctacctgcctgggtcagcttcccagacgtggaaaaggctgaatggctcaataagattgtggcccaggtctggcccttcctgggccagtatatggagaagcttctggctgaaactgtggctccggctgttaggggatctaacccccatctgcaaacatttacatttacacgagtggaactgggtgaaaagccattgcgcatcattggagtcaaggttcacccaggtcagagaaaagagcagatcctgctggacttgaacatcagctatgtaggtgatgtgcagattgatgtggaagtgaagaaatatttttgcaaagcaggagtcaagggcatgcagctacatggcgttttgcgggtgatactggagccactcattggggaccttcccttcgtgggggctgtgtcaatgttcttcatccgacgcccgaccctagacatcaactggacagggatgaccaacctgctggatatcccaggacttagctcactctctgacaccatgatcatggactccattgctgccttcctcgtgttgcccaaccgattactggtgccccttgtgcctgaccttcaagatgtggctcagttgcgttcccctctgcccaggggcattattcgaattcacctgctggctgctcgagggctgagttccaaggacaaatatgtgaagggcctgattgagggcaagtcagacccatatgcacttgtgcgtttgggtacccagacattctgcagtcgtgtcattgatgaagaactcaacccacagtggggagagacttatgaggtgatggtacacgaggtcccagggcaggagattgaagtggaggtgttcgacaaggatccagataaagatgactttctgggcagaatgaagctggatgtagggaaggtgttacaggctagcgttctggatgattggttccctctacaaggtgggcaaggccaagttcacttgaggctagaatggctgtcacttttgtcagatgcagagaaactggagcaggttctacagtggaattggggagtctcctctcgaccagatcccccgtcagctgccatcttagttgtctacctggatcgggcccaggatcttcctctgaagaaggggaacaaggaacccaaccctatggtacaactgtcaattcaggatgtgactcaggagagcaaggctgtctacagtaccaactgcccagtgtgggaggaagcgttccggttcttcctacaagaccctcaaagccaggagctcgatgtgcaagtgaaggatgattccagggccctgactttaggagcactgacgctgcctctggcccgcctgctgactgccccagaactcatcctggaccagtggttccagctcagcagctctggtccaaactccagactctatatgaaactagtcatgaggatcctgtacttggattcatcagaaatatgcttccccacggtgcctggttgtcctggtgcttgggacgtggacagtgagaatccccagagaggcagcagtgtggatgccccacctcgaccctgtcacacgactcctgatagccagtttgggactgagcatgtgcttcggatccatgtattagaggcccaggacctgattgccaaagaccgtttcttggggggactggtgaagggcaagtcagacccctatgtcaaactaaagttggcaggacgaagcttccggagccatgttgttcgggaagatctcaatccccgctggaatgaggtttttgaggtgatcgtcacatcagttccaggccaagagctagaggttgaagtctttgacaaggacttggacaaggatgattttctgggcaggtgtaaagtgcgtctcaccacagtcttaaacagtggcttccttgatgagtggctgaccctggaggatgtcccatctggccgcctgcacttgcgcctggagcgtctcaccccccgtcccactgctgctgagttagaggaggtagggcaggagacttgaggaaggaagggacccaaggtggggcaggatgagctcttctcttagcgttcaaggcacatgccagaacccaaggtgtcagttaccactccccagccccgtgtgcccctccacaggtgctgcaggtgaatagtttgatccagactcagaagagtgcggagctggctgcggccctgctatccatctatatggagcgggcagaggacctcccgctgcgaaaaggcaccaagcacctcagcccttatgctactctcactgtgggagatagttctcataaaaccaagactatttcgcaaacttcagcccctgtctgggatgagagtgcctcctttctcatcaggaaaccacacactgagagcctagagttgcaggttcggggtgagggcactggcgtgctgggctcattatccctgcccctctcagagctcctcgtggctgaccagctctgcttggaccgctggtttacactcagcagtggtcaggggcaggtgctactgagagcacagctagggatcctggtgtcccagcactcgggagtggaagctcatagccacagctacagccacagctcctcatcgctgagtgaagaaccagagctctcggggggaccccctcacatcacctcctcagccccagagctccggcagcgcctaacacatgttgacagtccccttgaggctccagccgggcctctgggccaggtgaaactgactctgtggtactacagtgaagaacgaaagctggtcagcattgttcatggttgccggtcccttcgacagaatggacgtgatcctcctgatccctatgtgtcactgttgctactgccagacaagaaccgaggcaccaagaggaggacctcacagaagaagaggaccctgagtcctgaatttaatgaacggtttgagtgggaactccccctggatgaggcccagagacgaaagctggatgtctctgtcaagtctaattcctccttcatgtcaagagagcgtgagctgctggggaaggtgcagctggacctagctgagacagacctttcccagggtgtagcccggtggtatgacctgatggacaacaaggacaagggcagctcctaggagctggcgagtcccagcctgactgctctgtcttcctgccttcgtctcgctccatcaccgcctcaatgtgatgagcctaaagctagggtccaagggcagagcctgtgcccttcagccctttcacctaacaggcccatattcgggcctttgcctgaccaaagagaagaaccgtatgttccctttactgcacggcctttatccttctgggcccctggggcggggacctgagctggctgtttcctgctttgcctgcacattgttctcccttcctcccaactcctcagggccttctgtatctgtgcctggccagtggcagcactagcagtggtattagcttatgccaaatacagctttggaaggatctttttttctttaactagatggtcaccttcttccctaccacacatgggtgggaaggtggacaggctaacctctccagctgtgagcctcttagactactgcatgtagcaaatgttcagcagctcaggcccccatgtccagttctgtccccactgtcctcaaccctgtcctgaaaattctactgctttgatggctggggccagtctcttgtcactttggaaactgaggacgcgtggattctactcaagcctccaagtagtggcatatcagtcttggagctcctagctggtgatacggagagggctttggaggacttgggacagcagggccaatttttttgcccaagtgcctaggctgctaactcactgactagaacttaatctggtactttacagttttgcaccaactctgccaagccactggatcttacattaaacatcatactc

SEQ ID NO: 283529 - DNA, 4123 bp, Homo sapiens
catcccggggatcacgttttgcctgggggagctgatcgcaagactaggcaacctccagccagtccctgggtcgggcggatcctcccagaggtggcacaatggagcgatctccaggagagggccccagccccagccccatggaccagccctctgctccctccgaccccactgaccagccccccgctgctcacgcaaagccagacccaggttctgggggccaacctgctggccctggcgcggcgggtgaggccctggcggtgctgacttcattcgggaggcggttgctggtgctgatacctgtgtatttggccggggcagtgggactcagcgtgggtttcgtgctcttcggcctcgccctctacctgggctggcgccgggtccgcgacgagaaagaacggagccttcgagcagcgaggcagctactggacgacgaggagcagctcactgcgaaaactctctatatgagtcatcgagagctacctgcctgggtcagcttcccagacgtggaaaaggctgaatggctcaataagattgtggcccaggtctggcccttcctgggccagtatatggagaagcttctggctgaaactgtggctccggctgttaggggatctaacccccatctgcaaacatttacatttacacgagtggaactgggtgaaaagccattgcgcatcattggagtcaaggttcacccaggtcagagaaaagagcagatcctgctggacttgaacatcagctatgtaggtgatgtgcagattgatgtggaagtgaagaaatatttttgcaaagcaggagtcaagggcatgcagctacatggcgttttgcgggtgatactggagccactcattggggaccttcccttcgtgggggctgtgtcaatgttcttcatccgacgcccgaccctagacatcaactggacagggatgaccaacctgctggatatcccaggacttagctcactctctgacaccatgatcatggactccattgctgccttcctcgtgttgcccaaccgattactggtgccccttgtgcctgaccttcaagatgtggctcagttgcgttcccctctgcccaggggcattattcgaattcacctgctggctgctcgagggctgagttccaaggacaaatatgtgaagggcctgattgagggcaagtcagacccatatgcacttgtgcgtttgggtacccagacattctgcagtcgtgtcattgatgaagaactcaacccacagtggggagagacttatgaggtgatggtacacgaggtcccagggcaggagattgaagtggaggtgttcgacaaggatccagataaagatgactttctgggcagaatgaagctggatgtagggaaggtgttacaggctagcgttctggatgattggttccctctacaaggtgggcaaggccaagttcacttgaggctagaatggctgtcacttttgtcagatgcagagaaactggagcaggttctacagtggaattggggagtctcctctcgaccagatcccccgtcagctgccatcttagttgtctacctggatcgggcccaggatcttcctctgaagaaggggaacaaggaacccaaccctatggtacaactgtcaattcaggatgtgactcaggagagcaaggctgtctacagtaccaactgcccagtgtgggaggaagcgttccggttcttcctacaagaccctcaaagccaggagctcgatgtgcaagtgaaggatgattccagggccctgactttaggagcactgacgctgcctctggcccgcctgctgactgccccagaactcatcctggaccagtggttccagctcagcagctctggtccaaactccagactctatatgaaactagtcatgaggatcctgtacttggattcatcagaaatatgcttccccacggtgcctggttgtcctggtgcttgggacgtggacagtgagaatccccagagaggcagcagtgtggatgccccacctcgaccctgtcacacgactcctgatagccagtttgggactgagcatgtgcttcggatccatgtattagaggcccaggacctgattgccaaagaccgtttcttggggggactggtgaagggcaagtcagacccctatgtcaaactaaagttggcaggacgaagcttccggagccatgttgttcgggaagatctcaatccccgctggaatgaggtttttgaggtgatcgtcacatcagttccaggccaagagctagaggttgaagtctttgacaaggacttggacaaggatgattttctgggcaggtgtaaagtgcgtctcaccacagtcttaaacagtggcttccttgatgagtggctgaccctggaggatgtcccatctggccgcctgcacttgcgcctggagcgtctcaccccccgtcccactgctgctgagttagaggagctgcgaaaaggcaccaagcacctcagcccttatgctactctcactgtgggagatagttctcataaaaccaagactatttcgcaaacttcagcccctgtctgggatgagagtgcctcctttctcatcaggaaaccacacactgagagcctagagttgcaggttcggggtgagggcactggcgtgctgggctcattatccctgcccctctcagagctcctcgtggctgaccagctctgcttggaccgctggtttacactcagcagtggtcaggggcaggtgctactgagagcacagctagggatcctggtgtcccagcactcgggagtggaagctcatagccacagctacagccacagctcctcatcgctgagtgaagaaccagagctctcggggggaccccctcacatcacctcctcagccccagagctccggcagcgcctaacacatgttgacagtccccttgaggctccagccgggcctctgggccaggtgaaactgactctgtggtactacagtgaagaacgaaagctggtcagcattgttcatggttgccggtcccttcgacagaatggacgtgatcctcctgatccctatgtgtcactgttgctactgccagacaagaaccgaggcaccaagaggaggacctcacagaagaagaggaccctgagtcctgaatttaatgaacggtttgagtgggaactccccctggatgaggcccagagacgaaagctggatgtctctgtcaagtctaattcctccttcatgtcaagagagcgtgagctgctggggaaggtgcagctggacctagctgagacagacctttcccagggtgtagcccggtggtatgacctgatggacaacaaggacaagggcagctcctaggagctggcgagtcccagcctgactgctctgtcttcctgccttcgtctcgctccatcaccgcctcaatgtgatgagcctaaagctagggtccaagggcagagcctgtgcccttcagccctttcacctaacaggcccatattcgggcctttgcctgaccaaagagaagaaccgtatgttccctttactgcacggcctttatccttctgggcccctggggcggggacctgagctggctgtttcctgctttgcctgcacattgttctcccttcctcccaactcctcagggccttctgtatctgtgcctggccagtggcagcactagcagtggtattagcttatgccaaatacagctttggaaggatctttttttctttaactagatggtcaccttcttccctaccacacatgggtgggaaggtggacaggctaacctctccagctgtgagcctcttagactactgcatgtagcaaatgttcagcagctcaggcccccatgtccagttctgtccccactgtcctcaaccctgtcctgaaaattctactgctttgatggctggggccagtctcttgtcactttggaaactgaggacgcgtggattctactcaagcctccaagtagtggcatatcagtcttggagctcctagctggtgatacggagagggctttggaggacttgggacagcagggccaatttttttgcccaagtgcctaggctgctaactcactgactagaacttaatctggtactttacagttttgcaccaactctgccaagccactggatcttacattaaacatcatactc

SEQ ID NO: 283530 - DNA, 4412 bp, Homo sapiens
catcccggggatcacgttttgcctgggggagctgatcgcaagactaggcaacctccagccagtccctgggtcgggcggatcctcccagaggtggcacaatggagcgatctccaggagagggccccagccccagccccatggaccagccctctgctccctccgaccccactgaccagccccccgctgctcacgcaaagccagacccaggttctgggggccaacctgctggccctggcgcggcgggtgaggccctggcggtgctgacttcattcgggaggcggttgctggtgctgatacctgtgtatttggccggggcagtgggactcagcgtgggtttcgtgctcttcggcctcgccctctacctgggctggcgccgggtccgcgacgagaaagaacggagccttcgagcagcgaggcagctactggacgacgaggagcagctcactgcgaaaactctctatatgagtcatcgagagctacctgcctgggtcagcttcccagacgtggaaaaggctgaatggctcaataagattgtggcccaggtctggcccttcctgggccagtatatggagaagcttctggctgaaactgtggctccggctgttaggggatctaacccccatctgcaaacatttacatttacacgagtggaactgggtgaaaagccattgcgcatcattggagtcaaggttcacccaggtcagagaaaagagcagatcctgctggacttgaacatcagctatgtaggtgatgtgcagattgatgtggaagtgaagaaatatttttgcaaagcaggagtcaagggcatgcagctacatggcgttttgcgggtgatactggagccactcattggggaccttcccttcgtgggggctgtgtcaatgttcttcatccgacgcccgaccctagacatcaactggacagggatgaccaacctgctggatatcccaggacttagctcactctctgacaccatgatcatggactccattgctgccttcctcgtgttgcccaaccgattactggtgccccttgtgcctgaccttcaagatgtggctcagttgcgttcccctctgcccaggggcattattcgaattcacctgctggctgctcgagggctgagttccaaggacaaatatgtgaagggcctgattgagggcaagtcagacccatatgcacttgtgcgtttgggtacccagacattctgcagtcgtgtcattgatgaagaactcaacccacagtggggagagacttatgaggtgatggtacacgaggtcccagggcaggagattgaagtggaggtgttcgacaaggatccagataaagatgactttctgggcagaatgaagctggatgtagggaaggtgttacaggctagcgttctggatgattggttccctctacaaggtgggcaaggccaagttcacttgaggctagaatggctgtcacttttgtcagatgcagagaaactggagcaggttctacagtggaattggggagtctcctctcgaccagatcccccgtcagctgccatcttagttgtctacctggatcgggcccaggatcttcctctgaagaaggggaacaaggaacccaaccctatggtacaactgtcaattcaggatgtgactcaggagagcaaggctgtctacagtaccaactgcccagtgtgggaggaagcgttccggttcttcctacaagaccctcaaagccaggagctcgatgtgcaagtgaaggatgattccagggccctgactttaggagcactgacgctgcctctggcccgcctgctgactgccccagaactcatcctggaccagtggttccagctcagcagctctggtccaaactccagactctatatgaaactagtcatgaggatcctgtacttggattcatcagaaatatgcttccccacggtgcctggttgtcctggtgcttgggacgtggacagtgagaatccccagagaggcagcagtgtggatgccccacctcgaccctgtcacacgactcctgatagccagtttgggactgagcatgtgcttcggatccatgtattagaggcccaggacctgattgccaaagaccgtttcttggggggactggtgaagggcaagtcagacccctatgtcaaactaaagttggcaggacgaagcttccggagccatgttgttcgggaagatctcaatccccgctggaatgaggtttttgaggtgatcgtcacatcagttccaggccaagagctagaggttgaagtctttgacaaggacttggacaaggatgattttctgggcaggtgtaaagtgcgtctcaccacagtcttaaacagtggcttccttgatgagtggctgaccctggaggatgtcccatctggccgcctgcacttgcgcctggagcgtctcaccccccgtcccactgctgctgagttagaggaggtgctgcaggtgaatagtttgatccagactcagaagagtgcggagctggctgcggccctgctatccatctatatggagcgggcagaggacctcccgctgcgaaaaggcaccaagcacctcagcccttatgctactctcactgtgggagatagttctcataaaaccaagactatttcgcaaacttcagcccctgtctgggatgagagtgcctcctttctcatcaggaaaccacacactgagagcctagagttgcaggttcggggtgagggcactggcgtgctgggctcattatccctgcccctctcagagctcctcgtggctgaccagctctgcttggaccgctggtttacactcagcagtggtcaggggcaggtgctactgagagcacagctagggatcctggtgtcccagcactcgggagtggaagctcatagccacagctacagccacagctcctcatcgctgagtgaagaaccagagctctcggggggaccccctcacatcacctcctcagccccagagctccggcagcgcctaacacatgttgacagtccccttgaggctccagccgggcctctgggccaggtgaaactgactctgtggtactacagtgaagaacgaaagctggtcagcattgttcatggttgccggtcccttcgacagaatggacgtgatcctcctgatccctatgtgtcactgttgctactgccagacaagaaccgaggcaccaagaggaggacctcacagaagaagaggaccctgagtcctgaatttaatgaacggtttgagtgggaactccccctggatgaggcccagagacgaaagctggatgtctctgtcaagtctaattcctccttcatgtcaagagagcgtgagctgctggggaaggtgcagctggacctagctgagacagacctttcccagggtgtagcccggtggtgagtgtctgcgtgggtgggggatggtctggatatttcagtgggagaaattccaatcacaggaaaggaaaaaaagatacaatctgagcagagaaccattgattctatcaagtagagaagcccttggatcgtgtctcatttataaatatgatgacacaagagtcatctttctacatgagccctcttttcacaggtatgacctgatggacaacaaggacaagggcagctcctaggagctggcgagtcccagcctgactgctctgtcttcctgccttcgtctcgctccatcaccgcctcaatgtgatgagcctaaagctagggtccaagggcagagcctgtgcccttcagccctttcacctaacaggcccatattcgggcctttgcctgaccaaagagaagaaccgtatgttccctttactgcacggcctttatccttctgggcccctggggcggggacctgagctggctgtttcctgctttgcctgcacattgttctcccttcctcccaactcctcagggccttctgtatctgtgcctggccagtggcagcactagcagtggtattagcttatgccaaatacagctttggaaggatctttttttctttaactagatggtcaccttcttccctaccacacatgggtgggaaggtggacaggctaacctctccagctgtgagcctcttagactactgcatgtagcaaatgttcagcagctcaggcccccatgtccagttctgtccccactgtcctcaaccctgtcctgaaaattctactgctttgatggctggggccagtctcttgtcactttggaaactgaggacgcgtggattctactcaagcctccaagtagtggcatatcagtcttggagctcctagctggtgatacggagagggctttggaggacttgggacagcagggccaatttttttgcccaagtgcctaggctgctaactcactgactagaacttaatctggtactttacagttttgcaccaactctgccaagccactggatcttacattaaacatcatactc

SEQ ID NO: 283531 - DNA, 4456 bp, Homo sapiens
  misc_feature (4353)..(4353): n is a, c, g, or t
  misc_feature (4356)..(4356): n is a, c, g, or t
  misc_feature (4358)..(4358): n is a, c, g, or t
  misc_feature (4368)..(4368): n is a, c, g, or t
  misc_feature (4375)..(4375): n is a, c, g, or t
  misc_feature (4386)..(4386): n is a, c, g, or t
  misc_feature (4390)..(4390): n is a, c, g, or t
  misc_feature (4400)..(4400): n is a, c, g, or t
  misc_feature (4411)..(4411): n is a, c, g, or t
catcccggggatcacgttttgcctgggggagctgatcgcaagactaggcaacctccagccagtccctgggtcgggcggatcctcccagaggtggcacaatggagcgatctccaggagagggccccagccccagccccatggaccagccctctgctccctccgaccccactgaccagccccccgctgctcacgcaaagccagacccaggttctgggggccaacctgctggccctggcgcggcgggtgaggccctggcggtgctgacttcattcgggaggcggttgctggtgctgatacctgtgtatttggccggggcagtgggactcagcgtgggtttcgtgctcttcggcctcgccctctacctgggctggcgccgggtccgcgacgagaaagaacggagccttcgagcagcgaggcagctactggacgacgaggagcagctcactgcgaaaactctctatatgagtcatcgagagctacctgcctgggtcagcttcccagacgtggaaaaggctgaatggctcaataagattgtggcccaggtctggcccttcctgggccagtatatggagaagcttctggctgaaactgtggctccggctgttaggggatctaacccccatctgcaaacatttacatttacacgagtggaactgggtgaaaagccattgcgcatcattggagtcaaggttcacccaggtcagagaaaagagcagatcctgctggacttgaacatcagctatgtaggtgatgtgcagattgatgtggaagtgaagaaatatttttgcaaagcaggagtcaagggcatgcagctacatggcgttttgcgggtgatactggagccactcattggggaccttcccttcgtgggggctgtgtcaatgttcttcatccgacgcccgaccctagacatcaactggacagggatgaccaacctgctggatatcccaggacttagctcactctctgacaccatgatcatggactccattgctgccttcctcgtgttgcccaaccgattactggtgccccttgtgcctgaccttcaagatgtggctcagttgcgttcccctctgcccaggggcattattcgaattcacctgctggctgctcgagggctgagttccaaggacaaatatgtgaagggcctgattgagggcaagtcagacccatatgcacttgtgcgtttgggtacccagacattctgcagtcgtgtcattgatgaagaactcaacccacagtggggagagacttatgaggtgatggtacacgaggtcccagggcaggagattgaagtggaggtgttcgacaaggatccagataaagatgactttctgggcagaatgaagctggatgtagggaaggtgttacaggctagcgttctggatgattggttccctctacaaggtgggcaaggccaagttcacttgaggctagaatggctgtcacttttgtcagatgcagagaaactggagcaggttctacagtggaattggggagtctcctctcgaccagatcccccgtcagctgccatcttagttgtctacctggatcgggcccaggatcttcctctgaagaaggggaacaaggaacccaaccctatggtacaactgtcaattcaggatgtgactcaggagagcaaggctgtctacagtaccaactgcccagtgtgggaggaagcgttccggttcttcctacaagaccctcaaagccaggagctcgatgtgcaagtgaaggatgattccagggccctgactttaggagcactgacgctgcctctggcccgcctgctgactgccccagaactcatcctggaccagtggttccagctcagcagctctggtccaaactccagactctatatgaaactagtcatgaggatcctgtacttggattcatcagaaatatgcttccccacggtgcctggttgtcctggtgcttgggacgtggacagtgagaatccccagagaggcagcagtgtggatgccccacctcgaccctgtcacacgactcctgatagccagtttgggactgagcatgtgcttcggatccatgtattagaggcccaggacctgattgccaaagaccgtttcttggggggactggtgaagggcaagtcagacccctatgtcaaactaaagttggcaggacgaagcttccggagccatgttgttcgggaagatctcaatccccgctggaatgaggtttttgaggtgatcgtcacatcagttccaggccaagagctagaggttgaagtctttgacaaggacttggacaaggatgattttctgggcaggtgtaaagtgcgtctcaccacagtcttaaacagtggcttccttgatgagtggctgaccctggaggatgtcccatctggccgcctgcacttgcgcctggagcgtctcaccccccgtcccactgctgctgagttagaggaggtgctgcaggtgaatagtttgatccagactcagaagagtgcggagctggctgcggccctgctatccatctatatggagcgggcagaggacctcccgctgcgaaaaggcaccaagcacctcagcccttatgctactctcactgtgggagatagttctcataaaaccaagactatttcgcaaacttcagcccctgtctgggatgagagtgcctcctttctcatcaggaaaccacacactgagagcctagagttgcaggttcggggtgagggcactggcgtgctgggctcattatccctgcccctctcagagctcctcgtggctgaccagctctgcttggaccgctggtttacactcagcagtggtcaggggcaggtgctactgagagcacagctagggatcctggtgtcccagcactcgggagtggaagctcatagccacagctacagccacagctcctcatcgctgagtgaagaaccagagctctcggggggaccccctcacatcacctcctcagccccagagctccggcagcgcctaacacatgttgacagtccccttgaggctccagccgggcctctgggccaggtgaaactgactctgtggtactacagtgaagaacgaaagctggtcagcattgttcatggttgccggtcccttcgacagaatggacgtgatcctcctgatccctatgtgtcactgttgctactgccagacaagaaccgaggcaccaagaggaggacctcacagaagaagaggaccctgagtcctgaatttaatgaacggtttgagtgggaactccccctggatgaggcccagagacgaaagctggatgtctctgtcaagtctaattcctccttcatgtcaagagagcgtgagctgctggggaaggtgcagctggacctagctgagacagacctttcccagggtgtagcccggtggtatgacctgatggacaacaaggacaagggcagctcctaggagctggcgagtcccagcctgactgctctgtcttcctgccttcgtctcgctccatcaccgcctcaatgtgatgagcctaaagctagggtccaagggcagagcctgtgcccttcagccctttcacctaacaggcccatattcgggcctttgcctgaccaaagagaagaaccgtatgttccctttactgcacggcctttatccttctgggcccctggggcggggacctgagctggctgtttcctgctttgcctgcacattgttctcccttcctcccaactcctcagggccttctgtatctgtgcctggccagtggcagcactagcagtggtattagcttatgccaaatacagctttggaaggatctttttttctttaactagatggtcaccttcttccctaccacacatgggtgggaaggtggacaggctaacctctccagctgtgagcctcttagactactgcatgtagcaaatgttcagcagctcaggcccccatgtccagttctgtccccactgtcctcaaccctgtcctgaaaattctactgctttgatggctggggccagtctcttgtcactttggaaactgaggacgcgtggattctactcaagcctccaagtagtggcatatcagtcttggagctcctagctggtgatacggagagggctttggaggacttgggacagcagggccaatttttttgcccaagtgcctaggctgctaactcactgactagaacttaatctggtactttacagttttgcaccaactctgccaagccactggatcttacattaaacatcatactcggaaaaaaaacaaacaaaaaaaaaaaaaaaaaaactgtgtgtgggcgcgcccccggggccccgagaaaaggtttttaaaacccatcggtgggggcgcgcggggccccaagaggtacgtggaccggggcccaaanggngnccaaaggaancccggcnaagacccgggngggntccccccaanaaaaaacgccnggggaacccggggtccgacaacccaaggggcggcccaaaggcccc

SEQ ID NO: 283532 - DNA, 3154 bp, Homo sapiens
catcccggggatcacgttttgcctgggggagctgatcgcaagactaggcaacctccagccagtccctgggtcgggcggatcctcccagaggtggcacaatggagcgatctccaggagagggccccagccccagccccatggaccagccctctgctccctccgaccccactgaccagccccccgctgctcacgcaaagccagacccaggttctgggggccaacctgctggccctggcgcggcgggtgaggccctggcggtgctgacttcattcgggaggcggttgctggtgctgatacctgtgtatttggccggggcagtgggactcagcgtgggtttcgtgctcttcggcctcgccctctacctgggctggcgccgggtccgcgacgagaaagaacggagccttcgagcagcgaggcagctactggacgacgaggagcagctcactgcgaaaactctctatatgagtcatcgagagctacctgcctgggtcagcttcccagacgtggaaaaggctgaatggctcaataagattgtggcccaggtctggcccttcctgggccagtatatggagaagcttctggctgaaactgtggctccggctgttaggggatctaacccccatctgcaaacatttacatttacacgagtggaactgggtgaaaagccattgcgcatcattggagtcaaggttcacccaggtcagagaaaagagcagatcctgctggacttgaacatcagctatgtaggtgatgtgcagattgatgtggaagtgaagaaatatttttgcaaagcaggagtcaagggcatgcagctacatggcgttttgcgggtgatactggagccactcattggggaccttcccttcgtgggggctgtgtcaatgttcttcatccgacgcccgaccctagacatcaactggacagggatgaccaacctgctggatatcccaggacttagctcactctctgacaccatgatcatggactccattgctgccttcctcgtgttgcccaaccgattactggtgccccttgtgcctgaccttcaagatgtggctcagttgcgttcccctctgcccaggggcattattcgaattcacctgctggctgctcgagggctgagttccaaggacaaatatgtgaagggcctgattgagggcaagtcagacccatatgcacttgtgcgtttgggtacccagacattctgcagtcgtgtcattgatgaagaactcaacccacagtggggagagacttatgaggtgatggtacacgaggtcccagggcaggagattgaagtggaggtgttcgacaaggatccagataaagatgactttctgggcagaatgaagctggatgtagggaaggtgttacaggctagcgttctggatgattggttccctctacaaggtgggcaaggccaagttcacttgaggctagaatggctgtcacttttgtcagatgcagagaaactggagcaggttctacagtggaattggggagtctcctctcgaccagatcccccgtcagctgccatcttagttgtctacctggatcgggcccaggatcttcctctgaagaaggggaacaaggaacccaaccctatggtacaactgtcaattcaggatgtgactcaggagagcaaggctgtctacagtaccaactgcccagtgtgggaggaagcgttccggttcttcctacaagaccctcaaagccaggagctcgatgtgcaagtgaaggatgattccagggccctgactttaggagcaatcctggtgtcccagcactcgggagtggaagctcatagccacagctacagccacagctcctcatcgctgagtgaagaaccagagctctcggggggaccccctcacatcacctcctcagccccagagctccggcagcgcctaacacatgttgacagtccccttgaggctccagccgggcctctgggccaggtgaaactgactctgtggtactacagtgaagaacgaaagctggtcagcattgttcatggttgccggtcccttcgacagaatggacgtgatcctcctgatccctatgtgtcactgttgctactgccagacaagaaccgaggcaccaagaggaggacctcacagaagaagaggaccctgagtcctgaatttaatgaacggtttgagtgggaactccccctggatgaggcccagagacgaaagctggatgtctctgtcaagtctaattcctccttcatgtcaagagagcgtgagctgctggggaaggtgcagctggacctagctgagacagacctttcccagggtgtagcccggtggtatgacctgatggacaacaaggacaagggcagctcctaggagctggcgagtcccagcctgactgctctgtcttcctgccttcgtctcgctccatcaccgcctcaatgtgatgagcctaaagctagggtccaagggcagagcctgtgcccttcagccctttcacctaacaggcccatattcgggcctttgcctgaccaaagagaagaaccgtatgttccctttactgcacggcctttatccttctgggcccctggggcggggacctgagctggctgtttcctgctttgcctgcacattgttctcccttcctcccaactcctcagggccttctgtatctgtgcctggccagtggcagcactagcagtggtattagcttatgccaaatacagctttggaaggatctttttttctttaactagatggtcaccttcttccctaccacacatgggtgggaaggtggacaggctaacctctccagctgtgagcctcttagactactgcatgtagcaaatgttcagcagctcaggcccccatgtccagttctgtccccactgtcctcaaccctgtcctgaaaattctactgctttgatggctggggccagtctcttgtcactttggaaactgaggacgcgtggattctactcaagcctccaagtagtggcatatcagtcttggagctcctagctggtgatacggagagggctttggaggacttgggacagcagggccaatttttttgcccaagtgcctaggctgctaactcactgactagaacttaatctggtactttacagttttgcaccaactctgccaagccactggatcttacattaaacatcatactc

SEQ ID NO: 283533 - DNA, 2119 bp, Homo sapiens
aggtgatcgtcacatcagttccaggccaagagctagaggttgaagtctttgacaaggacttggacaaggatgattttctgggcaggtgagagcataggagtctacgtgaaaaacaggctggggctctttaggccatggagtctggcctccttggttctcaccatctagcttttgtcttaatctttctcttcaacaggtgtaaagtgcgtctcaccacagtcttaaacagtggcttccttgatgagtggctgaccctggaggatgtcccatctggccgcctgcacttgcgcctggagcgtctcaccccccgtcccactgctgctgagttagaggaggtgctgcaggtgaatagtttgatccagactcagaagagtgcggagctggctgcggccctgctatccatctatatggagcgggcagaggacctcccgctgcgaaaaggcaccaagcacctcagcccttatgctactctcactgtgggagatagttctcataaaaccaagactatttcgcaaacttcagcccctgtctgggatgagagtgcctcctttctcatcaggaaaccacacactgagagcctagagttgcaggttcggggtgagggcactggcgtgctgggctcattatccctgcccctctcagagctcctcgtggctgaccagctctgcttggaccgctggtttacactcagcagtggtcaggggcaggtgctactgagagcacagctagggatcctggtgtcccagcactcgggagtggaagctcatagccacagctacagccacagctcctcatcgctgagtgaagaaccagagctctcggggggaccccctcacatcacctcctcagccccagagctccggcagcgcctaacacatgttgacagtccccttgaggctccagccgggcctctgggccaggtgaaactgactctgtggtactacagtgaagaacgaaagctggtcagcattgttcatggttgccggtcccttcgacagaatggacgtgatcctcctgatccctatgtgtcactgttgctactgccagacaagaaccgaggcaccaagaggaggacctcacagaagaagaggaccctgagtcctgaatttaatgaacggtttgagtgggaactccccctggatgaggcccagagacgaaagctggatgtctctgtcaagtctaattcctccttcatgtcaagagagcgtgagctgctggggaaggtgcagctggacctagctgagacagacctttcccagggtgtagcccggtggtatgacctgatggacaacaaggacaagggcagctcctaggagctggcgagtcccagcctgactgctctgtcttcctgccttcgtctcgctccatcaccgcctcaatgtgatgagcctaaagctagggtccaagggcagagcctgtgcccttcagccctttcacctaacaggcccatattcgggcctttgcctgaccaaagagaagaaccgtatgttccctttactgcacggcctttatccttctgggcccctggggcggggacctgagctggctgtttcctgctttgcctgcacattgttctcccttcctcccaactcctcagggccttctgtatctgtgcctggccagtggcagcactagcagtggtattagcttatgccaaatacagctttggaaggatctttttttctttaactagatggtcaccttcttccctaccacacatgggtgggaaggtggacaggctaacctctccagctgtgagcctcttagactactgcatgtagcaaatgttcagcagctcaggcccccatgtccagttctgtccccactgtcctcaaccctgtcctgaaaattctactgctttgatggctggggccagtctcttgtcactttggaaactgaggacgcgtggattctactcaagcctccaagtagtggcatatcagtcttggagctcctagctggtgatacggagagggctttggaggacttgggacagcagggccaatttttttgcccaagtgcctaggctgctaactcactgactagaacttaatctggtactttacagttttgcaccaactctgccaagccactggatcttacattaaacatcatactc

SEQ ID NO: 283534 - DNA, 4176 bp, Homo sapiens
catcccggggatcacgttttgcctgggggagctgatcgcaagactaggcaacctccagccagtccctgggtcgggcggatcctcccagaggtggcacaatggagcgatctccaggagagggccccagccccagccccatggaccagccctctgctccctccgaccccactgaccagccccccgctgctcacgcaaagccagacccaggttctgggggccaacctgctggccctggcgcggcgggtgaggccctggcggtgctgacttcattcgggaggcggttgctggtgctgatacctgtgtatttggccggggcagtgggactcagcgtgggtttcgtgctcttcggcctcgccctctacctgggctggcgccgggtccgcgacgagaaagaacggagccttcgagcagcgaggcagctactggacgacgaggagcagctcactgcgaaaactctctatatgagtcatcgagagctacctgcctgggtcagcttcccagacgtggaaaaggctgaatggctcaataagattgtggcccaggtctggcccttcctgggccagtatatggagaagcttctggctgaaactgtggctccggctgttaggggatctaacccccatctgcaaacatttacatttacacgagtggaactgggtgaaaagccattgcgcatcattggagtcaaggttcacccaggtcagagaaaagagcagatcctgctggacttgaacatcagctatgtaggtgatgtgcagattgatgtggaagtgaagaaatatttttgcaaagcaggagtcaagggcatgcagctacatggcgttttgcgggtgatactggagccactcattggggaccttcccttcgtgggggctgtgtcaatgttcttcatccgacgcccgaccctagacatcaactggacagggatgaccaacctgctggatatcccaggacttagctcactctctgacaccatgatcatggactccattgctgccttcctcgtgttgcccaaccgattactggtgccccttgtgcctgaccttcaagatgtggctcagttgcgttcccctctgcccaggggcattattcgaattcacctgctggctgctcgagggctgagttccaaggacaaatatgtgaagggcctgattgagggcaagtcagacccatatgcacttgtgcgtttgggtacccagacattctgcagtcgtgtcattgatgaagaactcaacccacagtggggagagacttatgaggtgatggtacacgaggtcccagggcaggagattgaagtggaggtgttcgacaaggatccagataaagatgactttctgggcagaatgaagctggatgtagggaaggtgttacaggctagcgttctggatgattggttccctctacaaggtgggcaaggccaagttcacttgaggctagaatggctgtcacttttgtcagatgcagagaaactggagcaggttctacagtggaattggggagtctcctctcgaccagatcccccgtcagctgccatcttagttgtctacctggatcgggcccaggatcttcctctgaagaaggggaacaaggaacccaaccctatggtacaactgtcaattcaggatgtgactcaggagagcaaggctgtctacagtaccaactgcccagtgtgggaggaagcgttccggttcttcctacaagaccctcaaagccaggagctcgatgtgcaagtgaaggatgattccagggccctgactttaggagcactgacgctgcctctggcccgcctgctgactgccccagaactcatcctggaccagtggttccagctcagcagctctggtccaaactccagactctatatgaaactagtcatgaggatcctgtacttggattcatcagaaatatgcttccccacggtgcctggttgtcctggtgcttgggacgtggacagtgagaatccccagagaggcagcagtgtggatgccccacctcgaccctgtcacacgactcctgatagccagtttgggactgagcatgtgcttcggatccatgtattagaggcccaggacctgattgccaaagaccgtttcttggggggactggtgaagggcaagtcagacccctatgtcaaactaaagttggcaggacgaagcttccggagccatgttgttcgggaagatctcaatccccgctggaatgaggtttttgaggtgatcgtcacatcagttccaggccaagagctagaggttgaagtctttgacaaggacttggacaaggatgattttctgggcaggtgtaaagtgcgtctcaccacagtcttaaacagtggcttccttgatgagtggctgaccctggaggatgtcccatctggccgcctgcacttgcgcctggagcgtctcaccccccgtcccactgctgctgagttagaggaggtgctgcaggtgaatagtttgatccagactcagaagagtgcggagctggctgcggccctgctatccatctatatggagcgggcagaggacctcccgctgcgaaaaggcaccaagcacctcagcccttatgctactctcactgtgggagatagttctcataaaaccaagactatttcgcaaacttcagcccctgtctgggatgagagtgcctcctttctcatcaggaaaccacacactgagagcctagagttgcaggttcggggtgagggcactggcgtgctgggctcattatccctgcccctctcagagctcctcgtggctgaccagctctgcttggaccgctggtttacactcagcagtggtcaggggcaggtgctactgagagcacagctagggatcctggtgtcccagcactcgggagtggaagctcatagccacagctacagccacagctcctcatcgctgagtgaagaaccagagctctcggggggaccccctcacatcacctcctcagccccagagctccggcagcgcctaacacatgttgacagtccccttgaggctccagccgggcctctgggccaggtgaaactgactctgtggtactacagtgaagaacgaaagctggtcagcattgttcatggttgccggtcccttcgacagaatggacgtgatcctcctgatccctatgtgtcactgttgctactgccagacaagaaccgaggcaccaagaggaggacctcacagaagaagaggaccctgagtcctgaatttaatgaacggtttgagtgggaactccccctggatgaggcccagagacgaaagctggatgtctctgtcaagtctaattcctccttcatgtcaagagagcgtgagctgctggggaaggtgcagctggacctagctgagacagacctttcccagggtgtagcccggtggtatgacctgatggacaacaaggacaagggcagctcctaggagctggcgagtcccagcctgactgctctgtcttcctgccttcgtctcgctccatcaccgcctcaatgtgatgagcctaaagctagggtccaagggcagagcctgtgcccttcagccctttcacctaacaggcccatattcgggcctttgcctgaccaaagagaagaaccgtatgttccctttactgcacggcctttatccttctgggcccctggggcggggacctgagctggctgtttcctgctttgcctgcacattgttctcccttcctcccaactcctcagggccttctgtatctgtgcctggccagtggcagcactagcagtggtattagcttatgccaaatacagctttggaaggatctttttttctttaactagatggtcaccttcttccctaccacacatgggtgggaaggtggacaggctaacctctccagctgtgagcctcttagactactgcatgtagcaaatgttcagcagctcaggcccccatgtccagttctgtccccactgtcctcaaccctgtcctgaaaattctactgctttgatggctggggccagtctcttgtcactttggaaactgaggacgcgtggattctactcaagcctccaagtagtggcatatcagtcttggagctcctagctggtgatacggagaggtttggggaaaaacaatttaaaaaagggccaagttatgagcaaagtgcgtaggcgggtacgtcaccgacgagaatcgtaatgtggtactgtacactggtgat

SEQ ID NO: 283535 - DNA, 3992 bp, Homo sapiens
catcccggggatcacgttttgcctgggggagctgatcgcaagactaggcaacctccagccagtccctgggtcgggcggatcctcccagaggtggcacaatggagcgatctccaggagagggccccagccccagccccatggaccagccctctgctccctccgaccccactgaccagccccccgctgctcacgcaaagccagacccaggttctgggggccaacctgctggccctggcgcggcgggtgaggccctggcggtgctgacttcattcgggaggcggttgctggtgctgatacctgtgtatttggccggggcagtgggactcagcgtgggtttcgtgctcttcggcctcgccctctacctgggctggcgccgggtccgcgacgagaaagaacggagccttcgagcagcgaggcagctactggacgacgaggagcagctcactgcgaaaactctctatatgagtcatcgagagctacctgcctgggtcagcttcccagacgtggaaaaggctgaatggctcaataagattgtggcccaggtctggcccttcctgggccagtatatggagaagcttctggctgaaactgtggctccggctgttaggggatctaacccccatctgcaaacatttacatttacacgagtggaactgggtgaaaagccattgcgcatcattggagtcaaggttcacccaggtcagagaaaagagcagatcctgctggacttgaacatcagctatgtaggtgatgtgcagattgatgtggaagtgaagaaatatttttgcaaagcaggagtcaagggcatgcagctacatggcgttttgcgggtgatactggagccactcattggggaccttcccttcgtgggggctgtgtcaatgttcttcatccgacgcccgaccctagacatcaactggacagggatgaccaacctgctggatatcccaggacttagctcactctctgacaccatgatcatggactccattgctgccttcctcgtgttgcccaaccgattactggtgccccttgtgcctgaccttcaagatgtggctcagttgcgttcccctctgcccaggggcattattcgaattcacctgctggctgctcgagggctgagttccaaggacaaatatgtgaagggcctgattgagggcaagtcagacccatatgcacttgtgcgtttgggtacccagacattctgcagtcgtgtcattgatgaagaactcaacccacagtggggagagacttatgaggtgatggtacacgaggtcccagggcaggagattgaagtggaggtgttcgacaaggatccagataaagatgactttctgggcagaatgaagctggatgtagggaaggtgttacaggctagcgttctggatgattggttccctctacaaggtgggcaaggccaagttcacttgaggctagaatggctgtcacttttgtcagatgcagagaaactggagcaggttctacagtggaattggggagtctcctctcgaccagatcccccgtcagctgccatcttagttgtctacctggatcgggcccaggatcttcctctgaagaaggggaacaaggaacccaaccctatggtacaactgtcaattcaggatgtgactcaggagagcaaggctgtctacagtaccaactgcccagtgtgggaggaagcgttccggttcttcctacaagaccctcaaagccaggagctcgatgtgcaagtgaaggatgattccagggccctgactttaggagcactgacgctgcctctggcccgcctgctgactgccccagaactcatcctggaccagtggttccagctcagcagctctggtccaaactccagactctatatgaaactagtcatgaggatcctgtacttggattcatcagaaatatgcttccccacggtgcctggttgtcctggtgcttgggacgtggacagtgagaatccccagagaggcagcagtgtggatgccccacctcgaccctgtcacacgactcctgatagccagtttgggactgagcatgtgcttcggatccatgtattagaggcccaggacctgattgccaaagaccgtttcttggggggactggtgaagggcaagtcagacccctatgtcaaactaaagttggcaggacgaagcttccggagccatgttgttcgggaagatctcaatccccgctggaatgaggtttttgaggtgatcgtcacatcagttccaggccaagagctagaggttgaagtctttgacaaggacttggacaaggatgattttctgggcaggtgtaaagtgcgtctcaccacagtcttaaacagtggcttccttgatgagtggctgaccctggaggatgtcccatctggccgcctgcacttgcgcctggagcgtctcaccccccgtcccactgctgctgagttagaggaggtgctgcaggtgaatagtttgatccagactcagaagagtgcggagctggctgcggccctgctatccatctatatggagcgggcagaggacctcccgctgcgaaaaggcaccaagcacctcagcccttatgctactctcactgtgggagatagttctcataaaaccaagactatttcgcaaacttcagcccctgtctgggatgagagtgcctcctttctcatcaggaaaccacacactgagagcctagagttgcaggttcggggtgagggcactggcgtgctgggctcattatccctgcccctctcagagctcctcgtggctgaccagctctgcttggaccgctggtttacactcagcagtggtcaggggcaggtgctactgagagcacagctagggatcctggtgtcccagcactcgggagtggaagctcatagccacagctacagccacagctcctcatcgctgagtgaagaaccagagctctcggggggaccccctcacatcacctcctcagccccagagctccggcagcgcctaacacatgttgacagtccccttgaggctccagccgggcctctgggccaggtgaaactgactctgtggtactacagtgaagaacgaaagctggtcagcattgttcatggttgccggtcccttcgacagaatggacgtgatcctcctgatccctatgtgtcactgttgctactgccagacaagaaccgaggcaccaagaggaggacctcacagaagaagaggaccctgagtcctgaatttaatgaacggtttgagtgggaactccccctggatgaggcccagagacgaaagctggatgtctctgtcaagtctaattcctccttcatgtcaagagagcgtgagctgctggggaaggtgcagctggacctagctgagacagacctttcccagggtgtagcccggtggtatgacctgatggacaacaaggacaagggcagctcctaggagctggcgagtcccagcctgactgctctgtcttcctgccttcgtctcgctccatcaccgcctcaatgtgatgagcctaaagctagggtccaagggcagagcctgtgcccttcagccctttcacctaacaggcccatattcgggcctttgcctgaccaaagagaagaaccgtatgttccctttactgcacggcctttatccttctgggcccctggggcggggacctgagctggctgtttcctgctttgcctgcacattgttctcccttcctcccaactcctcagggccttctgtatcctgtcctgaaaattctactgctttgatggctggggccagtctcttgtcactttggaaactgaggacgcgtggattctactcaagcctccaagtagtggcatatcagtcttggagctcctagctggtgatacggagagggctttggaggacttgggacagcagggccaatttttttgcccaagtgcctaggctgctaactcactgactagaacttaatctggtactttacagttttgcaccaactctgccaagccactggatcttacattaaacatcatactc

SEQ ID NO: 283536 - DNA, 4591 bp, Homo sapiens
  misc_feature (3946)..(3946): n is a, c, g, or t
  misc_feature (3948)..(3948): n is a, c, g, or t
catcccggggatcacgttttgcctgggggagctgatcgcaagactaggcaacctccagccagtccctgggtcgggcggatcctcccagaggtggcacaatggagcgatctccaggagagggccccagccccagccccatggaccagccctctgctccctccgaccccactgaccagccccccgctgctcacgcaaagccagacccaggttctgggggccaacctgctggccctggcgcggcgggtgaggccctggcggtgctgacttcattcgggaggcggttgctggtgctgatacctgtgtatttggccggggcagtgggactcagcgtgggtttcgtgctcttcggcctcgccctctacctgggctggcgccgggtccgcgacgagaaagaacggagccttcgagcagcgaggcagctactggacgacgaggagcagctcactgcgaaaactctctatatgagtcatcgagagctacctgcctgggtcagcttcccagacgtggaaaaggctgaatggctcaataagattgtggcccaggtctggcccttcctgggccagtatatggagaagcttctggctgaaactgtggctccggctgttaggggatctaacccccatctgcaaacatttacatttacacgagtggaactgggtgaaaagccattgcgcatcattggagtcaaggttcacccaggtcagagaaaagagcagatcctgctggacttgaacatcagctatgtaggtgatgtgcagattgatgtggaagtgaagaaatatttttgcaaagcaggagtcaagggcatgcagctacatggcgttttgcgggtgatactggagccactcattggggaccttcccttcgtgggggctgtgtcaatgttcttcatccgacgcccgaccctagacatcaactggacagggatgaccaacctgctggatatcccaggacttagctcactctctgacaccatgatcatggactccattgctgccttcctcgtgttgcccaaccgattactggtgccccttgtgcctgaccttcaagatgtggctcagttgcgttcccctctgcccaggggcattattcgaattcacctgctggctgctcgagggctgagttccaaggacaaatatgtgaagggcctgattgagggcaagtcagacccatatgcacttgtgcgtttgggtacccagacattctgcagtcgtgtcattgatgaagaactcaacccacagtggggagagacttatgaggtgatggtacacgaggtcccagggcaggagattgaagtggaggtgttcgacaaggatccagataaagatgactttctgggcagaatgaagctggatgtagggaaggtgttacaggctagcgttctggatgattggttccctctacaaggtgggcaaggccaagttcacttgaggctagaatggctgtcacttttgtcagatgcagagaaactggagcaggttctacagtggaattggggagtctcctctcgaccagatcccccgtcagctgccatcttagttgtctacctggatcgggcccaggatcttcctctgaagaaggggaacaaggaacccaaccctatggtacaactgtcaattcaggatgtgactcaggagagcaaggctgtctacagtaccaactgcccagtgtgggaggaagcgttccggttcttcctacaagaccctcaaagccaggagctcgatgtgcaagtgaaggatgattccagggccctgactttaggagcactgacgctgcctctggcccgcctgctgactgccccagaactcatcctggaccagtggttccagctcagcagctctggtccaaactccagactctatatgaaactagtcatgaggatcctgtacttggattcatcagaaatatgcttccccacggtgcctggttgtcctggtgcttgggacgtggacagtgagaatccccagagaggcagcagtgtggatgccccacctcgaccctgtcacacgactcctgatagccagtttgggactgagcatgtgcttcggatccatgtattagaggcccaggacctgattgccaaagaccgtttcttggggggactggtgaagggcaagtcagacccctatgtcaaactaaagttggcaggacgaagcttccggagccatgttgttcgggaagatctcaatccccgctggaatgaggtttttgaggtgatcgtcacatcagttccaggccaagagctagaggttgaagtctttgacaaggacttggacaaggatgattttctgggcaggtgtaaagtgcgtctcaccacagtcttaaacagtggcttccttgatgagtggctgaccctggaggatgtcccatctggccgcctgcacttgcgcctggagcgtctcaccccccgtcccactgctgctgagttagaggaggtgctgcaggtgaatagtttgatccagactcagaagagtgcggagctggctgcggccctgctatccatctatatggagcgggcagaggacctcccgctgcgaaaaggcaccaagcacctcagcccttatgctactctcactgtgggagatagttctcataaaaccaagactatttcgcaaacttcagcccctgtctgggatgagagtgcctcctttctcatcaggaaaccacacactgagagcctagagttgcaggttcggggtgagggcactggcgtgctgggctcattatccctgcccctctcagagctcctcgtggctgaccagctctgcttggaccgctggtttacactcagcagtggtcaggggcaggtgctactgagagcacagctagggatcctggtgtcccagcactcgggagtggaagctcatagccacagctacagccacagctcctcatcgctgagtgaagaaccagagctctcggggggaccccctcacatcacctcctcagccccagagctccggcagcgcctaacacatgttgacagtccccttgaggctccagccgggcctctgggccaggtgaaactgactctgtggtactacagtgaagaacgaaagctggtcagcattgttcatggttgccggtcccttcgacagaatggacgtgatcctcctgatccctatgtgtcactgttgctactgccagacaagaaccgaggcaccaagaggaggacctcacagaagaagaggaccctgagtcctgaatttaatgaacggtttgagtgggaactccccctggatgaggcccagagacgaaagctggatgtctctgtcaagtctaattcctccttcatgtcaagagagcgtgagctgctggggaaggtgcagctggacctagctgagacagacctttcccagggtgtagcccggtggtatgacctgatggacaacaaggacaagggcagctcctaggagctggcgagtcccagcctgactgctctgtcttcctgccttcgtctcgctccatcaccgcctcaatgtgatgagcctaaagctagggtccaagggcagagcctgtgcccttcagccctttcacctaacaggcccatattcgggcctttgcctgaccaaagagaagaaccgtatgttccctttactgcacggcctttatccttctgggcccccatgtccagttctgtccccactgtcctcaaccctgtcctgaaaattctactgctttgatggctggggccagtctcttgtcactttggaaactgaggacgcgtggattctactcaagcctccaagtagtggcatatcagtcttggagctcctagctggtgatacggagagggctttggaggacttgggacagcagggccaatttttttgcccaagtgcctaggctgctaactcactgactagaacttaatctggtactttacagttttgcaccaactctgccaagccactggatcttacattaaacatcatactcggaaaananacagcaaaaaaacaacaaaaacagaaaaccacctgggcgcggccgcgccaggacccccgcaaaaaacggctttcagaaaccccccttcggtgggcgcgccgccggcgcccccagacgggcaacacctgacacccgcggcgccaacggcggtcccaaagagaaaaccccggggccagagacccgacggggctggagtctcccacccgcagaaaaaaaaaccgcgccgggggcgacacccgacgcgggtctgggaaccaacccagaggggctccgggacgcaacacgggggtatccaacacaacgggggccccaaggcaggctgagaatcaaaaatagccccggcggggggtaacagaaacgagagcagacggagtcaaccaaaggaaagacaaaacagccagcactagataccacgaacaacacactatcctaaggacgcacaccacgcaaagctcagagcacagaatagaacgcaagagagagaagactacagacatacagagacagaagatcaagcaaacagacacagcaccacgcgaaagagaaacagaagatcagacagcaaagaacgcacgcaacacgtcgaagctaacaagagaacacaccaggacgaacgacagagcgaagacgcaaagagacaacg

SEQ ID NO: 283537 - DNA, 1057 bp, Homo sapiens
gagagaagacttaacggctaggtacgaggctgggtggcgcctgaattaatgaacggtttgagtgggaactccccctggatgaggcccagagacgaaagctggatgtctctgtcaagtctaattcctccttcatgtcaagagagcgtgagctgctggggaaggtgcagctggacctagctgagacagacctttcccagggtgtagcccggtggtatgacctgatggacaacaaggacaagggcagctcctaggagctggcgagtcccagcctgactgctctgtcttcctgccttcgtctcgctccatcaccgcctcaatgtgatgagcctaaagctagggtccaagggcagagcctgtgcccttcagccctttcacctaacaggcccatattcgggcctttgcctgaccaaagagaagaaccgtatgttccctttactgcacggcctttatccttctgggcccctggggcggggacctgagctggctgtttcctgctttgcctgcacattgttctcccttcctcccaactcctcagggccttctgtatctgtgcctggccagtggcagcactagcagtggtattagcttatgccaaatacagctttggaaggatctttttttctttaactagatggtcaccttcttccctaccacacatgggtgggaaggtggacaggctaacctctccagctgtgagcctcttagactactgcatgtagcaaatgttcagcagctcaggcccccatgtccagttctgtccccactgtcctcaaccctgtcctgaaaattctactgctttgatggctggggccagtctcttgtcactttggaaactgaggacgcgtggattctactcaagcctccaagtagtggcatatcagtcttggagctcctagctggtgatacggagagggctttggaggacttgggacagcagggccaatttttttgcccaagtgcctaggctgctaactcactgactagaacttaatctggtactttacagttttgcaccaactctgccaagccactggatcttacattaaacatcatactc

SEQ ID NO: 283538 - DNA, 2936 bp, Homo sapiens
  misc_feature (2696)..(2696): n is a, c, g, or t
  misc_feature (2698)..(2698): n is a, c, g, or t
  misc_feature (2700)..(2700): n is a, c, g, or t
  misc_feature (2703)..(2703): n is a, c, g, or t
  misc_feature (2706)..(2706): n is a, c, g, or t
catcccggggatcacgttttgcctgggggagctgatcgcaagactaggcaacctccagccagtccctgggtcgggcggatcctcccagaggtggcacaatggagcgatctccaggagagggccccagccccagccccatggaccagccctctgctccctccgaccccactgaccagccccccgctgctcacgcaaagccagacccaggttctgggggccaacctgctggccctggcgcggcgggtgaggccctggcggtgctgacttcattcgggaggcggttgctggtgctgatacctgtgtatttggccggggcagtgggactcagcgtgggtttcgtgctcttcggcctcgccctctacctgggctggcgccgggtccgcgacgagaaagaacggagccttcgagcagcgaggcagctactggacgacgaggagcagctcactgcgaaaactctctatatgagtcatcgagagctacctgcctgggtcagcttcccagacgtggaaaaggctgaatggctcaataagattgtggcccaggtctggcccttcctgggccagtatatggagaagcttctggctgaaactgtggctccggctgttaggggatctaacccccatctgcaaacatttacatttacacgagtggaactgggtgaaaagccattgcgcatcattggagtcaaggttcacccaggtcagagaaaagagcagatcctgctggacttgaacatcagctatgtaggtgatgtgcagattgatgtggaagtgaagaaatatttttgcaaagcaggagtcaagggcatgcagctacatggcgttttgcgggtgatactggagccactcattggggaccttcccttcgtgggggctgtgtcaatgttcttcatccgacgcccgaccctagacatcaactggacagggatgaccaacctgctggatatcccaggacttagctcactctctgacaccatgatcatggactccattgctgccttcctcgtgttgcccaaccgattactggtgccccttgtgcctgaccttcaagatgtggctcagttgcgttcccctctgcccaggggcattattcgaattcacctgctggctgctcgagggctgagttccaaggacaaatatgtgaagggcctgattgagggcaagtcagacccatatgcacttgtgcgtttgggtacccagacattctgcagtcgtgtcattgatgaagaactcaacccacagtggggagagacttatgaggtgatggtacacgaggtcccagggcaggagattgaagtggaggtgttcgacaaggatccagataaagatgactttctgggcagaatgaagctggatgtagggaaggtgttacaggctagcgttctggatgattggttccctctacaaggtgggcaaggccaagttcacttgaggctagaatggctgtcacttttgtcagatgcagagaaactggagcaggttctacagtggaattggggagtctcctctcgaccagatcccccgtcagctgccatcttagttgtctacctggatcgggcccaggatcttcctctgaagaaggggaacaaggaacccaaccctatggtacaactgtcaattcaggatgtgactcaggagagcaaggctgtctacagtaccaactgcccagtgtgggaggaagcgttccggttcttcctacaagaccctcaaagccaggagctcgatgtgcaagtgaaggatgattccagggccctgactttaggagcactgacgctgcctctggcccgcctgctgactgccccagaactcatcctggaccagtggttccagctcagcagctctggtccaaactccagactctatatgaaactagtcatgaggatcctgtacttggattcatcagaaatatgcttccccacggtgcctggttgtcctggtgcttgggacgtggacagtgagaatccccagagaggcagcagtgtggatgccccacctcgaccctgtcacacgactcctgatagccagtttgggactgagcatgtgcttcggatccatgtattagaggcccaggacctgattgccaaagaccgtttcttggggggactggtgaagggcaagtcagacccctatgtcaaactaaagttggcaggacgaagcttccggagccatgttgttcgggaagatctcaatccccgctggaatgaggtttttgaggtgatcgtcacatcagttccaggccaagagctagaggttgaagtctttgacaaggacttggacaaggatgattttctgggcaggtgtaaagtgcgtctcaccacagtcttaaacagtggcttccttgatgagtggctgaccctggaggatgtcccatctggccgcctgcacttgcgcctggagcgtctcaccccccgtcccactgctgctgagttagaggaggtgctgcaggtgaatagtttgatccagactcagaagagtgcggagctggctgcggccctgctatccatctatatggagcgggcagaggacctcccgctgcgaaaaggcaccaagcacctcagcccttatgctactctcactgtgggagatagttctcataaaaccaagactatttcgcaaacttcagcccctgtctgggatgagagtgcctcctttctcatcaggaaaccacacactgagagcctagagttgcagtaaagngnangancgngagaaggcacggcggtgcaggggacaattaacccgcctataaagccctagtaggagcagtcgtgagcccgggtaaacacccagggcagggaggggcacgaacgccaaagagcggggccccccgagagacaacacagacaaggcctccgagaacagatagggcccaacaccagcaggggaagagccagcagcggcgaaaggcacaaggaagtgaggcgaccgggacaacga

SEQ ID NO: 283539 - DNA, 2219 bp, Homo sapiens
  misc_feature (2135)..(2135): n is a, c, g, or t
catcccggggatcacgttttgcctgggggagctgatcgcaagactaggcaacctccagccagtccctgggtcgggcggatcctcccagaggtggcacaatggagcgatctccaggagagggccccagccccagccccatggaccagccctctgctccctccgaccccactgaccagccccccgctgctcacgcaaagccagacccaggttctgggggccaacctgctggccctggcgcggcgggtgaggccctggcggtgctgacttcattcgggaggcggttgctggtgctgatacctgtgtatttggccggggcagtgggactcagcgtgggtttcgtgctcttcggcctcgccctctacctgggctggcgccgggtccgcgacgagaaagaacggagccttcgagcagcgaggcagctactggacgacgaggagcagctcactgcgaaaactctctatatgagtcatcgagagctacctgcctgggtcagcttcccagacgtggaaaaggctgaatggctcaataagattgtggcccaggtctggcccttcctgggccagtatatggagaagcttctggctgaaactgtggctccggctgttaggggatctaacccccatctgcaaacatttacatttacacgagtggaactgggtgaaaagccattgcgcatcattggagtcaaggttcacccaggtcagagaaaagagcagatcctgctggacttgaacatcagctatgtaggtgatgtgcagattgatgtggaagtgaagaaatatttttgcaaagcaggagtcaagggcatgcagctacatggcgttttgcgggtgatactggagccactcattggggaccttcccttcgtgggggctgtgtcaatgttcttcatccgacgcccgaccctagacatcaactggacagggatgaccaacctgctggatatcccaggacttagctcactctctgacaccatgatcatggactccattgctgccttcctcgtgttgcccaaccgattactggtgccccttgtgcctgaccttcaagatgtggctcagttgcgttcccctctgcccaggggcattattcgaattcacctgctggctgctcgagggctgagttccaaggacaaatatgtgaagggcctgattgagggcaagtcagacccatatgcacttgtgcgtttgggtacccagacattctgcagtcgtgtcattgatgaagaactcaacccacagtggggagagacttatgaggtgatggtacacgaggtcccagggcaggagattgaagtggaggtgttcgacaaggatccagataaagatgactttctgggcagaatgaagctggatgtagggaaggtgttacaggctagcgttctggatgattggttccctctacaaggtgggcaaggccaagttcacttgaggctagaatggctgtcacttttgtcagatgcagagaaactggagcaggttctacagtggaattggggagtctcctctcgaccagatcccccgtcagctgccatcttagttgtctacctggatcgggcccaggatcttcctctgaagaaggggaacaaggaacccaaccctatggtacaactgtcaattcaggatgtgactcaggagagcaaggctgtctacagtaccaactgcccagtgtgggaggaagcgttccggttcttcctacaagaccctcaaagccaggagctcgatgtgcaagtgaaggatgattccagggccctgactttaggagcactgacgctgcctctggcccgcctgctgactgccccagaactcatcctggaccagtggttccagctcagcagctctggtccaaactccagactctatatgaaactagtcatgaggatcctgtacttggattcatcagaaatatgcttccccacggtgcctggttgtcctggtgcttgggacgtggacagtgagaatccccagagaggcagcagtgtggatgccccacctcgaccctggtaccgtctcctcagaggagcggtaccagggatccagtgaaccactatcacgaaaaaaactctacctctctatactaatctccctacaaatctccttaattataacattcacagccacagaactaatcatatnttatatcttcttcgaaaccacacttatccccaccttggctatcatcacccgatgaggcaaccagccagaacgcctgaacgcagg

SEQ ID NO: 283540 - DNA, 1377 bp, Homo sapiens
catcccggggatcacgttttgcctgggggagctgatcgcaagactaggcaacctccagccagtccctgggtcgggcggatcctcccagaggtggcacaatggagcgatctccaggagagggccccagccccagccccatggaccagccctctgctccctccgaccccactgaccagccccccgctgctcacgcaaagccagacccaggttctgggggccaacctgctggccctggcgcggcgggtgaggccctggcggtgctgacttcattcgggaggcggttgctggtgctgatacctgtgtatttggccggggcagtgggactcagcgtgggtttcgtgctcttcggcctcgccctctacctgggctggcgccgggtccgcgacgagaaagaacggagccttcgagcagcgaggcagctactggacgacgaggagcagctcactgcgaaaactctctatatgagtcatcgagagctacctgcctgggtcagcttcccagacgtggaaaaggctgaatggctcaataagattgtggcccaggtctggcccttcctgggccagtatatggagaagcttctggctgaaactgtggctccggctgttaggggatctaacccccatctgcaaacatttacatttacacgagtggaactgggtgaaaagccattgcgcatcattggagtcaaggttcacccaggtcagagaaaagagcagatcctgctggacttgaacatcagctatgtaggtgatgtgcagattgatgtggaagtgaagaaatatttttgcaaagcaggagtcaagggcatgcagctacatggcgttttgcgggtgatactggagccactcattggggaccttcccttcgtgggggctgtgtcaatgttcttcatccgacgcccgaccctagacatcaactggacagggatgaccaacctgctggatatcccaggacttagctcactctctgacaccatgatcatggactccattgctgccttcctcgtgttgcccaaccgattactggtgccccttgtgcctgaccttcaagatgtggctcagttgcgttcccctctgcccaggggcattattcgaattcacctgctggctgctcgagggctgagttccaaggacaaatatgtgaagggcctgattgagggcaagtcagacccatatgcacttgtgcgtttgggtacccagacattctgcagtcgtgtcattgatgaagaactcaacccacagtggggagagacttatgagccaatttttttgcccaagtgcctaggctgctaactcactgactagaacttaatctggtactttacagttttgcaccaactctgccaagccactggatcttacattaaacatcatactc

SEQ ID NO: 283541 - DNA, 248 bp, Homo sapiens
aggtgagggctggaagctgctggcaccaaggttatagtccctgtgaggaaggaagtaccccacgtgatcctttagaggtgactcacctctgcaatggtttgggacgagtatgtgatgaaggaacatggtctttggagatttcaaaacagcatcatcagaatgagatcctgtctcaaaaaataaaagaaataacatctttcccctatcatcttccaacacaggtgcagctggacctagctgagacagac

SEQ ID NO: 283542 - DNA, 607 bp, Homo sapiens
acggtgcctggttgtcctggtgcttgggacgtggacagtgagaatccccagagaggcagcagtgtggatgccccacctcgaccctgtcacacgactcctgatagccagtttgggactgaggtgagtctatatctggaaaggactagggtctgtttgccccgctaagtatgcaaagcctgtttcagggcagattctgacaggtctctctccctttgccatctggcacccccccgtcccttttgcagcatgtgcttcggatccatgtattagaggcccaggacctgattgccaaagaccgtttcttggggggactggtgaagggcaagtcagacccctatgtcaaactaaagttggcaggacgaagcttccggagccatgttgttcgggaagatctcaatccccgctggaatgaggtttttgaggtcagaattgagtggctgtgactcctggttctgccccatttttcccccaatcccaaaagtggtccagaaacctctgaggttcagttgactggggggtccagtcatttgcagaggaaaaggagagaatctttcatctgcactattttctcccactaggtgatcgtcacatcagttccaggccaaga

SEQ ID NO: 283543 - DNA, 166 bp, Homo sapiens
ccgcctgctgactgccccagaactcatcctggaccagtggttccagctcagcagctctggtccaaactccagactctatatgaaactagtcatgagggtatggaaatagaggaggtactgaggtgtgggggaaaggcctgttgattctttggtattaagagtaagg

SEQ ID NO: 283544 - DNA, 403 bp, Homo sapiens
acaaaaggactttcttacagctttaggtctctcttgggtgtgggaaacatagttggggttaggagaaaattggaagttgaggccatacccactcctttctactcccccattcagctcactctctgacaccatgatcatggactccattgctgccttcctcgtgttgcccaaccgattactggtgccccttgtgcctgaccttcaagatgtggctcagttgcgttcccctctgcccagggtatggcctttcccccactagatagatccttctctcaggaaccccttgctgggtccttagtttctcaccatctgattccttcctccagggcattattcgaattcacctgctggctgctcgagggctgagttccaaggacaaatatgtgaagggcctgattgaggg

SEQ ID NO: 283545 - DNA, 4249 bp, Homo sapiens
catcccggggatcacgttttgcctgggggagctgatcgcaagactaggcaacctccagccagtccctgggtcgggcggatcctcccagaggtggcacaatggagcgatctccaggagagggccccagccccagccccatggaccagccctctgctccctccgaccccactgaccagccccccgctgctcacgcaaagccagacccaggttctgggggccaacctgctggccctggcgcggcgggtgaggccctggcggtgctgacttcattcgggaggcggttgctggtgctgatacctgtgtatttggccggggcagtgggactcagcgtgggtttcgtgctcttcggcctcgccctctacctgggctggcgccgggtccgcgacgagaaagaacggagccttcgagcagcgaggcagctactggacgacgaggagcagctcactgcgaaaactctctatatgagtcatcgagagctacctgcctgggtcagcttcccagacgtggaaaaggctgaatggctcaataagattgtggcccaggtctggcccttcctgggccagtatatggagaagcttctggctgaaactgtggctccggctgttaggggatctaacccccatctgcaaacatttacatttacacgagtggaactgggtgaaaagccattgcgcatcattggagtcaaggttcacccaggtcagagaaaagagcagatcctgctggacttgaacatcagctatgtaggtgatgtgcagattgatgtggaagtgaagaaatatttttgcaaagcaggagtcaagggcatgcagctacatggcgttttgcgggtgatactggagccactcattggggaccttcccttcgtgggggctgtgtcaatgttcttcatccgacgcccgaccctagacatcaactggacagggatgaccaacctgctggatatcccaggacttagctcactctctgacaccatgatcatggactccattgctgccttcctcgtgttgcccaaccgattactggtgccccttgtgcctgaccttcaagatgtggctcagttgcgttcccctctgcccaggggcattattcgaattcacctgctggctgctcgagggctgagttccaaggacaaatatgtgaagggcctgattgagggcaagtcagacccatatgcacttgtgcgtttgggtacccagacattctgcagtcgtgtcattgatgaagaactcaacccacagtggggagagacttatgaggtgatggtacacgaggtcccagggcaggagattgaagtggaggtgttcgacaaggatccagataaagatgactttctgggcagaatgaagctggatgtagggaaggtgttacaggctagcgttctggatgattggttccctctacaaggtgggcaaggccaagttcacttgaggctagaatggctgtcacttttgtcagatgcagagaaactggagcaggttctacagtggaattggggagtctcctctcgaccagatcccccgtcagctgccatcttagttgtctacctggatcgggcccaggatcttcctatggtgacctctgaattgtacccaccacagctgaagaaggggaacaaggaacccaaccctatggtacaactgtcaattcaggatgtgactcaggagagcaaggctgtctacagtaccaactgcccagtgtgggaggaagcgttccggttcttcctacaagaccctcaaagccaggagctcgatgtgcaagtgaaggatgattccagggccctgactttaggagcactgacgctgcctctggcccgcctgctgactgccccagaactcatcctggaccagtggttccagctcagcagctctggtccaaactccagactctatatgaaactagtcatgaggatcctgtacttggattcatcagaaatatgcttccccacggtgcctggttgtcctggtgcttgggacgtggacagtgagaatccccagagaggcagcagtgtggatgccccacctcgaccctgtcacacgactcctgatagccagtttgggactgagcatgtgcttcggatccatgtattagaggcccaggacctgattgccaaagaccgtttcttggggggactggtgaagggcaagtcagacccctatgtcaaactaaagttggcaggacgaagcttccggagccatgttgttcgggaagatctcaatccccgctggaatgaggtttttgaggtgatcgtcacatcagttccaggccaagagctagaggttgaagtctttgacaaggacttggacaaggatgattttctgggcaggtgtaaagtgcgtctcaccacagtcttaaacagtggcttccttgatgagtggctgaccctggaggatgtcccatctggccgcctgcacttgcgcctggagcgtctcaccccccgtcccactgctgctgagttagaggaggtgctgcaggtgaatagtttgatccagactcagaagagtgcggagctggctgcggccctgctatccatctatatggagcgggcagaggacctcccgctgcgaaaaggcaccaagcacctcagcccttatgctactctcactgtgggagatagttctcataaaaccaagactatttcgcaaacttcagcccctgtctgggatgagagtgcctcctttctcatcaggaaaccacacactgagagcctagagttgcaggttcggggtgagggcactggcgtgctgggctcattatccctgcccctctcagagctcctcgtggctgaccagctctgcttggaccgctggtttacactcagcagtggtcaggggcaggtgctactgagagcacagctagggatcctggtgtcccagcactcgggagtggaagctcatagccacagctacagccacagctcctcatcgctgagtgaagaaccagagctctcggggggaccccctcacatcacctcctcagccccagagctccggcagcgcctaacacatgttgacagtccccttgaggctccagccgggcctctgggccaggtgaaactgactctgtggtactacagtgaagaacgaaagctggtcagcattgttcatggttgccggtcccttcgacagaatggacgtgatcctcctgatccctatgtgtcactgttgctactgccagacaagaaccgaggcaccaagaggaggacctcacagaagaagaggaccctgagtcctgaatttaatgaacggtttgagtgggaactccccctggatgaggcccagagacgaaagctggatgtctctgtcaagtctaattcctccttcatgtcaagagagcgtgagctgctggggaaggtgcagctggacctagctgagacagacctttcccagggtgtagcccggtggtatgacctgatggacaacaaggacaagggcagctcctaggagctggcgagtcccagcctgactgctctgtcttcctgccttcgtctcgctccatcaccgcctcaatgtgatgagcctaaagctagggtccaagggcagagcctgtgcccttcagccctttcacctaacaggcccatattcgggcctttgcctgaccaaagagaagaaccgtatgttccctttactgcacggcctttatccttctgggcccctggggcggggacctgagctggctgtttcctgctttgcctgcacattgttctcccttcctcccaactcctcagggccttctgtatctgtgcctggccagtggcagcactagcagtggtattagcttatgccaaatacagctttggaaggatctttttttctttaactagatggtcaccttcttccctaccacacatgggtgggaaggtggacaggctaacctctccagctgtgagcctcttagactactgcatgtagcaaatgttcagcagctcaggcccccatgtccagttctgtccccactgtcctcaaccctgtcctgaaaattctactgctttgatggctggggccagtctcttgtcactttggaaactgaggacgcgtggattctactcaagcctccaagtagtggcatatcagtcttggagctcctagctggtgatacggagagggctttggaggacttgggacagcagggccaatttttttgcccaagtgcctaggctgctaactcactgactagaacttaatctggtactttacagttttgcaccaactctgccaagccactggatcttacattaaacatcatactc

SEQ ID NO: 283546 - DNA, 3300 bp, Homo sapiens
ggctggtactggtctggagtgtttgggatcaggacttagctcactctctgacaccatgatcatggactccattgctgccttcctcgtgttgcccaaccgattactggtgccccttgtgcctgaccttcaagatgtggctcagttgcgttcccctctgcccaggggcattattcgaattcacctgctggctgctcgagggctgagttccaaggacaaatatgtgaagggcctgattgagggcaagtcagacccatatgcacttgtgcgtttgggtacccagacattctgcagtcgtgtcattgatgaagaactcaacccacagtggggagagacttatgaggtgatggtacacgaggtcccagggcaggagattgaagtggaggtgttcgacaaggatccagataaagatgactttctgggcagaatgaagctggatgtagggaaggtgttacaggctagcgttctggatgattggttccctctacaaggtgggcaaggccaagttcacttgaggctagaatggctgtcacttttgtcagatgcagagaaactggagcaggttctacagtggaattggggagtctcctctcgaccagatcccccgtcagctgccatcttagttgtctacctggatcgggcccaggatcttcctctgaagaaggggaacaaggaacccaaccctatggtacaactgtcaattcaggatgtgactcaggagagcaaggctgtctacagtaccaactgcccagtgtgggaggaagcgttccggttcttcctacaagaccctcaaagccaggagctcgatgtgcaagtgaaggatgattccagggccctgactttaggagcactgacgctgcctctggcccgcctgctgactgccccagaactcatcctggaccagtggttccagctcagcagctctggtccaaactccagactctatatgaaactagtcatgaggatcctgtacttggattcatcagaaatatgcttccccacggtgcctggttgtcctggtgcttgggacgtggacagtgagaatccccagagaggcagcagtgtggatgccccacctcgaccctgtcacacgactcctgatagccagtttgggactgagcatgtgcttcggatccatgtattagaggcccaggacctgattgccaaagaccgtttcttggggggactggtgaagggcaagtcagacccctatgtcaaactaaagttggcaggacgaagcttccggagccatgttgttcgggaagatctcaatccccgctggaatgaggtttttgaggtgatcgtcacatcagttccaggccaagagctagaggttgaagtctttgacaaggacttggacaaggatgattttctgggcaggtgtaaagtgcgtctcaccacagtcttaaacagtggcttccttgatgagtggctgaccctggaggatgtcccatctggccgcctgcacttgcgcctggagcgtctcaccccccgtcccactgctgctgagttagaggaggtgctgcaggtgaatagtttgatccagactcagaagagtgcggagctggctgcggccctgctatccatctatatggagcgggcagaggacctcccgctgcgaaaaggcaccaagcacctcagcccttatgctactctcactgtgggagatagttctcataaaaccaagactatttcgcaaacttcagcccctgtctgggatgagagtgcctcctttctcatcaggaaaccacacactgagagcctagagttgcaggttcggggtgagggcactggcgtgctgggctcattatccctgcccctctcagagctcctcgtggctgaccagctctgcttggaccgctggtttacactcagcagtggtcaggggcaggtgctactgagagcacagctagggatcctggtgtcccagcactcgggagtggaagctcatagccacagctacagccacagctcctcatcgctgagtgaagaaccagagctctcggggggaccccctcacatcacctcctcagccccagagctccggcagcgcctaacacatgttgacagtccccttgaggctccagccgggcctctgggccaggtgaaactgactctgtggtactacagtgaagaacgaaagctggtcagcattgttcatggttgccggtcccttcgacagaatggacgtgatcctcctgatccctatgtgtcactgttgctactgccagacaagaaccgaggcaccaagaggaggacctcacagaagaagaggaccctgagtcctgaatttaatgaacggtttgagtgggaactccccctggatgaggcccagagacgaaagctggatgtctctgtcaagtctaattcctccttcatgtcaagagagcgtgagctgctggggaaggtgcagctggacctagctgagacagacctttcccagggtgtagcccggtggtatgacctgatggacaacaaggacaagggcagctcctaggagctggcgagtcccagcctgactgctctgtcttcctgccttcgtctcgctccatcaccgcctcaatgtgatgagcctaaagctagggtccaagggcagagcctgtgcccttcagccctttcacctaacaggcccatattcgggcctttgcctgaccaaagagaagaaccgtatgttccctttactgcacggcctttatccttctgggcccctggggcggggacctgagctggctgtttcctgctttgcctgcacattgttctcccttcctcccaactcctcagggccttctgtatctgtgcctggccagtggcagcactagcagtggtattagcttatgccaaatacagctttggaaggatctttttttctttaactagatggtcaccttcttccctaccacacatgggtgggaaggtggacaggctaacctctccagctgtgagcctcttagactactgcatgtagcaaatgttcagcagctcaggcccccatgtccagttctgtccccactgtcctcaaccctgtcctgaaaattctactgctttgatggctggggccagtctcttgtcactttggaaactgaggacgcgtggattctactcaagcctccaagtagtggcatatcagtcttggagctcctagctggtgatacggagagggctttggaggacttgggacagcagggccaatttttttgcccaagtgcctaggctgctaactcactgactagaacttaatctggtactttacagttttgcaccaactctgccaagccactggatcttacattaaacatcatactc

SEQ ID NO: 283547 - DNA, 3343 bp, Homo sapiens
ccgatcaggttagacactaagatgcatctgacggggattctgttcgagagagactccccaattccactgtagaacctgctccagtctctctgcatctgacaaaagtgacatccattgctgccttcctcgtgttgcccaaccgattactggtgccccttgtgcctgaccttcaagatgtggctcagttgcgttcccctctgcccaggggcattattcgaattcacctgctggctgctcgagggctgagttccaaggacaaatatgtgaagggcctgattgagggcaagtcagacccatatgcacttgtgcgtttgggtacccagacattctgcagtcgtgtcattgatgaagaactcaacccacagtggggagagacttatgaggtgatggtacacgaggtcccagggcaggagattgaagtggaggtgttcgacaaggatccagataaagatgactttctgggcagaatgaagctggatgtagggaaggtgttacaggctagcgttctggatgattggttccctctacaaggtgggcaaggccaagttcacttgaggctagaatggctgtcacttttgtcagatgcagagaaactggagcaggttctacagtggaattggggagtctcctctcgaccagatcccccgtcagctgccatcttagttgtctacctggatcgggcccaggatcttcctctgaagaaggggaacaaggaacccaaccctatggtacaactgtcaattcaggatgtgactcaggagagcaaggctgtctacagtaccaactgcccagtgtgggaggaagcgttccggttcttcctacaagaccctcaaagccaggagctcgatgtgcaagtgaaggatgattccagggccctgactttaggagcactgacgctgcctctggcccgcctgctgactgccccagaactcatcctggaccagtggttccagctcagcagctctggtccaaactccagactctatatgaaactagtcatgaggatcctgtacttggattcatcagaaatatgcttccccacggtgcctggttgtcctggtgcttgggacgtggacagtgagaatccccagagaggcagcagtgtggatgccccacctcgaccctgtcacacgactcctgatagccagtttgggactgagcatgtgcttcggatccatgtattagaggcccaggacctgattgccaaagaccgtttcttggggggactggtgaagggcaagtcagacccctatgtcaaactaaagttggcaggacgaagcttccggagccatgttgttcgggaagatctcaatccccgctggaatgaggtttttgaggtgatcgtcacatcagttccaggccaagagctagaggttgaagtctttgacaaggacttggacaaggatgattttctgggcaggtgtaaagtgcgtctcaccacagtcttaaacagtggcttccttgatgagtggctgaccctggaggatgtcccatctggccgcctgcacttgcgcctggagcgtctcaccccccgtcccactgctgctgagttagaggaggtgctgcaggtgaatagtttgatccagactcagaagagtgcggagctggctgcggccctgctatccatctatatggagcgggcagaggacctcccgctgcgaaaaggcaccaagcacctcagcccttatgctactctcactgtgggagatagttctcataaaaccaagactatttcgcaaacttcagcccctgtctgggatgagagtgcctcctttctcatcaggaaaccacacactgagagcctagagttgcaggttcggggtgagggcactggcgtgctgggctcattatccctgcccctctcagagctcctcgtggctgaccagctctgcttggaccgctggtttacactcagcagtggtcaggggcaggtgctactgagagcacagctagggatcctggtgtcccagcactcgggagtggaagctcatagccacagctacagccacagctcctcatcgctgagtgaagaaccagagctctcggggggaccccctcacatcacctcctcagccccagagctccggcagcgcctaacacatgttgacagtccccttgaggctccagccgggcctctgggccaggtgaaactgactctgtggtactacagtgaagaacgaaagctggtcagcattgttcatggttgccggtcccttcgacagaatggacgtgatcctcctgatccctatgtgtcactgttgctactgccagacaagaaccgaggcaccaagaggaggacctcacagaagaagaggaccctgagtcctgaatttaatgaacggtttgagtgggaactccccctggatgaggcccagagacgaaagctggatgtctctgtcaagtctaattcctccttcatgtcaagagagcgtgagctgctggggaaggtgcagctggacctagctgagacagacctttcccagggtgtagcccggtggtatgacctgatggacaacaaggacaagggcagctcctaggagctggcgagtcccagcctgactgctctgtcttcctgccttcgtctcgctccatcaccgcctcaatgtgatgagcctaaagctagggtccaagggcagagcctgtgcccttcagccctttcacctaacaggcccatattcgggcctttgcctgaccaaagagaagaaccgtatgttccctttactgcacggcctttatccttctgggcccctggggcggggacctgagctggctgtttcctgctttgcctgcacattgttctcccttcctcccaactcctcagggccttctgtatctgtgcctggccagtggcagcactagcagtggtattagcttatgccaaatacagctttggaaggatctttttttctttaactagatggtcaccttcttccctaccacacatgggtgggaaggtggacaggctaacctctccagctgtgagcctcttagactactgcatgtagcaaatgttcagcagctcaggcccccatgtccagttctgtccccactgtcctcaaccctgtcctgaaaattctactgctttgatggctggggccagtctcttgtcactttggaaactgaggacgcgtggattctactcaagcctccaagtagtggcatatcagtcttggagctcctagctggtgatacggagagggctttggaggacttgggacagcagggccaatttttttgcccaagtgcctaggctgctaactcactgactagaacttaatctggtactttacagttttgcaccaactctgccaagccactggatcttacattaaacatcatactc

SEQ ID NO: 283548 - DNA, 4302 bp, Homo sapiens
catcccggggatcacgttttgcctgggggagctgatcgcaagactaggcaacctccagccagtccctgggtcgggcggatcctcccagaggtggcacaatggagcgatctccaggagagggccccagccccagccccatggaccagccctctgctccctccgaccccactgaccagccccccgctgctcacgcaaagccagacccaggttctgggggccaacctgctggccctggcgcggcgggtgaggccctggcggtgctgacttcattcgggaggcggttgctggtgctgatacctgtgtatttggccggggcagtgggactcagcgtgggtttcgtgctcttcggcctcgccctctacctgggctggcgccgggtccgcgacgagaaagaacggagccttcgagcagcgaggcagctactggacgacgaggagcagctcactgcgaaaactctctatatgagtcatcgagagctacctgcctgggtcagcttcccagacgtggaaaaggctgaatggctcaataagattgtggcccaggtctggcccttcctgggccagtatatggagaagcttctggctgaaactgtggctccggctgttaggggatctaacccccatctgcaaacatttacatttacacgagtggaactgggtgaaaagccattgcgcatcattggagtcaaggttcacccaggtcagagaaaagagcagatcctgctggacttgaacatcagctatgtaggtgatgtgcagattgatgtggaagtgaagaaatatttttgcaaagcaggagtcaagggcatgcagctacatggcgttttgcgggtgatactggagccactcattggggaccttcccttcgtgggggctgtgtcaatgttcttcatccgacgcccgaccctagacatcaactggacagggatgaccaacctgctggatatcccaggacttagctcactctctgacaccatgatcatggactccattgctgccttcctcgtgttgcccaaccgattactggtgccccttgtgcctgaccttcaagatgtggctcagttgcgttcccctctgcccaggggcattattcgaattcacctgctggctgctcgagggctgagttccaaggacaaatatgtgaagggcctgattgagggcaagtcagacccatatgcacttgtgcgtttgggtacccagacattctgcagtcgtgtcattgatgaagaactcaacccacagtggggagagacttatgaggtgatggtacacgaggtcccagggcaggagattgaagtggaggtgttcgacaaggatccagataaagatgactttctgggcagaatgaagctggatgtagggaaggtgttacaggctagcgttctggatgattggttccctctacaaggtgggcaaggccaagttcacttgaggctagaatggctgtcacttttgtcagatgcagagaaactggagcaggttctacagtggaattggggagtctcctctcgaccagatcccccgtcagctgccatcttagttgtctacctggatcgggcccaggatcttcctctgaagaaggggaacaaggaacccaaccctatggtacaactgtcaattcaggatgtgactcaggagagcaaggctgtctacagtaccaactgcccagtgtgggaggaagcgttccggttcttcctacaagaccctcaaagccaggagctcgatgtgcaagtgaaggatgattccagggccctgactttaggagcactgacgctgcctctggcccgcctgctgactgccccagaactcatcctggaccagtggttccagctcagcagctctggtccaaactccagactctatatgaaactagtcatgaggatcctgtacttggattcatcagaaatatgcttccccacggtgcctggttgtcctggtgcttgggacgtggacagtgagaatccccagagaggcagcagtgtggatgccccacctcgaccctgtcacacgactcctgatagccagtttgggactgagcatgtgcttcggatccatgtattagaggcccaggacctgattgccaaagaccgtttcttggggggactggtgaagggcaagtcagacccctatgtcaaactaaagttggcaggacgaagcttccggagccatgttgttcgggaagatctcaatccccgctggaatgaggtttttgaggtgatcgtcacatcagttccaggccaagagctagaggttgaagtctttgacaaggacttggacaaggatgattttctgggcaggtgtaaagtgcgtctcaccacagtcttaaacagtggcttccttgatgagtggctgaccctggaggatgtcccatctggccgcctgcacttgcgcctggagcgtctcaccccccgtcccactgctgctgagttagaggaggtgctgcaggtgaatagtttgatccagactcagaagagtgcggagctggctgcggccctgctatccatctatatggagcgggcagaggacctcccgctgcgaaaaggcaccaagcacctcagcccttatgctactctcactgtgggagatagttctcataaaaccaagactatttcgcaaacttcagcccctgtctgggatgagagtgcctcctttctcatcaggaaaccacacactgagagcctagagttgcaggttcggggtgagggcactggcgtgctgggctcattatccctgcccctctcagagctcctcgtggctgaccagctctgcttggaccgctggtttacactcagcagtggtcaggggcaggtgctactgagagcacagctagggatcctggtgtcccagcactcgggagtggaagctcatagccacagctacagccacagctcctcatcgctgagtgaagaaccagagctctcggggggaccccctcacatcacctcctcagccccagagctccggcagcgcctaacacatgttgacagtccccttgaggctccagccgggcctctgggccaggtgaaactgactctgtggtactacagtgaagaacgaaagctggtcagcattgttcatggttgccggtgagaccccatccctcctgtcctccagatcgcctccatcccttccctcaggttaccatatcacctacatcctcctgttgtaggtcccttcgacagaatggacgtgatcctcctgatccctatgtgtcactgttgctactgccagacaagaaccgaggcaccaagaggaggacctcacagaagaagaggaccctgagtcctgaatttaatgaacggtttgagtgggaactccccctggatgaggcccagagacgaaagctggatgtctctgtcaagtctaattcctccttcatgtcaagagagcgtgagctgctggggaaggtgcagctggacctagctgagacagacctttcccagggtgtagcccggtggtatgacctgatggacaacaaggacaagggcagctcctaggagctggcgagtcccagcctgactgctctgtcttcctgccttcgtctcgctccatcaccgcctcaatgtgatgagcctaaagctagggtccaagggcagagcctgtgcccttcagccctttcacctaacaggcccatattcgggcctttgcctgaccaaagagaagaaccgtatgttccctttactgcacggcctttatccttctgggcccctggggcggggacctgagctggctgtttcctgctttgcctgcacattgttctcccttcctcccaactcctcagggccttctgtatctgtgcctggccagtggcagcactagcagtggtattagcttatgccaaatacagctttggaaggatctttttttctttaactagatggtcaccttcttccctaccacacatgggtgggaaggtggacaggctaacctctccagctgtgagcctcttagactactgcatgtagcaaatgttcagcagctcaggcccccatgtccagttctgtccccactgtcctcaaccctgtcctgaaaattctactgctttgatggctggggccagtctcttgtcactttggaaactgaggacgcgtggattctactcaagcctccaagtagtggcatatcagtcttggagctcctagctggtgatacggagagggctttggaggacttgggacagcagggccaatttttttgcccaagtgcctaggctgctaactcactgactagaacttaatctggtactttacagttttgcaccaactctgccaagccactggatcttacattaaacatcatactc

SEQ ID NO: 283549 - DNA, 4189 bp, Homo sapiens
catcccggggatcacgttttgcctgggggagctgatcgcaagactaggcaacctccagccagtccctgggtcgggcggatcctcccagaggtggcacaatggagcgatctccaggagagggccccagccccagccccatggaccagccctctgctccctccgaccccactgaccagccccccgctgctcacgcaaagccagacccaggttctgggggccaacctgctggccctggcgcggcgggtgaggccctggcggtgctgacttcattcgggaggcggttgctggtgctgatacctgtgtatttggccggggcagtgggactcagcgtgggtttcgtgctcttcggcctcgccctctacctgggctggcgccgggtccgcgacgagaaagaacggagccttcgagcagcgaggcagctactggacgacgaggagcagctcactgcgaaaactctctatatgagtcatcgagagctacctgcctgggtcagcttcccagacgtggaaaaggctgaatggctcaataagattgtggcccaggtctggcccttcctgggccagtatatggagaagcttctggctgaaactgtggctccggctgttaggggatctaacccccatctgcaaacatttacatttacacgagtggaactgggtgaaaagccattgcgcatcattggagtcaaggttcacccaggtcagagaaaagagcagatcctgctggacttgaacatcagctatgtaggtgatgtgcagattgatgtggaagtgaagaaatatttttgcaaagcaggagtcaagggcatgcagctacatggcgttttgcgggtgatactggagccactcattggggaccttcccttcgtgggggctgtgtcaatgttcttcatccgacgcccgaccctagacatcaactggacagggatgaccaacctgctggatatcccaggacttagctcactctctgacaccatgatcatggactccattgctgccttcctcgtgttgcccaaccgattactggtgccccttgtgcctgaccttcaagatgtggctcagttgcgttcccctctgcccaggggcattattcgaattcacctgctggctgctcgagggctgagttccaaggacaaatatgtgaagggcctgattgagggcaagtcagacccatatgcacttgtgcgtttgggtacccagacattctgcagtcgtgtcattgatgaagaactcaacccacagtggggagagacttatgaggtgatggtacacgaggtcccagggcaggagattgaagtggaggtgttcgacaaggatccagataaagatgactttctgggcagaatgaagctggatgtagggaaggtgttacaggctagcgttctggatgattggttccctctacaaggtgggcaaggccaagttcacttgaggctagaatggctgtcacttttgtcagatgcagagaaactggagcaggttctacagtggaattggggagtctcctctcgaccagatcccccgtcagctgccatcttagttgtctacctggatcgggcccaggatcttcctctgaagaaggggaacaaggaacccaaccctatggtacaactgtcaattcaggatgtgactcaggagagcaaggctgtctacagtaccaactgcccagtgtgggaggaagcgttccggttcttcctacaagaccctcaaagccaggagctcgatgtgcaagtgaaggatgattccagggccctgactttaggagcactgacgctgcctctggcccgcctgctgactgccccagaactcatcctggaccagtggttccagctcagcagctctggtccaaactccagactctatatgaaactagtcatgaggatcctgtacttggattcatcagaaatatgcttccccacggtgcctggttgtcctggtgcttgggacgtggacagtgagaatccccagagaggcagcagtgtggatgccccacctcgaccctgtcacacgactcctgatagccagtttgggactgagcatgtgcttcggatccatgtattagaggcccaggacctgattgccaaagaccgtttcttggggggactggtgaagggcaagtcagacccctatgtcaaactaaagttggcaggacgaagcttccggagccatgttgttcgggaagatctcaatccccgctggaatgaggtttttgaggtgatcgtcacatcagttccaggccaagagctagaggttgaagtctttgacaaggacttggacaaggatgattttctgggcaggtgagagcataggagtctacgtgaaaaacaggctggggctctttaggccatggagtctggcctccttggttctcaccatctagcttttgtcttaatctttctcttcaacaggtgtaaagtgcgtctcaccacagtcttaaacagtggcttccttgatgagtggctgaccctggaggatgtcccatctggccgcctgcacttgcgcctggagcgtctcaccccccgtcccactgctgctgagttagaggaggtgctgcaggtgaatagtttgatccagactcagaagagtgcggagctggctgcggccctgctatccatctatatggagcgggcagaggacctcccgctgcgaaaaggcaccaagcacctcagcccttatgctactctcactgtgggagatagttctcataaaaccaagactatttcgcaaacttcagcccctgtctgggatgagagtgcctcctttctcatcaggaaaccacacactgagagcctagagttgcagatcctggtgtcccagcactcgggagtggaagctcatagccacagctacagccacagctcctcatcgctgagtgaagaaccagagctctcggggggaccccctcacatcacctcctcagccccagagctccggcagcgcctaacacatgttgacagtccccttgaggctccagccgggcctctgggccaggtgaaactgactctgtggtactacagtgaagaacgaaagctggtcagcattgttcatggttgccggtcccttcgacagaatggacgtgatcctcctgatccctatgtgtcactgttgctactgccagacaagaaccgaggcaccaagaggaggacctcacagaagaagaggaccctgagtcctgaatttaatgaacggtttgagtgggaactccccctggatgaggcccagagacgaaagctggatgtctctgtcaagtctaattcctccttcatgtcaagagagcgtgagctgctggggaaggtgcagctggacctagctgagacagacctttcccagggtgtagcccggtggtatgacctgatggacaacaaggacaagggcagctcctaggagctggcgagtcccagcctgactgctctgtcttcctgccttcgtctcgctccatcaccgcctcaatgtgatgagcctaaagctagggtccaagggcagagcctgtgcccttcagccctttcacctaacaggcccatattcgggcctttgcctgaccaaagagaagaaccgtatgttccctttactgcacggcctttatccttctgggcccctggggcggggacctgagctggctgtttcctgctttgcctgcacattgttctcccttcctcccaactcctcagggccttctgtatctgtgcctggccagtggcagcactagcagtggtattagcttatgccaaatacagctttggaaggatctttttttctttaactagatggtcaccttcttccctaccacacatgggtgggaaggtggacaggctaacctctccagctgtgagcctcttagactactgcatgtagcaaatgttcagcagctcaggcccccatgtccagttctgtccccactgtcctcaaccctgtcctgaaaattctactgctttgatggctggggccagtctcttgtcactttggaaactgaggacgcgtggattctactcaagcctccaagtagtggcatatcagtcttggagctcctagctggtgatacggagagggctttggaggacttgggacagcagggccaatttttttgcccaagtgcctaggctgctaactcactgactagaacttaatctggtactttacagttttgcaccaactctgccaagccactggatcttacattaaacatcatactc

SEQ ID NO: 283550 - DNA, 4467 bp, Homo sapiens
catcccggggatcacgttttgcctgggggagctgatcgcaagactaggcaacctccagccagtccctgggtcgggcggatcctcccagaggtggcacaatggagcgatctccaggagagggccccagccccagccccatggaccagccctctgctccctccgaccccactgaccagccccccgctgctcacgcaaagccagacccaggttctgggggccaacctgctggccctggcgcggcgggtgaggccctggcggtgctgacttcattcgggaggcggttgctggtgctgatacctgtgtatttggccggggcagtgggactcagcgtgggtttcgtgctcttcggcctcgccctctacctgggctggcgccgggtccgcgacgagaaagaacggagccttcgagcagcgaggcagctactggacgacgaggagcagctcactgcgaaaactctctatatgagtcatcgagagctacctgcctgggtcagcttcccagacgtggaaaaggctgaatggctcaataagattgtggcccaggtctggcccttcctgggccagtatatggagaagcttctggctgaaactgtggctccggctgttaggggatctaacccccatctgcaaacatttacatttacacgagtggaactgggtgaaaagccattgcgcatcattggagtcaaggttcacccaggtcagagaaaagagcagatcctgctggacttgaacatcagctatgtaggtgatgtgcagattgatgtggaagtgaagaaatatttttgcaaagcaggagtcaagggcatgcagctacatggcgttttgcgggtgatactggagccactcattggggaccttcccttcgtgggggctgtgtcaatgttcttcatccgacgcccgaccctagacatcaactggacagggatgaccaacctgctggatatcccaggacttagctcactctctgacaccatgatcatggactccattgctgccttcctcgtgttgcccaaccgattactggtgccccttgtgcctgaccttcaagatgtggctcagttgcgttcccctctgcccaggggcattattcgaattcacctgctggctgctcgagggctgagttccaaggacaaatatgtgaagggcctgattgagggcaagtcagacccatatgcacttgtgcgtttgggtacccagacattctgcagtcgtgtcattgatgaagaactcaacccacagtggggagagacttatgaggtgatggtacacgaggtcccagggcaggagattgaagtggaggtgttcgacaaggatccagataaagatgactttctgggcagaatgaagctggatgtagggaaggtgttacaggctagcgttctggatgattggttccctctacaaggtgggcaaggccaagttcacttgaggctagaatggctgtcacttttgtcagatgcagagaaactggagcaggttctacagtggaattggggagtctcctctcgaccagatcccccgtcagctgccatcttagttgtctacctggatcgggcccaggatcttcctctgaagaaggggaacaaggaacccaaccctatggtacaactgtcaattcaggatgtgactcaggagagcaaggctgtctacagtaccaactgcccagtgtgggaggaagcgttccggttcttcctacaagaccctcaaagccaggagctcgatgtgcaagtgaaggatgattccagggccctgactttaggagcactgacgctgcctctggcccgcctgctgactgccccagaactcatcctggaccagtggttccagctcagcagctctggtccaaactccagactctatatgaaactagtcatgaggatcctgtacttggattcatcagaaatatgcttccccacggtgcctggttgtcctggtgcttgggacgtggacagtgagaatccccagagaggcagcagtgtggatgccccacctcgaccctgtcacacgactcctgatagccagtttgggactgagcatgtgcttcggatccatgtattagaggcccaggacctgattgccaaagaccgtttcttggggggactggtgaagggcaagtcagacccctatgtcaaactaaagttggcaggacgaagcttccggagccatgttgttcgggaagatctcaatccccgctggaatgaggtttttgaggtgatcgtcacatcagttccaggccaagagctagaggttgaagtctttgacaaggacttggacaaggatgattttctgggcaggtgtaaagtgcgtctcaccacagtcttaaacagtggcttccttgatgagtggctgaccctggaggatgtcccatctggccgcctgcacttgcgcctggagcgtctcaccccccgtcccactgctgctgagttagaggaggtgctgcaggtgaatagtttgatccagactcagaagagtgcggagctggctgcggccctgctatccatctatatggagcgggcagaggacctcccgctgcgaaaaggcaccaagcacctcagcccttatgctactctcactgtgggagatagttctcataaaaccaagactatttcgcaaacttcagcccctgtctgggatgagagtgcctcctttctcatcaggaaaccacacactgagagcctagagttgcaggttcggggtgagggcactggcgtgctgggctcattatccctgcccctctcagagctcctcgtggctgaccagctctgcttggaccgctggtttacactcagcagtggtcaggggcaggtgctactgagagcacagctagggatcctggtgtcccagcactcgggagtggaagctcatagccacagctacagccacagctcctcatcgctgagtgaagaaccagagctctcggggggaccccctcacatcacctcctcagccccagagctccggcagcgcctaacacatgttgacagtccccttgaggctccagccgggcctctgggccaggtgaaactgactctgtggtactacagtgaagaacgaaagctggtcagcattgttcatggttgccggtcccttcgacagaatggacgtgatcctcctgatccctatgtgtcactgttgctactgccagacaagaaccgaggcaccaagaggaggacctcacagaagaagaggaccctgagtcctgaatttaatgaacggtttgagtgggaactccccctggatgaggcccagagacgaaagctggatgtctctgtcaagtctaattcctccttcatgtcaagagagcgtgagctgctggggaaggtgcagctggacctagctgagacagacctttcccagggtgtagcccggtggtatgacctgatggacaacaaggacaagggcagctcctaggagctggcgagtcccagcctgactgctctgtcttcctgccttcgtctcgctccatcaccgcctcaatgtgatgagcctaaagctagggtccaagggcagagcctgtgcccttcagccctttcacctaacaggcccatattcgggcctttgcctgaccaaagagaagaaccgtatgttccctttactgcacggcctttatccttctgggcccctggggcggggacctgagctggctgtttcctgctttgcctgcacattgttctcccttcctcccaactcctcagggccttctgtatctgtgcctggccagtggcagcactagcagtggtattagcttatgccaaatacagctttggaaggatctttttttctttaactagatggtcaccttcttccctaccacacatgggtgggaaggtggacaggctaacctctccagctgtgagcctcttagactactgcatgtagcaaatgttcagcagctcaggcccccatgtccagttctgtccccactgtcctcaaccctgtcctgaaaattctactgctttgatggctggggccagtctcttgtcactttggaaactgaggacgcgtggattctactcaagcctccaagtagtggcatatcagtcttggagctcctagctggtgatacggagagggctttggaggacttgggacagcagggccaatttttttgcccaagtgcctaggctgctaactcactgactagaacttaatctggtactttacagttttgcaccaactctgccaagccactggatcttacattaaacatcatactcaaaaaaatgacaacaaaaaaaaaaaccgcgggggaaaaagggggggcggaaaaaggtaagaaggaccaggccaagtgtctcggacccttttgggaccaggggaaagcgggccccaaggaggcgtaaaggtaggcgatttgaagagataagagagaacaagaaaattgaactatacaataagagaaacaaagaacatatataatagagagcaaacataacaaaggagagacaaacacatgatagaacga

SEQ ID NO: 283551 - DNA, 4240 bp, Homo sapiens
catcccggggatcacgttttgcctgggggagctgatcgcaagactaggcaacctccagccagtccctgggtcgggcggatcctcccagaggtggcacaatggagcgatctccaggagagggccccagccccagccccatggaccagccctctgctccctccgaccccactgaccagccccccgctgctcacgcaaagccagacccaggttctgggggccaacctgctggccctggcgcggcgggtgaggccctggcggtgctgacttcattcgggaggcggttgctggtgctgatacctgtgtatttggccggggcagtgggactcagcgtgggtttcgtgctcttcggcctcgccctctacctgggctggcgccgggtccgcgacgagaaagaacggagccttcgagcagcgaggcagctactggacgacgaggagcagctcactgcgaaaactctctatatgagtcatcgagagctacctgcctgggtcagcttcccagacgtggaaaaggctgaatggctcaataagattgtggcccaggtctggcccttcctgggccagtatatggagaagcttctggctgaaactgtggctccggctgttaggggatctaacccccatctgcaaacatttacatttacacgagtggaactgggtgaaaagccattgcgcatcattggagtcaaggttcacccaggtcagagaaaagagcagatcctgctggacttgaacatcagctatgtaggtgatgtgcagattgatgtggaagtgaagaaatatttttgcaaagcaggagtcaagggcatgcagctacatggcgttttgcgggtgatactggagccactcattggggaccttcccttcgtgggggctgtgtcaatgttcttcatccgacgcccgaccctagacatcaactggacagggatgaccaacctgctggatatcccaggacttagctcactctctgacaccatgatcatggactccattgctgccttcctcgtgttgcccaaccgattactggtgccccttgtgcctgaccttcaagatgtggctcagttgcgttcccctctgcccaggggcattattcgaattcacctgctggctgctcgagggctgagttccaaggacaaatatgtgaagggcctgattgagggcaagtcagacccatatgcacttgtgcgtttgggtacccagacattctgcagtcgtgtcattgatgaagaactcaacccacagtggggagagacttatgaggtgatggtacacgaggtcccagggcaggagattgaagtggaggtgttcgacaaggatccagataaagatgactttctgggcagaatgaagctggatgtagggaaggtgttacaggctagcgttctggatgattggttccctctacaaggtgggcaaggccaagttcacttgaggctagaatggctgtcacttttgtcagatgcagagaaactggagcaggttctacagtggaattggggagtctcctctcgaccagatcccccgtcagctgccatcttagttgtctacctggatcgggcccaggatcttcctctgaagaaggggaacaaggaacccaaccctatggtacaactgtcaattcaggatgtgactcaggagagcaaggctgtctacagtaccaactgcccagtgtgggaggaagcgttccggttcttcctacaagaccctcaaagccaggagctcgatgtgcaagtgaaggatgattccagggccctgactttaggagcactgacgctgcctctggcccgcctgctgactgccccagaactcatcctggaccagtggttccagctcagcagctctggtccaaactccagactctatatgaaactagtcatgaggatcctgtacttggattcatcagaaatatgcttccccacggtgcctggttgtcctggtgcttgggacgtggacagtgagaatccccagagaggcagcagtgtggatgccccacctcgaccctgtcacacgactcctgatagccagtttgggactgagcatgtgcttcggatccatgtattagaggcccaggacctgattgccaaagaccgtttcttggggggactggtgaagggcaagtcagacccctatgtcaaactaaagttggcaggacgaagcttccggagccatgttgttcgggaagatctcaatccccgctggaatgaggtttttgaggtgatcgtcacatcagttccaggccaagagctagaggttgaagtctttgacaaggacttggacaaggatgattttctgggcaggtgtaaagtgcgtctcaccacagtcttaaacagtggcttccttgatgagtggctgaccctggaggatgtcccatctggccgcctgcacttgcgcctggagcgtctcaccccccgtcccactgctgctgagttagaggaggtgctgcaggtgaatagtttgatccagactcagaagagtgcggagctggctgcggccctgctatccatctatatggagcgggcagaggacctcccgctgcgaaaaggcaccaagcacctcagcccttatgctactctcactgtgggagatagttctcataaaaccaagactatttcgcaaacttcagcccctgtctgggatgagagtgcctcctttctcatcaggaaaccacacactgagagcctagagttgcaggttcggggtgagggcactggcgtgctgggctcattatccctgcccctctcagagctcctcgtggctgaccagctctgcttggaccgctggtttacactcagcagtggtcaggggcaggtgctactgagagcacagctagggatcctggtgtcccagcactcgggagtggaagctcatagccacagctacagccacagctcctcatcgctgagtgaagaaccagagctctcggggggaccccctcacatcacctcctcagccccagagctccggcagcgcctaacacatgttgacagtccccttgaggctccagccgggcctctgggccaggtgaaactgactctgtggtactacagtgaagaacgaaagctggtcagcattgttcatggttgccggtcccttcgacagaatggacgtgatcctcctgatccctatgtgtcactgttgctactgccagacaagaaccgaggcaccaagaggaggacctcacagaagaagaggaccctgagtcctgaatttaatgaacggtttgagtgggaactccccctggatgaggcccagagacgaaagctggatgtctctgtcaagtctaattcctccttcatgtcaagagagcgtgagctgctggggaaggtgcagctggacctagctgagacagacctttcccagggtgtagcccggtggtatgacctgatggacaacaaggacaagggcagctcctaggagctggcgagtcccagcctgactgctctgtcttcctgccttcgtctcgctccatcaccgcctcaatgtgatgagcctaaagctagggtccaagggcagagcctgtgcccttcagccctttcacctaacaggcccatattcgggcctttgcctgaccaaagagaagaaccgtatgttccctttactgcacggcctttatccttctgggcccctggggcggggacctgagctggctgtttcctgctttgcctgcacattgttctcccttcctcccaactcctcagggccttctgtatctgtgcctggccagtggcagcactagcagtggtattagcttatgccaaatacagctttggaaggatctttttttctttaactagatggtcaccttcttccctaccacacatgggtgggaaggtggacaggctaacctctccagctgtgagcctcttagactactgcatgtagcaaatgttcagcagctcaggcccccatgtccagttctgtccccactgtcctcaaccctgtcctgaaaattctactgctttgatggctggggccagtctcttgtcactttggaaactgaggacgcgtggattctactcaagcctccaagtagtggcatatcagtcttggagctcctagctggtgatacggagagggctttggaggacttgggacagcagggccaatttttttgcccaagtgcctaggctgctaactcactgactagaacttaatctggtactttacagtttgcaacccgaagcctgcttagtatacaacgcccgagctggattcgttacatataaaccagtaatcttctg

SEQ ID NO: 283552 - DNA, 1718 bp, Homo sapiens
tttaagactaacacagtattgtctttctagctgcgaaaaggcaccaagcacctcagcccttatgctactctcactgtgggagatagttctcataaaaccaagactatttcgcaaacttcagcccctgtctgggatgagagtgcctcctttctcatcaggaaaccacacactgagagcctagagttgcaggttcggggtgagggcactggcgtgctgggctcattatccctgcccctctcagagctcctcgtggctgaccagctctgcttggaccgctggtttacactcagcagtggtcaggggcaggtgctactgagagcacagctagggatcctggtgtcccagcactcgggagtggaagctcatagccacagctacagccacagctcctcatcgctgagtgaagaaccagagctctcggggggaccccctcacatcacctcctcagccccagagctccggcagcgcctaacacatgttgacagtccccttgaggctccagccgggcctctgggccaggtgaaactgactctgtggtactacagtgaagaacgaaagctggtcagcattgttcatggttgccggtcccttcgacagaatggacgtgatcctcctgatccctatgtgtcactgttgctactgccagacaagaaccgaggcaccaagaggaggacctcacagaagaagaggaccctgagtcctgaatttaatgaacggtttgagtgggaactccccctggatgaggcccagagacgaaagctggatgtctctgtcaagtctaattcctccttcatgtcaagagagcgtgagctgctggggaaggtgcagctggacctagctgagacagacctttcccagggtgtagcccggtggtatgacctgatggacaacaaggacaagggcagctcctaggagctggcgagtcccagcctgactgctctgtcttcctgccttcgtctcgctccatcaccgcctcaatgtgatgagcctaaagctagggtccaagggcagagcctgtgcccttcagccctttcacctaacaggcccatattcgggcctttgcctgaccaaagagaagaaccgtatgttccctttactgcacggcctttatccttctgggcccctggggcggggacctgagctggctgtttcctgctttgcctgcacattgttctcccttcctcccaactcctcagggccttctgtatctgtgcctggccagtggcagcactagcagtggtattagcttatgccaaatacagctttggaaggatctttttttctttaactagatggtcaccttcttccctaccacacatgggtgggaaggtggacaggctaacctctccagctgtgagcctcttagactactgcatgtagcaaatgttcagcagctcaggcccccatgtccagttctgtccccactgtcctcaaccctgtcctgaaaattctactgctttgatggctggggccagtctcttgtcactttggaaactgaggacgcgtggattctactcaagcctccaagtagtggcatatcagtcttggagctcctagctggtgatacggagagggctttggaggacttgggacagcagggccaatttttttgcccaagtgcctaggctgctaactcactgactagaacttaatctggtactttacagttttgcaccaactctgccaagccactggatcttacattaaacatcatactc

SEQ ID NO: 283553 - DNA, 3939 bp, Homo sapiens
catcccggggatcacgttttgcctgggggagctgatcgcaagactaggcaacctccagccagtccctgggtcgggcggatcctcccagaggtggcacaatggagcgatctccaggagagggccccagccccagccccatggaccagccctctgctccctccgaccccactgaccagccccccgctgctcacgcaaagccagacccaggttctgggggccaacctgctggccctggcgcggcgggtgaggccctggcggtgctgacttcattcgggaggcggttgctggtgctgatacctgtgtatttggccggggcagtgggactcagcgtgggtttcgtgctcttcggcctcgccctctacctgggctggcgccgggtccgcgacgagaaagaacggagccttcgagcagcgaggcagctactggacgacgaggagcagctcactgcgaaaactctctatatgagtcatcgagagctacctgcctgggtcagcttcccagacgtggaaaaggctgaatggctcaataagattgtggcccaggtctggcccttcctgggccagtatatggagaagcttctggctgaaactgtggctccggctgttaggggatctaacccccatctgcaaacatttacatttacacgagtggaactgggtgaaaagccattgcgcatcattggagtcaaggttcacccaggtcagagaaaagagcagatcctgctggacttgaacatcagctatgtaggtgatgtgcagattgatgtggaagtgaagaaatatttttgcaaagcaggagtcaagggcatgcagctacatggcgttttgcgggtgatactggagccactcattggggaccttcccttcgtgggggctgtgtcaatgttcttcatccgacgcccgaccctagacatcaactggacagggatgaccaacctgctggatatcccaggacttagctcactctctgacaccatgatcatggactccattgctgccttcctcgtgttgcccaaccgattactggtgccccttgtgcctgaccttcaagatgtggctcagttgcgttcccctctgcccaggggcattattcgaattcacctgctggctgctcgagggctgagttccaaggacaaatatgtgaagggcctgattgagggcaagtcagacccatatgcacttgtgcgtttgggtacccagacattctgcagtcgtgtcattgatgaagaactcaacccacagtggggagagacttatgaggtgatggtacacgaggtcccagggcaggagattgaagtggaggtgttcgacaaggatccagataaagatgactttctgggcagaatgaagctggatgtagggaaggtgttacaggctagcgttctggatgattggttccctctacaaggtgggcaaggccaagttcacttgaggctagaatggctgtcacttttgtcagatgcagagaaactggagcaggttctacagtggaattggggagtctcctctcgaccagatcccccgtcagctgccatcttagttgtctacctggatcgggcccaggatcttcctctgaagaaggggaacaaggaacccaaccctatggtacaactgtcaattcaggatgtgactcaggagagcaaggctgtctacagtaccaactgcccagtgtgggaggaagcgttccggttcttcctacaagaccctcaaagccaggagctcgatgtgcaagtgaaggatgattccagggccctgactttaggagcactgacgctgcctctggcccgcctgctgactgccccagaactcatcctggaccagtggttccagctcagcagctctggtccaaactccagactctatatgaaactagtcatgaggatcctgtacttggattcatcagaaatatgcttccccacggtgcctggttgtcctggtgcttgggacgtggacagtgagaatccccagagaggcagcagtgtggatgccccacctcgaccctgtcacacgactcctgatagccagtttgggactgagcatgtgcttcggatccatgtattagaggcccaggacctgattgccaaagaccgtttcttggggggactggtgaagggcaagtcagacccctatgtcaaactaaagttggcaggacgaagcttccggagccatgttgttcgggaagatctcaatccccgctggaatgaggtttttgaggtgatcgtcacatcagttccaggccaagagctagaggttgaagtctttgacaaggacttggacaaggatgattttctgggcaggtgtaaagtgcgtctcaccacagtcttaaacagtggcttccttgatgagtggctgaccctggaggatgtcccatctggccgcctgcacttgcgcctggagcgtctcaccccccgtcccactgctgctgagttagaggaggtgctgcaggtgaatagtttgatccagactcagaagagtgcggagctggctgcggccctgctatccatctatatggagcgggcagaggacctcccgctgcgaaaaggcaccaagcacctcagcccttatgctactctcactgtgggagatagttctcataaaaccaagactatttcgcaaacttcagcccctgtctgggatgagagtgcctcctttctcatcaggaaaccacacactgagagcctagagttgcaggttcggggtgagggcactggcgtgctgggctcattatccctgcccctctcagagctcctcgtggctgaccagctctgcttggaccgctggtttacactcagcagtggtcaggggcaggtgctactgagagcacagctagggatcctggtgtcccagcactcgggagtggaagctcatagccacagctacagccacagctcctcatcgctgagtgaagaaccagagctctcggggggaccccctcacatcacctcctcagccccagagctccggcagcgcctaacacatgttgacagtccccttgaggctccagccgggcctctgggccaggtgaaactgactctgtggtactacagtgaagaacgaaagctggtcagcattgttcatggttgccggtcccttcgacagaatggacgtgatcctcctgatccctatgtgtcactgttgctactgccagacaagaaccgaggcaccaagaggaggacctcacagaagaagaggaccctgagtcctgaatttaatgaacggtttgagtgggaactccccctggatgaggcccagagacgaaagctggatgtctctgtcaagtctaattcctccttcatgtcaagagagcgtgagctgctggggaaggtgcagctggacctagctgagacagacctttcccagggtgtagcccggtggtatgacctgatggacaacaaggacaagggcagctcctaggagctggcgagtcccagcctgactgctctgtcttcctgccttcgtctcgctccatcaccgcctcaatgtgatgagcctaaagctagggtccaagggcagagcctgtgcccttcagccctttcacctaacaggcccatattcgggcctttgcctgaccaaagagaagaaccgtatgttccctttactgcacggcctttatccttctgggcccccatgtccagttctgtccccactgtcctcaaccctgtcctgaaaattctactgctttgatggctggggccagtctcttgtcactttggaaactgaggacgcgtggattctactcaagcctccaagtagtggcatatcagtcttggagctcctagctggtgatacggagagggctttggaggacttgggacagcagggccaatttttttgcccaagtgcctaggctgctaactcactgactagaacttaatctggtactttacagttttgcaccaactctgccaagccactggatcttacattaaacatcatactc

SEQ ID NO: 283554 - DNA, 1013 bp, Homo sapiens
gcctgcttgtccttcttcgtgtaggagcagagagccccatccagacgggcttgcccttcatagaagtccaaggtgcacatggtgttccccaccactgtggtgaactcgctcagctctgcagaacacagcaacagctcctgcaccagcttcttgttaaggtccgttttccggatgacccgcttccccaggacaatctgctcaaactctgccttgaagcaggtatccctgactgctctgtcttcctgccttcgtctcgctccatcaccgcctcaatgtgatgagcctaaagctagggtccaagggcagagcctgtgcccttcagccctttcacctaacaggcccatattcgggcctttgcctgaccaaagagaagaaccgtatgttccctttactgcacggcctttatccttctgggcccctggggcggggacctgagctggctgtttcctgctttgcctgcacattgttctcccttcctcccaactcctcagggccttctgtatctgtgcctggccagtggcagcactagcagtggtattagcttatgccaaatacagctttggaaggatctttttttctttaactagatggtcaccttcttccctaccacacatgggtgggaaggtggacaggctaacctctccagctgtgagcctcttagactactgcatgtagcaaatgttcagcagctcaggcccccatgtccagttctgtccccactgtcctcaaccctgtcctgaaaattctactgctttgatggctggggccagtctcttgtcactttggaaactgaggacgcgtggattctactcaagcctccaagtagtggcatatcagtcttggagctcctagctggtgatacggagagggctttggaggacttgggacagcagggccaatttttttgcccaagtgcctaggctgctaactcactgactagaacttaatctggtactttacagttttgcaccaactctgccaagccactggatcttacattaaacatcatactc

SEQ ID NO: 283555 - DNA, 1509 bp, Homo sapiens
catcccggggatcacgttttgcctgggggagctgatcgcaagactaggcaacctccagccagtccctgggtcgggcggatcctcccagaggtggcacaatggagcgatctccaggagagggccccagccccagccccatggaccagccctctgctccctccgaccccactgaccagccccccgctgctcacgcaaagccagacccaggttctgggggccaacctgctggccctggcgcggcgggtgaggccctggcggtgctgacttcattcgggaggcggttgctggtgctgatacctgtgtatttggccggggcagtgggactcagcgtgggtttcgtgctcttcggcctcgccctctacctgggctggcgccgggtccgcgacgagaaagaacggagccttcgagcagcgaggcagctactggacgacgaggagcagctcactgcgaaaactctctatatgagtcatcgagagctacctgcctgggtcagcttcccagacgtggaaaaggctgaatggctcaataagattgtggcccaggtctggcccttcctgggccagtatatggagaagcttctggctgaaactgtggctccggctgttaggggatctaacccccatctgcaaacatttacatttacacgagtggaactgggtgaaaagccattgcgcatcattggagtcaaggttcacccaggtcagagaaaagagcagatcctgctggacttgaacatcagctatgtaggtgatgtgcagattgatgtggaagtgaagaaatatttttgcaaagcaggagtcaagggcatgcagctacatggcgttttgcgggtgatactggagccactcattggggaccttcccttcgtgggggctgtgtcaatgttcttcatccgacgcccgaccctagacatcaactggacagggatgaccaacctgctggatatcccaggacttagctcactctctgacaccatgatcatggactccattgctgccttcctcgtgttgcccaaccgattactggtgccccttgtgcctgaccttcaagatgtggctcagttgcgttcccctctgcccaggggcattattcgaattcacctgctggctgctcgagggctgagttccaaggacaaatatgtgaagggcctgattgagggcaagtcagacccatatgcacttgtgcgtttgggtacccagacattctgcagtcgtgtcattgatgaagaactcaacccacagtggggagagacttatgaggtgatggtacacgaggtcccagggcaggagattgaagtggaggtgttcgacaaggatccagataaagatgactttctgggcagaatgaagctggatgtagggaaggtgttacaggctagcgttctggatgatccaatttttttgcccaagtgcctaggctgctaactcactgactagaacttaatctggtactttacagttttgcaccaactctgccaagccactggatcttacattaaacatcatactc

SEQ ID NO: 283556 - DNA, 334 bp, Homo sapiens
tgaagaaatatttttgcaaagcaggagtcaagggcatgcaggtaggccagatgtcaggggccacataatagggaatgtttgtcctgcgtttcatgggatatggggaagtgtgaggttggaaagaccaaggctgagaaagtctgggaggacagaagagggacttttctggggaaaggctttgattttctcttcttgcctcagctacatggcgttttgcgggtgatactggagccactcattggggaccttcccttcgtgggggctgtgtcaatgttcttcatccgacgcccggtaagggaaaacaatgaaggggtatggggaagcaggagaaaca

SEQ ID NO: 283557 - DNA, 960 bp, Homo sapiens
ccctcctcctcagtcaccggcgcattcactccgacagccggcccttcccctgcgtggagtgtgggaaaggcttcaagcgcaagaccgccctggaagcccatcggtggatccaccgctcctgcagcgagaggcgcgcgtggcagcaggccgtggtggggcgttcagagcccatccctgttttgggaggcaaggatcccccagttcacttccggcactttccagatatatttcaagagtgtgggtgatggcgttcacacaaactggtcagcgtttccctggagaggaagaggcaagatctgctagccctacttttgaagaggaaacttttgaaggaatgaacaaaagagtattcaccacatggagtgcagtgaggcagttccagaactcaaggtaataatgtaagcatattaataatatttaattattaacaattaataattaatcaattaataacatatgcatatgagatcagcaggagtcacactaaaagccaaaaagcatttcaggtgaaaaacagcaagggtaggccagaaaacacaaagaaatcttgactgaaaagtcagcaataaaaaacactattgaataaaaaggaaggctcgatatactagggctggcaggggagccaagcaagtagatccagagccagaatgacagcagggacctggtaggccttgcttgttatctccagcaaccagccccacgcttagcaaacagtattctgcatcctgtatgattgcaggtatattccaaatgtggggatgaaggcaactagtatttacagtccaatgccaccagccatgaggatgacccatcttggctgaaaaataaagaccttaaatctaggaagcggaagatacaacccaggacagcaggaaggggagacccggtatgagaagaactgaggcccaacccagtttagagaggagactgaaggctaaaggaggaaggtttcccaggaaa

SEQ ID NO: 283558 - DNA, 436 bp, Homo sapiens
actgggccaactcttcactgtatgcattagtgattgcagtgtttttttcttcttcagatatttgcatgttcccctgtctctactaaaaaaaaagaaatacaaaattagccaggcatggtggcacatgcctgtaatcacagctactcgggaggctgaggcaggagaatcgtttgaccccaggaggcggaggttgcagtgagccaagatcgtgccattgcactccagcctgggcaacaagagtggaactctgtttcaaaaaagaaagaaagaaattcagctcccacttaaagttcagttgtactctgttattgacaagtaaagtcgattgaagcccagtcatctcctgtatgttgtgtgacttctcataattatctgatcaagagtcttgaagaaacatttacaatttgatgggcaataaaataatttgaaagcaaga

SEQ ID NO: 283559 - DNA, 2304 bp, Homo sapiens
ccctcctcctcagtcaccggcgcattcactccgacagccggcccttcccctgcgtggagtgtgggaaaggcttcaagcgcaagaccgccctggaagcccatcggtggatccaccgctcctgcagcgagaggcgcgcgtggcagcaggccgtggtggggcgttcagagcccatccctgttttgggaggcaaggatcccccagttcacttccggcactttccagatatatttcaagagtgtgggtgatggcgttcacacaaactggtcagcgtttccctggagaggaagaggcaaggtttgtgtatttgggggataaggaaaggaagtgggcgtttgaggaaaacaaagttctgccttaggtaaaaagcagaggtaggggcacagagggctgtggggaggaggcaggaatctgaaaaggtgcctgggggttgaccccattttctgaagctccagcacacagggccccgtgttcacgtcccatccttcactgaaaaccattcacctaactggcttttccttcatgattgttctctcccttgtagctctctgctttttggcctgtatctctcctactcctctgagatggggtcccctacattccagtgcctattaaaggagcctgcacccactctggaccccccagaatagaggggatacctcaggcctgtccctcggctggtggggggggcggagctcatcccaggattcttttcttttttttgagatggacctgggcgacaaagtgagactccagtctcaaaaaacaaaacaaaacaaaaaacaacagttaagagagttctttctggcccatttagatctgctagccctacttttgaagaggaaacttttgaaggaatgaacaaaagaggtaggtgggactaagcatttctgcattccaggactggtggtcagtgactcaaatatctctttgaaaagactgcttctttgaatccttgggttccaagataattaatgggaactggtgccgggcacggtggctcacacctgtgatcccagcactgtgggaggctgaggctggttaatcacttgaggtcaggagtttgagaccagctgggcaatatagtgaaaccccatctctaccaaaaaattagccaggcgtggtggcacatgcctgtagtcccagctactcaggaggctaaggcaagaggatcacttgagcctgggagacagaggttgcagtgagctgagatggctccattgcactccagcctgggctacaaagcaggactctgtctcaaaacaaaaacagatacaaaaactgggaacggggtgttatctttacttcaccacatagcctctcctgaattggtggacctggattcctagcttggctcagtccccactggctgtgtggcctttagcatcacctagattctacaaataacatttttctctatttgttttacacatgtcaatctgcctatccatccctctatccattcatttatccattttattaatgtatttcaaagtaagttgcagacatcattacatttcacttctaaacacttcagcatacagctgagttttatgcaagaaacttaagctctcagctgggtacagtggctcacacctgtaatcccagcactttgggaggctgaggcaggaggattgcatgagattgggagtttgagacgagcctggaaaacagcaagacctcatttctactaaaaattttaaaaattagccgagcatggtgggggagggtgaagaaggaggatagcttgagcccaggagtttgaggctatagtgagctatgatggcgccacttcagtctgagtaacagcaagacactattaaaaaaaaaaaaagagccaggcgcagtggctcacacctgtaatcccagcactttggtaggccaaggtgggcagatcacctgaggtcaggagtttgagaccagcctgacgaacatggagaaaccctgtctctactaaaaaaaaagaaatacaaaattagccaggcatggtggcacatgcctgtaatcacagctactcgggaggctgaggcaggagaatcgtttgaccccaggaggcggaggttgcagtgagccaagatcgtgccattgcactccagcctgggcaacaagagtggaactctgtttcaaaaaagaaagaaagaaattcagctcccacttaaagttcagttgtactctgttattgacaagtaaagtcgattgaagcccagtcatctcctgtatgttgtgtgacttctcataattatctgatcaagagtcttgaagaaacatttacaatttgatgggcaataaaataatttgaaagcaaga

SEQ ID NO: 283560 - DNA, 1815 bp, Homo sapiens
ctggccccatatgaatcccccaaatgaatctcgggattgttctcccttgtagctctctgctttttggcctgtatctctcctactcctctgagatggggtcccctacattccagtgcctattaaaggagcctgcacccactctggaccccccagaatagaggggatacctcaggcctgtccctcggctggtggggggggcggagctcatcccaggattcttttcttttttttgagatggacctgggcgacaaagtgagactccagtctcaaaaaacaaaacaaaacaaaaaacaacagttaagagagttctttctggcccatttagatctgctagccctacttttgaagaggaaacttttgaaggaatgaacaaaagaggtaggtgggactaagcatttctgcattccaggactggtggtcagtgactcaaatatctctttgaaaagactgcttctttgaatccttgggttccaagataattaatgggaactggtgccgggcacggtggctcacacctgtgatcccagcactgtgggaggctgaggctggttaatcacttgaggtcaggagtttgagaccagctgggcaatatagtgaaaccccatctctaccaaaaaattagccaggcgtggtggcacatgcctgtagtcccagctactcaggaggctaaggcaagaggatcacttgagcctgggagacagaggttgcagtgagctgagatggctccattgcactccagcctgggctacaaagcaggactctgtctcaaaacaaaaacagatacaaaaactgggaacggggtgttatctttacttcaccacatagcctctcctgaattggtggacctggattcctagcttggctcagtccccactggctgtgtggcctttagcatcacctagattctacaaataacatttttctctatttgttttacacatgtcaatctgcctatccatccctctatccattcatttatccattttattaatgtatttcaaagtaagttgcagacatcattacatttcacttctaaacacttcagcatacagctgagttttatgcaagaaacttaagctctcagctgggtacagtggctcacacctgtaatcccagcactttgggaggctgaggcaggaggattgcatgagattgggagtttgagacgagcctggaaaacagcaagacctcatttctactaaaaattttaaaaattagccgagcatggtgggggagggtgaagaaggaggatagcttgagcccaggagtttgaggctatagtgagctatgatggcgccacttcagtctgagtaacagcaagacactattaaaaaaaaaaaaagagccaggcgcagtggctcacacctgtaatcccagcactttggtaggccaaggtgggcagatcacctgaggtcaggagtttgagaccagcctgacgaacatggagaaaccctgtctctactaaaaaaaaagaaatacaaaattagccaggcatggtggcacatgcctgtaatcacagctactcgggaggctgaggcaggagaatcgtttgaccccaggaggcggaggttgcagtgagccaagatcgtgccattgcactccagcctgggcaacaagagtggaactctgtttcaaaaaagaaagaaagaaattcagctcccacttaaagttcagttgtactctgttattgacaagtaaagtcgattgaagcccagtcatctcctgtatgttgtgtgacttctcataattatctgatcaagagtcttgaagaaacatttacaatttgatgggcaataaaataatttgaaagcaaga

SEQ ID NO: 283561 - DNA, 1480 bp, Homo sapiens
ccctcctcctcagtcaccggcgcattcactccgacagccggcccttcccctgcgtggagtgtgggaaaggcttcaagcgcaagaccgccctggaagcccatcggtggatccaccgctcctgcagcgagaggcgcgcgtggcagcaggccgtggtggggcgttcagagcccatccctgttttgggaggcaaggatcccccagttcacttccggcactttccagatatatttcaagagtgtgggtgatggcgttcacacaaactggtcagcgtttccctggagaggaagaggcaaggtttgtgtatttgggggataaggaaaggaagtgggcgtttgaggaaaacaaagttctgccttaggtaaaaagcagaggtaggggcacagagggctgtggggaggaggcaggaatctgaaaaggtgcctgggggttgaccccattttctgaagctccagcacacagggccccgtgttcacgtcccatccttcactgaaaaccattcacctaactggcttttccttcatgattgttctctcccttgtagctctctgctttttggcctgtatctctcctactcctctgagatggggtcccctacattccagtgcctattaaaggagcctgcacccactctggaccccccagaatagaggggatacctcaggcctgtccctcggctggtggggggggcggagctcatcccaggattcttttcttttttttgagatggacctgggcgacaaagtgagactccagtctcaaaaaacaaaacaaaacaaaaaacaacagttaagagagttctttctggcccatttagatctgctagccctacttttgaagaggaaacttttgaaggaatgaacaaaagagtattcaccacatggagtgcagtgaggcagttccagaactcaaggtaataatgtaagcatattaataatatttaattattaacaattaataattaatcaattaataacatatgcatatgagatcagcaggagtcacactaaaagccaaaaagcatttcaggtgaaaaacagcaagggtaggccagaaaacacaaagaaatcttgactgaaaagtcagcaataaaaaacactattgaataaaaaggaaggctcgatatactagggctggcaggggagccaagcaagtagatccagagccagaatgacagcagggacctggtaggccttgcttgttatctccagcaaccagccccacgcttagcaaacagtattctgcatcctgtatgattgcaggtatattccaaatgtggggatgaaggcaactagtatttacagtccaatgccaccagccatgaggatgacccatcttggctgaaaaataaagaccttaaatctaggaagcggaagatacaacccaggacagcaggaaggggagacccggtatgagaagaactgaggcccaacccagtttagagaggagactgaaggctaaaggaggaaggtttcccaggaaa

SEQ ID NO: 283562 - DNA, 348 bp, Homo sapiens
aggagaatggcatgaacccgggaggcggagcttgcagtgagctgagatcgcgccactgcactccagcctgggcgacaaagtgagactccagtctcaaaaaacaaaacaaaacaaaaaacaacagttaagagagttctttctggcccatttagatctgctagccctacttttgaagaggaaacttttgaaggaatgaacaaaagaggtaggtgggactaagcatttctgcattccaggactggtggtcagtgactcaaatatctctttgaaaagactgcttctttgaatccttgggttccaagataattaatgggaactggtgccgggcacggtggctcacacctgtga

SEQ ID NO: 283563 - DNA, 812 bp, Homo sapiens
ccctcctcctcagtcaccggcgcattcactccgacagccggcccttcccctgcgtggagtgtgggaaaggcttcaagcgcaagaccgccctggaagcccatcggtggatccaccgctcctgcagcgagaggcgcgcgtggcagcaggccgtggtggggcgttcagagcccatccctgttttgggaggcaaggatcccccagttcacttccggcactttccagatatatttcaagagtgtgggtgatggcgttcacacaaactggtcagcgtttccctggagaggaagaggcaaggtttgtgtatttgggggataaggaaaggaagtgggcgtttgaggaaaacaaagttctgccttaggtaaaaagcagaggtaggggcacagagggctgtggggaggaggcaggaatctgaaaaggtgcctgggggttgaccccattttctgaagctccagcacacagggccccgtgttcacgtcccatccttcactgaaaaccattcacctaactggcttttccttcatgattgttctctcccttgtagctctctgctttttggcctgtatctctcctactcctctgagatggggtcccctacattccacctgggcaacaagagtggaactctgtttcaaaaaagaaagaaagaaattcagctcccacttaaagttcagttgtactctgttattgacaagtaaagtcgattgaagcccagtcatctcctgtatgttgtgtgacttctcataattatctgatcaagagtcttgaagaaacatttacaatttgatgggcaataaaataatttgaaagcaaga

SEQ ID NO: 283564 - DNA, 957 bp, Homo sapiens
ccctcctcctcagtcaccggcgcattcactccgacagccggcccttcccctgcgtggagtgtgggaaaggcttcaagcgcaagaccgccctggaagcccatcggtggatccaccgctcctgcagcgagaggcgcgcgtggcagcaggccgtggtggggcgttcagagcccatccctgttttgggaggcaaggatcccccagttcacttccggcactttccagatatatttcaagagtgtgggtgatggcgttcacacaaactggtcagcgtttccctggagaggaagaggcaaggtttgtgtatttgggggataaggaaaggaagtgggcgtttgaggaaaacaaagttctgccttaggtaaaaagcagaggtaggggcacagagggctgtggggaggaggcaggaatctgaaaaggtgcctgggggttgaccccattttctgaagctccagcacacagggccccgtgttcacgtcccatccttcactgaaaaccattcacctaactggcttttccttcatgattgttctctcccttgtagctctctgctttttggcctgtatctctcctactcctctgagatggggtcccctacattccagtgcctattaaaggagcctgcacccactctggaccccccagaatagaggggatacctcaggcctgtccctcggctggtggggggggcggagctcatcccaggattcttttcttttttttgagatggagtcatgctctgtcgcccaggctggagtgcagtggcgtgatctcggctcactgcaacctctgcctcctgggttcaagccattctctgcctcagccttcccattagctgggattacaggcatgcgccaccaggcccagctaatttttgtgctgttagtagagacggggttccaccatcttggccaggctggtcttgaattcctgacctcgtgatccacccgcctcggcgtc

SEQ ID NO: 283565 - DNA, 1440 bp, Homo sapiens
ccctcctcctcagtcaccggcgcattcactccgacagccggcccttcccctgcgtggagtgtgggaaaggcttcaagcgcaagaccgccctggaagcccatcggtggatccaccgctcctgcagcgagaggcgcgcgtggcagcaggccgtggtggggcgttcagagcccatccctgttttgggaggcaaggatcccccagttcacttccggcactttccagatatatttcaagagtgtgggtgatggcgttcacacaaactggtcagcgtttccctggagaggaagaggcaaggtttgtgtatttgggggataaggaaaggaagtgggcgtttgaggaaaacaaagttctgccttaggtaaaaagcagaggtaggggcacagagggctgtggggaggaggcaggaatctgaaaaggtgcctgggggttgaccccattttctgaagctccagcacacagggccccgtgttcacgtcccatccttcactgaaaaccattcacctaactggcttttccttcatgattgttctctcccttgtagctctctgctttttggcctgtatctctcctactcctctgagatggggtcccctacattccagtgcctattaaaggagcctgcacccactctggaccccccagaatagaggggatacctcaggcctgtccctcggctggtggggggggcggagctcatcccaggattcttttcttttttttgagatggacctgggcgacaaagtgagactccagtctcaaaaaacaaaacaaaacaaaaaacaacagttaagagagttctttctggcccatttagatctgctagccctacttttgaagaggaaacttttgaaggaatgaacaaaagaggtaggtgggactaagcatttctgcattccaggactggtggtcagtgactcaaatatctctttgaaaagactgcttctttgaatccttgggttccaagataattaatgggaactggtgccgggcacggtggctcacacctgtgatcccagcactgtgggaggctgaggctggttaatcacttgaggtcaggagtttgagaccagctgggcaatatagtgaaaccccatctctaccaaaaaattagccaggcgtggtggcacatgcctgtagtcccagctactcaggaggctaaggcaagaggatcacttgagcctgggagacagaggttgcagtgagctgagatggctccattgcactccagccctgggcaacaagagtggaactctgtttcaaaaaagaaagaaagaaattcagctcccacttaaagttcagttgtactctgttattgacaagtaaagtcgattgaagcccagtcatctcctgtatgttgtgtgacttctcataattatctgatcaagagtcttgaagaaacatttacaatttgatgggcaataaaataatttgaaagcaaga

SEQ ID NO: 283566 - DNA, 1245 bp, Homo sapiens
ggtgcaccaaaatctcagaaatcaccactgaagaacttattcatgtaaccaaaaaccacctgttccccaaaaactattgaaataaaaaaagaacctcatgaatattttttaaaagcctatgggaaaaaaattacaatctaagttatgactattaccaccctttcaccatttctgaaagctcagctgattctatatgaacttctacaacatcactacccagtagaactttgtattacgcaaaccaattattactaggccgctctccccataactcaattctgcctatggactcacttggagtggagtggaacagttgattaaactgcttataggattttctcagatgttcatatatgtaattcacacactcaaaactctgaacaagtaataccttcctatgtacaattaactatatttgtatttttggattggcaggcaaatgaataaaagaacatcttttatttacccgtatctgcgacattcctcatagtatgtttgaaagcccaaatgatggaatccaaaacaagtttaaactgtgtaggtggaatagcaaggaatgctgggaaacaatgagaattgacagcctgaagtagtaagaaaaagttcgttctatgttcaggatattcttcaaagtcctaaaaataagtggtggaaacaaaataatgtttcagtgtctttgttgtgctagacaggaggggaaaagcaaggcttaatccagtataaatatttggagttttcaataaaccacagaagatagaatgcctcctgaaaggtaaacccaagtaaaatacaatccacctctcacggaaaatgaaactgtcccgttacgcacatgagttatcaaattgaaggagaaagacaacctttttaatagagaactcatctaaaccattattaccataagactactactatcacttttgtttttaatttgaaatcaccactacagattacaaaaaaatttaagttaccgtgtaaatgtgtccacttaacgtatcttttatctcttttttctttttaaacagtctcactctgtcacccaggctgtagtgcagtggcgcaatctcagctgactgcaacctccgcctcctgggttcaagagattctcctgcctcagcctcccgagtagctgggactacaggcatgcggcaccatgcccagctaattttttttctttagacagagtcttgctctgtcacccaggctggagtgcgtggcgcgatcttggctcactgcaagctccgc

SEQ ID NO: 283567 - DNA, 920 bp, Homo sapiens
acggagtctcgctctgtcacccaagctggaatgccgtggcgcaatcttagttcactgcaacctctgcctcctcggtccaagccattctcctgcctcagcctcccgaataggcaaatgaataaaagaacatcttttatttacccgtatctgcgacattcctcatagtatgtttgaaagcccaaatgatggaatccaaaacaagtttaaactgtgtaggtggaatagcaaggaatgctgggaaacaatgagaattgacagcctgaagtagtaagaaaaagttcgttctatgttcaggatattcttcaaagtcctaaaaataagtggtggaaacaaaataatgtttcagtgtctttgttgtgctagacaggaggggaaaagcaaggcttaatccagtataaatatttggagttttcaataaaccacagaagatagaatgcctcctgaaaggtaaacccaagtaaaatacaatccacctctcacggaaaatgaaactgtcccgttacgcacatgagttatcaaattgaaggagaaagacaacctttttaatagagaactcatctaaaccattattaccataagactactactatcacttttgtttttaatttgaaatcaccactacagattacaaaaaaatttaagttaccgtgtaaatgtgtccacttaacgtatcttttatctcttttttctttttaaacagtctcactctgtcacccaggctgtagtgcagtggcgcaatctcagctgactgcaacctccgcctcctgggttcaagagattctcctgcctcagcctcccgagtagctgggactacaggcatgcggcaccatgcccagctaattttttttctttagacagagtcttgctctgtcacccaggctggagtgcgtggcgcgatcttggctcactgcaagctccgc

SEQ ID NO: 283568 - DNA, 575 bp, Homo sapiens
tgtctcccaggctagagtgcaacggcgccatctcggctcactgcaacctccgcctcccaggttcaagcaattctcctgtctcagcctcccgagtagctgggattacaggcgtgcgccaccacgcccagctaattttttttattttttatttttagtagagacagggttttgccatgttggccaggcaatggcagcagataaaagtgacgagtggtttgccaaacacaataaacccaaagcttcaggttaacggaagacatgatgcagagcaagcctctgtgattcctgcccagcacctgtgaggcctgacgtgtcagttcccaataaatgctcttctgatttgtttcccgtacaggcaaggaggcttgggtagtgcagatttgtgtatttcaatctttgaaagctctgatgtaatttagaaatgaaatccaatcatgagtccaggtagagaacgcctgctgtaatctacactgttgctgggactgcgcattctgtatataactgtgttggggataacatcctgagaagtcgaattcagtcgtccttttaatctccgaactgcgtgctgtgttggg

SEQ ID NO: 283569 - DNA, 588 bp, Homo sapiens
  misc_feature (74)..(74): n is a, c, g, or t
  misc_feature (82)..(82): n is a, c, g, or t
gggcctctgtagaaccttacgacagcattcgtgtggcgctgcggggccagataagtaattgacaccatggatcnattatgcntcgttctccttaatgtcgagaagtctcggtggatcacactgcacttcagatgcatggggactgtcttccatctcagtgagaaagatccgcgcggcagtgaaacgctgcatgcgtgctgtgaacaaatcctgaaatgagaagcttcgtgaaaggctcgactctatgctggagtcgtactcaatgagatgaggtccaatgcgaagtctcgacaatggtgggatttgggcctgaggatgatcattttgtcgcagaactgacttacaattatggcgtcggagactacaagcttggcaatgactttatgggaatcacgctcgcttctagccaggctgtcagcaacgccaggaagctggagtggccactgacggaagttgcagaaggtgtttttgaaaccgaggccccgggaggatataagttctatttgcagaatcgcagtctgcctcagtcagatcctgtattaaaagtaactctagcagtgtctgattgaggcagactgcgattctgca

SEQ ID NO: 283570 - DNA, 2440 bp, Homo sapiens
tttttgaggttttattatttttatttatttttgagactgagtcttgctctgtcatcaggctggagtgcagtggctcactgcaacctgggtgacagaacaagacaaaaaaaaaaaaaagatacactgggtaatcactaacccattattccttgtggcgttacgaggtcggaccaatccttgatatcctcaaatttcaccttaatgaggctgacacctttcagcttatcgactggcaactcctttaggtattctagacggctaaagaagaacatttttggcacagctccagccttgagagtgtctgaaatgagcctgcgaccttccagcaggatcttcccttgtttttcccgaaatggcctggactttactattgtcattacactggctcagcctcctgtccccgggataagctttatcgtagcgaagcccagactcttcccaggtgctgggagcgcgggatgcggactcctcgagcggttgtttctctcgttgctcctgggcactggcctcagatggtgccttgcggggctgcttcccaggagcgcgcttctgttccaccacctctccggaaggacacaccactttcactgggctccgccgcagcgcacggacccagcgcctcgctcaaggtcccaagcctggaccacctgcagcaacggtcgcacgacaaacctcgcgggtctcaccagcgccgccatgttccctgagacccgggctgcgtcacgaaagcgcgccgtcgggcataggtgacgtcacggcccgtggcgcccttcgtggactgggctgtacggtgcgcgtgacggctgcgtgcggcgggaatcatggctgctcgcagagctctgcacttcgtattcaaagtgggaaaccgcttccagacggcgcgtttctatcgggacgtcctggggatgaaggttctgcggcatgaggaatttgaagaaggctgcaaagctgcctgtaatgggccttatgatgggaaatggagtaaaacaatggtgggatttgggcctgaggatgatcattttgtcgcagaactgacttacaattatggcgtcggagactacaagcttggcaatgactttatgggaatcacgctcgcttctagccaggctgtcagcaacgccaggaagctggagtggccactgacggaagttgcagaaggtgtttttgaaaccgaggccccgggaggatataagttctatttgcagaatcgcagtctgcctcagtcagatcctgtattaaaagtaactctagcagtgtctgatcttcaaaagtccttgaactactggtgtaatctactgggaatgaaaatttatgaaaaagatgaagaaaagcaaagggctttgctgggctatgctgataaccagtgtaagctggagctacagggcgtcaagggtggggtggaccatgcagcagcttttggaagaattgccttctcttgcccccagaaagagttgccagacttagaagacttgatgaaaagggagaaccagaagattctgactcccctggtgagcctggacaccccagggaaagcaacagtacaggtggtcattctggccgaccctgacggacatgaaatttgctttgtcggggatgaagcatttcgagaactttctaagatggatccagagggaagcaaattgttggatgatgcaatggcagcagataaaagtgacgagtggtttgccaaacacaataaacccaaagcttcaggttaacggaagacatgatgcagagcaagcctctgtgattcctgcccagcacctgtgaggcctgacgtgtcagttcccaataaatgctcttctgatttgtttcccgtacaggcaaggaggcttgggtagtgcagatttgtgtatttcaatctttgaaagctctgatgtaatttagaaatgaaatccaatcatgagtccaggtagagaacgcctgctgtaatctacactgttgctgggactgcgcattctgtatataactgtgttggatgagtgacagatgattgtccagactaggacagcggcatgaacatgactttggttgggattgcggatagttagggttacctctgaatcgtgtagcttttatgagagcagctgtgcaagtgaatccacattaatgccttgtcgtggtgccattcccagcgcctgacgatacgctcttctattgtcttattctggcaggttttgacgttttaaattttttaaagaaattttattccttggaccaaaaggtttggttaaccacccccctcttacttgctttcacattttgagtgtccagaggaaacagaaaggaatgagtgtgtgacgttgctgcacgcctgactctgtgcgagcttctttctgtgtatatattttgttttatttttttccgtgtatatttttaatcccgacagaacatcatgtgagatttctttaaaatggattaaacgatttcttcagcctga

SEQ ID NO: 283571 - DNA, 1774 bp, Homo sapiens
caggctgtactggccccaatccctatgatggctgctcgcagagctctgcacttcgtattcaaagtgggaaaccgcttccagacggcgcgtttctatcgggacgtcctggggatgaaggttctgcggcatgaggaatttgaagaaggctgcaaagctgcctgtaatgggccttatgatgggaaatggagtaaaacaatggtgggatttgggcctgaggatgatcattttgtcgcagaactgacttacaattatggcgtcggagactacaagcttggcaatgactttatgggaatcacgctcgcttctagccaggctgtcagcaacgccaggaagctggagtggccactgacggaagttgcagaaggtgtttttgaaaccgaggccccgggaggatataagttctatttgcagaatcgcagtctgcctcagtcagatcctgtattaaaagtaactctagcagtgtctgatcttcaaaagtccttgaactactggtgtaatctactgggaatgaaaatttatgaaaaagatgaagaaaagcaaagggctttgctgggctatgctgataaccagtgtaagctggagctacagggcgtcaagggtggggtggaccatgcagcagcttttggaagaattgccttctcttgcccccagaaagagttgccagacttagaagacttgatgaaaagggagaaccagaagattctgactcccctggtgagcctggacaccccagggaaagcaacagtacaggtggtcattctggccgaccctgacggacatgaaatttgctttgtcggggatgaagcatttcgagaactttctaagatggatccagagggaagcaaattgttggatgatgcaatggcagcagataaaagtgacgagtggtttgccaaacacaataaacccaaagcttcaggttaacggaagacatgatgcagagcaagcctctgtgattcctgcccagcacctgtgaggcctgacgtgtcagttcccaataaatgctcttctgatttgtttcccgtacaggcaaggaggcttgggtagtgcagatttgtgtatttcaatctttgaaagctctgatgtaatttagaaatgaaatccaatcatgagtccaggtagagaacgcctgctgtaatctacactgttgctgggactgcgcattctgtatataactgtgttggatgagtgacagatgattgtccagactaggacagcggcatgaacatgactttggttgggattgcggatagttagggttacctctgaatcgtgtagcttttatgagagcagctgtgcaagtgaatccacattaatgccttgtcgtggtgccattcccagcgcctgacgatacgctcttctattgtcttattctggcaggttttgacgttttaaattttttaaagaaattttattccttggaccaaaaggtttggttaaccacccccctcttacttgctttcacattttgagtgtccagaggaaacagaaaggaatgagtgtgtgacgttgctgcacgcctgactctgtgcgagcttctttctgtgtatatattttgttttatttttttccgtgtatatttttaatcccgacagaacatcatgtgagatttctttaaaatggattaaacgatttcttcagcctgaaaaaaaaggttttgaaaatgttttcttgtagttttgtttggttctaaacaacaaataggttttaatcactcgaaatggaattatattgtgtattcattgaataaattttttttgaaagtaagcttctg

SEQ ID NO: 283572 - DNA, 2613 bp, Homo sapiens
tttttgaggttttattatttttatttatttttgagactgagtcttgctctgtcatcaggctggagtgcagtggctcactgcaacctgggtgacagaacaagacaaaaaaaaaaaaaagatacactgggtaatcactaacccattattccttgtggcgttacgaggtcggaccaatccttgatatcctcaaatttcaccttaatgaggctgacacctttcagcttatcgactggcaactcctttaggtattctagacggctaaagaagaacatttttggcacagctccagccttgagagtgtctgaaatgagcctgcgaccttccagcaggatcttcccttgtttttcccgaaatggcctggactttactattgtcattacactggctcagcctcctgtccccgggataagctttatcgtagcgaagcccagactcttcccaggtgctgggagcgcgggatgcggactcctcgagcggttgtttctctcgttgctcctgggcactggcctcagatggtgccttgcggggctgcttcccaggagcgcgcttctgttccaccacctctccggaaggacacaccactttcactgggctccgccgcagcgcacggacccagcgcctcgctcaaggtcccaagcctggaccacctgcagcaacggtcgcacgacaaacctcgcgggtctcaccagcgccgccatgttccctgagacccgggctgcgtcacgaaagcgcgccgtcgggcataggtgacgtcacggcccgtggcgcccttcgtggactgggctgtacggtgcgcgtgacggctgcgtgcggcgggaatcatggctgctcgcagagctctgcacttcgtattcaaagtgggaaaccgcttccagacggcgcgtttctatcgggacgtcctggggatgaaggtggagtcttgctctgtcgccaggctggagtgcagtggcgcgatctcggctcactgctctgactacacccggataacagaagacagtttctcaaagccttatgatgggaaatggagtaaaacaatggtgggatttgggcctgaggatgatcattttgtcgcagaactgacttacaattatggcgtcggagactacaagcttggcaatgactttatgggaatcacgctcgcttctagccaggctgtcagcaacgccaggaagctggagtggccactgacggaagttgcagaaggtgtttttgaaaccgaggccccgggaggatataagttctatttgcagaatcgcagtctgcctcagtcagatcctgtattaaaagtaactctagcagtgtctgatcttcaaaagtccttgaactactggtgtaatctactgggaatgaaaatttatgaaaaagatgaagaaaagcaaagggctttgctgggctatgctgataaccagtgtaagctggagctacagggcgtcaagggtggggtggaccatgcagcagcttttggaagaattgccttctcttgcccccagaaagagttgccagacttagaagacttgatgaaaagggagaaccagaagattctgactcccctggtgagcctggacaccccagggaaagcaacagtacaggtggtcattctggccgaccctgacggacatgaaatttgctttgtcggggatgaagcatttcgagaactttctaagatggatccagagggaagcaaattgttggatgatgcaatggcagcagataaaagtgacgagtggtttgccaaacacaataaacccaaagcttcaggttaacggaagacatgatgcagagcaagcctctgtgattcctgcccagcacctgtgaggcctgacgtgtcagttcccaataaatgctcttctgatttgtttcccgtacaggcaaggaggcttgggtagtgcagatttgtgtatttcaatctttgaaagctctgatgtaatttagaaatgaaatccaatcatgagtccaggtagagaacgcctgctgtaatctacactgttgctgggactgcgcattctgtatataactgtgttggatgagtgacagatgattgtccagactaggacagcggcatgaacatgactttggttgggattgcggatagttagggttacctctgaatcgtgtagcttttatgagagcagctgtgcaagtgaatccacattaatgccttgtcgtggtgccattcccagcgcctgacgatacgctcttctattgtcttattctggcaggttttgacgttttaaattttttaaagaaattttattccttggaccaaaaggtttggttaaccacccccctcttacttgctttcacattttgagtgtccagaggaaacagaaaggaatgagtgtgtgacgttgctgcacgcctgactctgtgcgagcttctttctgtgtatatattttgttttatttttttccgtgtatatttttaatcccgacagaacatcatgtgagatttctttaaaatggattaaacgatttcttcagcctgaaaaaaaaggttttgaaaatgttttcttgtagttttgtttggttctaaacaacaaataggttttaatcactcgaaatggaattatattgtgtattcattgaataaattttttttgaaagtaagcttctg

SEQ ID NO: 283573 - DNA, 2641 bp, Homo sapiens
tttttgaggttttattatttttatttatttttgagactgagtcttgctctgtcatcaggctggagtgcagtggctcactgcaacctgggtgacagaacaagacaaaaaaaaaaaaaagatacactgggtaatcactaacccattattccttgtggcgttacgaggtcggaccaatccttgatatcctcaaatttcaccttaatgaggctgacacctttcagcttatcgactggcaactcctttaggtattctagacggctaaagaagaacatttttggcacagctccagccttgagagtgtctgaaatgagcctgcgaccttccagcaggatcttcccttgtttttcccgaaatggcctggactttactattgtcattacactggctcagcctcctgtccccgggataagctttatcgtagcgaagcccagactcttcccaggtgctgggagcgcgggatgcggactcctcgagcggttgtttctctcgttgctcctgggcactggcctcagatggtgccttgcggggctgcttcccaggagcgcgcttctgttccaccacctctccggaaggacacaccactttcactgggctccgccgcagcgcacggacccagcgcctcgctcaaggtcccaagcctggaccacctgcagcaacggtcgcacgacaaacctcgcgggtctcaccagcgccgccatgttccctgagacccgggctgcgtcacgaaagcgcgccgtcgggcataggtgacgtcacggcccgtggcgcccttcgtggactgggctgtacggtgcgcgtgacggctgcgtgcggcgggaatcatggctgctcgcagagctctgcacttcgtattcaaagtgggaaaccgcttccagacggcgcgtttctatcgggacgtcctggggatgaaggttctgcggcatgaggaatttgaagaaggctgcaaagctgcctgtaatgggtatgataccttgtttcttaaaatctcctttaggctctgactacacccggataacagaagacagtttctcaaagccttatgatgggaaatggagtaaaacaatggtgggatttgggcctgaggatgatcattttgtcgcagaactgacttacaattatggcgtcggagactacaagcttggcaatgactttatgggaatcacgctcgcttctagccaggctgtcagcaacgccaggaagctggagtggccactgacggaagttgcagaaggtgtttttgaaaccgaggccccgggaggatataagttctatttgcagaatcgcagtctgcctcagtcagatcctgtattaaaagtaactctagcagtgtctgatcttcaaaagtccttgaactactggtgtaatctactgggaatgaaaatttatgaaaaagatgaagaaaagcaaagggctttgctgggctatgctgataaccagtgtaagctggagctacagggcgtcaagggtggggtggaccatgcagcagcttttggaagaattgccttctcttgcccccagaaagagttgccagacttagaagacttgatgaaaagggagaaccagaagattctgactcccctggtgagcctggacaccccagggaaagcaacagtacaggtggtcattctggccgaccctgacggacatgaaatttgctttgtcggggatgaagcatttcgagaactttctaagatggatccagagggaagcaaattgttggatgatgcaatggcagcagataaaagtgacgagtggtttgccaaacacaataaacccaaagcttcaggttaacggaagacatgatgcagagcaagcctctgtgattcctgcccagcacctgtgaggcctgacgtgtcagttcccaataaatgctcttctgatttgtttcccgtacaggcaaggaggcttgggtagtgcagatttgtgtatttcaatctttgaaagctctgatgtaatttagaaatgaaatccaatcatgagtccaggtagagaacgcctgctgtaatctacactgttgctgggactgcgcattctgtatataactgtgttggatgagtgacagatgattgtccagactaggacagcggcatgaacatgactttggttgggattgcggatagttagggttacctctgaatcgtgtagcttttatgagagcagctgtgcaagtgaatccacattaatgccttgtcgtggtgccattcccagcgcctgacgatacgctcttctattgtcttattctggcaggttttgacgttttaaattttttaaagaaattttattccttggaccaaaaggtttggttaaccacccccctcttacttgctttcacattttgagtgtccagaggaaacagaaaggaatgagtgtgtgacgttgctgcacgcctgactctgtgcgagcttctttctgtgtatatattttgttttatttttttccgtgtatatttttaatcccgacagaacatcatgtgagatttctttaaaatggattaaacgatttcttcagcctgaaaaaaaaggttttgaaaatgttttcttgtagttttgtttggttctaaacaacaaataggttttaatcactcgaaatggaattatattgtgtattcattgaataaattttttttgaaagtaagcttctg

SEQ ID NO: 283574 - DNA, 3385 bp, Homo sapiens
tttttgaggttttattatttttatttatttttgagactgagtcttgctctgtcatcaggctggagtgcagtggctcactgcaacctgggtgacagaacaagacaaaaaaaaaaaaaagatacactgggtaatcactaacccattattccttgtggcgttacgaggtcggaccaatccttgatatcctcaaatttcaccttaatgaggctgacacctttcagcttatcgactggcaactcctttaggtattctagacggctaaagaagaacatttttggcacagctccagccttgagagtgtctgaaatgagcctgcgaccttccagcaggatcttcccttgtttttcccgaaatggcctggactttactattgtcattacactggctcagcctcctgtccccgggataagctttatcgtagcgaagcccagactcttcccaggtgctgggagcgcgggatgcggactcctcgagcggttgtttctctcgttgctcctgggcactggcctcagatggtgccttgcggggctgcttcccaggagcgcgcttctgttccaccacctctccggaaggacacaccactttcactgggctccgccgcagcgcacggacccagcgcctcgctcaaggtcccaagcctggaccacctgcagcaacggtcgcacgacaaacctcgcgggtctcaccagcgccgccatgttccctgagacccgggctgcgtcacgaaagcgcgccgtcgggcataggtgacgtcacggcccgtggcgcccttcgtggactgggctgtacggtgcgcgtgacggctgcgtgcggcgggaatcatggctgctcgcagagctctgcacttcgtattcaaagtgggaaaccgcttccagacggcgcgtttctatcgggacgtcctggggatgaaggttctgcggcatgaggaatttgaagaaggctgcaaagctgcctgtaatgggccttatgatgggaaatggagtaaaacaatggtgggatttgggcctgaggatgatcattttgtcgcagaactgacttacaattatggcgtcggagactacaagcttggcaatgactttatgggaatcacgctcgcttctagccaggctgtcagcaacgccaggaagctggagtggccactgacggaagttgcagaaggtgtttttgaaaccgaggccccgggaggatataagttctatttgcagaatcgcagtctgcctcagtcagatcctgtattaaaagtaactctagcagtgtctgatcttcaaaagtccttgaactactggtgtaatctactgggaatgaaaatttatgaaaaagatgaagaaaagcaaagggctttgctgggctatgctgataaccaggtgagcaatcttggagaagaataacctgttactttgaatttggcttgtaaacgaagcttataaatggcttataacctttataaatgaagttaacatgaaggttgttcccatagtttcttcacagtgattcaatatttatatagataaacagaagaaaataagtgataaccttaccacccagatattaccttgtttatatttggggatatatctcttcagaagtggaattgcttaatccaagagattgaatggatttaatgcaagatctttttcatcttctttttctaataacccagcgtttgagcacgatttagtccttgcactttgaccctgcaattctactcctaggaattattttacagatgtgctcaacatacatcggcacaaagaagtgtgtgcaaggttatctgctgcagcattgtctgtaatcacaatgtgtaagaatttcagtgtcctatagattagagacatatttcagtaatttacggctcattcatggaatggattactatgtcgctagcaaaaagattgaggcaaatctttatgtattgacatggtaacattaagtggagaaaaacaaggaacagaataatttgtaaattataccaccatttgtgtaaaaaaaaaaacatagatgcgtgcagtgcttctagaaggatacacaggaaactgtggactagttgtctctggggtgagagtaggatagagactcagtttttactttattcctttagtatataatatttgaatttttctaccacatacgtgtaatgaatgtataacctgttccaaaaaataaccccctttcctatttcagtgtaagctggagctacagggcgtcaagggtggggtggaccatgcagcagcttttggaagaattgccttctcttgcccccagaaagagttgccagacttagaagacttgatgaaaagggagaaccagaagattctgactcccctggtgagcctggacaccccagggaaagcaacagtacaggtggtcattctggccgaccctgacggacatgaaatttgctttgtcggggatgaagcatttcgagaactttctaagatggatccagagggaagcaaattgttggatgatgcaatggcagcagataaaagtgacgagtggtttgccaaacacaataaacccaaagcttcaggttaacggaagacatgatgcagagcaagcctctgtgattcctgcccagcacctgtgaggcctgacgtgtcagttcccaataaatgctcttctgatttgtttcccgtacaggcaaggaggcttgggtagtgcagatttgtgtatttcaatctttgaaagctctgatgtaatttagaaatgaaatccaatcatgagtccaggtagagaacgcctgctgtaatctacactgttgctgggactgcgcattctgtatataactgtgttggatgagtgacagatgattgtccagactaggacagcggcatgaacatgactttggttgggattgcggatagttagggttacctctgaatcgtgtagcttttatgagagcagctgtgcaagtgaatccacattaatgccttgtcgtggtgccattcccagcgcctgacgatacgctcttctattgtcttattctggcaggttttgacgttttaaattttttaaagaaattttattccttggaccaaaaggtttggttaaccacccccctcttacttgctttcacattttgagtgtccagaggaaacagaaaggaatgagtgtgtgacgttgctgcacgcctgactctgtgcgagcttctttctgtgtatatattttgttttatttttttccgtgtatatttttaatcccgacagaacatcatgtgagatttctttaaaatggattaaacgatttcttcagcctgaaaaaaaaggttttgaaaatgttttcttgtagttttgtttggttctaaacaacaaataggttttaatcactcgaaatggaattatattgtgtattcattgaataaattttttttgaaagtaagcttctg

SEQ ID NO: 283575 - DNA, 1929 bp, Homo sapiens
ggcgagttgccgttggggatcataggccttggagaagggcctaacacgattagtccccgcggtgtgcccacgcacgtcctttcatttaagccactcgtaaacgtttattgagccccgcccttgtggagcttaccgtctaccggaaaagacggtggagtcttgctctgtcgccaggctggagtgcagtggcgcgatctcggctcactgtaagctcagcctcccgggttcacaccattctcctgcctcagcctcccgagtagctgggaccacaggttctgcggcatgaggaatttgaagaaggctgcaaagctgcctgtaatgggccttatgatgggaaatggagtaaaacaatggtgggatttgggcctgaggatgatcattttgtcgcagaactgacttacaattatggcgtcggagactacaagcttggcaatgactttatgggaatcacgctcgcttctagccaggctgtcagcaacgccaggaagctggagtggccactgacggaagttgcagaaggtgtttttgaaaccgaggccccgggaggatataagttctatttgcagaatcgcagtctgcctcagtcagatcctgtattaaaagtaactctagcagtgtctgatcttcaaaagtccttgaactactggtgtaatctactgggaatgaaaatttatgaaaaagatgaagaaaagcaaagggctttgctgggctatgctgataaccagtgtaagctggagctacagggcgtcaagggtggggtggaccatgcagcagcttttggaagaattgccttctcttgcccccagaaagagttgccagacttagaagacttgatgaaaagggagaaccagaagattctgactcccctggtgagcctggacaccccagggaaagcaacagtacaggtggtcattctggccgaccctgacggacatgaaatttgctttgtcggggatgaagcatttcgagaactttctaagatggatccagagggaagcaaattgttggatgatgcaatggcagcagataaaagtgacgagtggtttgccaaacacaataaacccaaagcttcaggttaacggaagacatgatgcagagcaagcctctgtgattcctgcccagcacctgtgaggcctgacgtgtcagttcccaataaatgctcttctgatttgtttcccgtacaggcaaggaggcttgggtagtgcagatttgtgtatttcaatctttgaaagctctgatgtaatttagaaatgaaatccaatcatgagtccaggtagagaacgcctgctgtaatctacactgttgctgggactgcgcattctgtatataactgtgttggatgagtgacagatgattgtccagactaggacagcggcatgaacatgactttggttgggattgcggatagttagggttacctctgaatcgtgtagcttttatgagagcagctgtgcaagtgaatccacattaatgccttgtcgtggtgccattcccagcgcctgacgatacgctcttctattgtcttattctggcaggttttgacgttttaaattttttaaagaaattttattccttggaccaaaaggtttggttaaccacccccctcttacttgctttcacattttgagtgtccagaggaaacagaaaggaatgagtgtgtgacgttgctgcacgcctgactctgtgcgagcttctttctgtgtatatattttgttttatttttttccgtgtatatttttaatcccgacagaacatcatgtgagatttctttaaaatggattaaacgatttcttcagcctgaaaaaaaaggttttgaaaatgttttcttgtagttttgtttggttctaaacaacaaataggttttaatcactcgaaatggaattatattgtgtattcattgaataaattttttttgaaagtaagcttctg

SEQ ID NO: 283576 - DNA, 2117 bp, Homo sapiens
ttttttttgagatggagtcttgctctgtcgcccaggctggagtgcagtggcaccatcttggctcacttcaacctccgcccccaaggttcaagtgattctcctgcctcagcagtccacccaccttgatctcccaaagtgctggtattataggcgtgagtcactgtgcccggcccaaatcagacttctttaatgctgaaggccacactttttcccactgcatagcactgcttaccaatctaaatagatttcacaactgatttggtagcctgacccttggtgtcaagctgttcgtccttccactgcttctatcctgggagaagtgtaaagctcatttgcttttgttcttttacaagtaaagcttataaatgataatgtttgtgttttgacattttagtctgtgctaaagacgctgtgagcagtactagcaacacttcacaatttattctaaatctcacaccaggttctgcggcatgaggaatttgaagaaggctgcaaagctgcctgtaatgggccttatgatgggaaatggagtaaaacaatggtgggatttgggcctgaggatgatcattttgtcgcagaactgacttacaattatggcgtcggagactacaagcttggcaatgactttatgggaatcacgctcgcttctagccaggctgtcagcaacgccaggaagctggagtggccactgacggaagttgcagaaggtgtttttgaaaccgaggccccgggaggatataagttctatttgcagaatcgcagtctgcctcagtcagatcctgtattaaaagtaactctagcagtgtctgatcttcaaaagtccttgaactactggtgtaatctactgggaatgaaaatttatgaaaaagatgaagaaaagcaaagggctttgctgggctatgctgataaccagtgtaagctggagctacagggcgtcaagggtggggtggaccatgcagcagcttttggaagaattgccttctcttgcccccagaaagagttgccagacttagaagacttgatgaaaagggagaaccagaagattctgactcccctggtgagcctggacaccccagggaaagcaacagtacaggtggtcattctggccgaccctgacggacatgaaatttgctttgtcggggatgaagcatttcgagaactttctaagatggatccagagggaagcaaattgttggatgatgcaatggcagcagataaaagtgacgagtggtttgccaaacacaataaacccaaagcttcaggttaacggaagacatgatgcagagcaagcctctgtgattcctgcccagcacctgtgaggcctgacgtgtcagttcccaataaatgctcttctgatttgtttcccgtacaggcaaggaggcttgggtagtgcagatttgtgtatttcaatctttgaaagctctgatgtaatttagaaatgaaatccaatcatgagtccaggtagagaacgcctgctgtaatctacactgttgctgggactgcgcattctgtatataactgtgttggatgagtgacagatgattgtccagactaggacagcggcatgaacatgactttggttgggattgcggatagttagggttacctctgaatcgtgtagcttttatgagagcagctgtgcaagtgaatccacattaatgccttgtcgtggtgccattcccagcgcctgacgatacgctcttctattgtcttattctggcaggttttgacgttttaaattttttaaagaaattttattccttggaccaaaaggtttggttaaccacccccctcttacttgctttcacattttgagtgtccagaggaaacagaaaggaatgagtgtgtgacgttgctgcacgcctgactctgtgcgagcttctttctgtgtatatattttgttttatttttttccgtgtatatttttaatcccgacagaacatcatgtgagatttctttaaaatggattaaacgatttcttcagcctgaaaaaaaaggttttgaaaatgttttcttgtagttttgtttggttctaaacaacaaataggttttaatcactcgaaatggaattatattgtgtattcattgaataaattttttttgaaagtaagcttctg

SEQ ID NO: 283577 - DNA, 1340 bp, Homo sapiens
ggctagtacgaggcgggtgttgaatcggccgaggctataaaagtccttgaactactggtgtaatctactgggaatgaaaatttatgaaaaagatgaagaaaagcaaagggctttgctgggctatgctgataaccagtgtaagctggagctacagggcgtcaagggtggggtggaccatgcagcagcttttggaagaattgccttctcttgcccccagaaagagttgccagacttagaagacttgatgaaaagggagaaccagaagattctgactcccctggtgagcctggacaccccagggaaagcaacagtacaggtggtcattctggccgaccctgacggacatgaaatttgctttgtcggggatgaagcatttcgagaactttctaagatggatccagagggaagcaaattgttggatgatgcaatggcagcagataaaagtgacgagtggtttgccaaacacaataaacccaaagcttcaggttaacggaagacatgatgcagagcaagcctctgtgattcctgcccagcacctgtgaggcctgacgtgtcagttcccaataaatgctcttctgatttgtttcccgtacaggcaaggaggcttgggtagtgcagatttgtgtatttcaatctttgaaagctctgatgtaatttagaaatgaaatccaatcatgagtccaggtagagaacgcctgctgtaatctacactgttgctgggactgcgcattctgtatataactgtgttggatgagtgacagatgattgtccagactaggacagcggcatgaacatgactttggttgggattgcggatagttagggttacctctgaatcgtgtagcttttatgagagcagctgtgcaagtgaatccacattaatgccttgtcgtggtgccattcccagcgcctgacgatacgctcttctattgtcttattctggcaggttttgacgttttaaattttttaaagaaattttattccttggaccaaaaggtttggttaaccacccccctcttacttgctttcacattttgagtgtccagaggaaacagaaaggaatgagtgtgtgacgttgctgcacgcctgactctgtgcgagcttctttctgtgtatatattttgttttatttttttccgtgtatatttttaatcccgacagaacatcatgtgagatttctttaaaatggattaaacgatttcttcagcctgaaaaaaaaggttttgaaaatgttttcttgtagttttgtttggttctaaacaacaaataggttttaatcactcgaaatggaattatattgtgtattcattgaataaattttttttgaaagtaagcttctg

SEQ ID NO: 283578 - DNA, 3520 bp, Homo sapiens
tttttgaggttttattatttttatttatttttgagactgagtcttgctctgtcatcaggctggagtgcagtggctcactgcaacctgggtgacagaacaagacaaaaaaaaaaaaaagatacactgggtaatcactaacccattattccttgtggcgttacgaggtcggaccaatccttgatatcctcaaatttcaccttaatgaggctgacacctttcagcttatcgactggcaactcctttaggtattctagacggctaaagaagaacatttttggcacagctccagccttgagagtgtctgaaatgagcctgcgaccttccagcaggatcttcccttgtttttcccgaaatggcctggactttactattgtcattacactggctcagcctcctgtccccgggataagctttatcgtagcgaagcccagactcttcccaggtgctgggagcgcgggatgcggactcctcgagcggttgtttctctcgttgctcctgggcactggcctcagatggtgccttgcggggctgcttcccaggagcgcgcttctgttccaccacctctccggaaggacacaccactttcactgggctccgccgcagcgcacggacccagcgcctcgctcaaggtcccaagcctggaccacctgcagcaacggtcgcacgacaaacctcgcgggtctcaccagcgccgccatgttccctgagacccgggctgcgtcacgaaagcgcgccgtcgggcataggtgacgtcacggcccgtggcgcccttcgtggactgggctgtacggtgcgcgtgacggctgcgtgcggcgggaatcatggctgctcgcagagctctgcacttcgtattcaaagtgggaaaccgcttccagacggcgcgtttctatcgggacgtcctggggatgaaggttctgcggcatgaggaatttgaagaaggctgcaaagctgcctgtaatgggccttatgatgggaaatggagtaaaacaatggtgggatttgggcctgaggatgatcattttgtcgcagaactgacttacaattatggcgtcggagactacaagcttggcaatgactttatgggaatcacgctcgcttctagccaggctgtcagcaacgccaggaagctggagtggccactgacggaagttgcagaaggtgtttttgaaaccgaggccccgggaggatataagttctatttgcagaatcgcagtctgcctcagtcagatcctgtattaaaagtaactctagcagtgtctgatcttcaaaagtccttgaactactggtgtaatctactgggaatgaaaatttatgaaaaagatgaagaaaagcaaagggctttgctgggctatgctgataaccaggtgagcaatcttggagaagaataacctgttactttgaatttggcttgtaaacgaagcttataaatggcttataacctttataaatgaagttaacatgaaggttgttcccatagtttcttcacagtgattcaatatttatatagataaacagaagaaaataagtgataaccttaccacccagatattaccttgtttatatttggggatatatctcttcagaagtggaattgcttaatccaagagattgaatggatttaatgcaagatctttttcatcttctttttctaataacccagcgtttgagcacgatttagtccttgcactttgaccctgcaattctactcctaggaattattttacagatgtgctcaacatacatcggcacaaagaagtgtgtgcaaggttatctgctgcagcattgtctgtaatcacaatgtgtaagaatttcagtgtcctatagattagagacatatttcagtaatttacggctcattcatggaatggattactatgtcgctagcaaaaagattgaggcaaatctttatgtattgacatggtaacattaagtggagaaaaacaaggaacagaataatttgtaaattataccaccatttgtgtaaaaaaaaaaacatagatgcgtgcagtgcttctagaaggatacacaggaaactgtggactagttgtctctggggtgagagtaggatagagactcagtttttactttattcctttagtatataatatttgaatttttctaccacatacgtgtaatgaatgtataacctgttccaaaaaataaccccctttcctatttcagtgtaagctggagctacagggcgtcaagggtggggtggaccatgcagcagcttttggaagaattgccttctcttgcccccagaaagaggtaacgcttgataccagatcgtttgagctttctgactagctagttcaacccagctaagaactttgtccttcccttcttgaggtcctttttgattgtggctttagtatcaagttcagcagttgtttcaagagcagctgagataataaattcaaacaaatggcgccttggttctttatggtatctgatactcctctaggactgacgagggccgtgtcctgagtagtgtgtgacccctggctcacgttgcctctgttttcctcaagttgccagacttagaagacttgatgaaaagggagaaccagaagattctgactcccctggtgagcctggacaccccagggaaagcaacagtacaggtggtcattctggccgaccctgacggacatgaaatttgctttgtcggggatgaagcatttcgagaactttctaagatggatccagagggaagcaaattgttggatgatgcaatggcagcagataaaagtgacgagtggtttgccaaacacaataaacccaaagcttcaggttaacggaagacatgatgcagagcaagcctctgtgattcctgcccagcacctgtgaggcctgacgtgtcagttcccaataaatgctcttctgatttgtttcccgtacaggcaaggaggcttgggtagtgcagatttgtgtatttcaatctttgaaagctctgatgtaatttagaaatgaaatccaatcatgagtccaggtagagaacgcctgctgtaatctacactgttgctgggactgcgcattctgtatataactgtgttggatgagtgacagatgattgtccagactaggacagcggcatgaacatgactttggttgggattgcggatagttagggttacctctgaatcgtgtagcttttatgagagcagctgtgcaagtgaatccacattaatgccttgtcgtggtgccattcccagcgcctgacgatacgctcttctattgtcttattctggcaggttttgacgttttaaattttttaaagaaattttattccttggaccaaaaggtttggttaaccacccccctcttacttgctttcacattttgagtgtccagaggaaacagaaaggaatgagtgtgtgacgttgctgcacgcctgactctgtgcgagcttctttctgtgtatatattttgttttatttttttccgtgtatatttttaatcccgacagaacatcatgtgagatttctttaaaatggattaaacgatttcttcagcctga

SEQ ID NO: 283579 - DNA, 1643 bp, Homo sapiens
tttttgaggttttattatttttatttatttttgagactgagtcttgctctgtcatcaggctggagtgcagtggctcactgcaacctgggtgacagaacaagacaaaaaaaaaaaaaagatacactgggtaatcactaacccattattccttgtggcgttacgaggtcggaccaatccttgatatcctcaaatttcaccttaatgaggctgacacctttcagcttatcgactggcaactcctttaggtattctagacggctaaagaagaacatttttggcacagctccagccttgagagtgtctgaaatgagcctgcgaccttccagcaggatcttcccttgtttttcccgaaatggcctggactttactattgtcattacactggctcagcctcctgtccccgggataagctttatcgtagcgaagcccagactcttcccaggtgctgggagcgcgggatgcggactcctcgagcggttgtttctctcgttgctcctgggcactggcctcagatggtgccttgcggggctgcttcccaggagcgcgcttctgttccaccacctctccggaaggacacaccactttcactgggctccgccgcagcgcacggacccagcgcctcgctcaaggtcccaagcctggaccacctgcagcaacggtcgcacgacaaacctcgcgggtctcaccagcgccgccatgttccctgagacccgggctgcgtcacgaaagcgcgccgtcgggcataggtgacgtcacggcccgtggcgcccttcgtggactgggctgtacggtgcgcgtgacggctgcgtgcggcgggaatcatggctgctcgcagagctctgcacttcgtattcaaagtgggaaaccgcttccagacggcgcgtttctatcgggacgtcctggggatgaaggttctgcggcatgaggaatttgaagaaggctgcaaagctgcctgtaatgggccttatgatgggaaatggagtaaaacaatggtgggatttgggcctgaggatgatcattttgtcgcagaactgacttacaattatggcgtcggagactacaagcttggcaatgactttatgggaatcacgctcgcttctagccaggctgtcagcaacgccaggaagctggagtggccactgacggaagttgcagaaggtgtttttgaaaccgaggccccgggaggatataagttctatttgcagaatcgcagtctgcctcagtcagatcctgtattaaaagtaactctagcagtgtctgatcttcaaaagtccttgaactactggtgtaatctactggcaaaaaaaaaaaaaaaaaaaaaaaaatttgtggggggcgcctgggcccgaaaaagttttttaaaccacacttcggttggggcgggcccagagttaggggactgggcaacggggctccaaggagaaccgggcaggaatggggcggcttccccaataaaaacgcccggggaccggcggtccgacaatccgtgggtcggcgctccggcctaccagggcagcgatcgtatagcccgccgcgtggggtgagacagaagcgagacagacaaaacgaagagacagagaaaacaaccccacaaaaaagcacgaagacaaaaacacaagaggacaaaacaaaaacaagaaaca

SEQ ID NO: 283580 - DNA, 1237 bp, Homo sapiens
tttttgaggttttattatttttatttatttttgagactgagtcttgctctgtcatcaggctggagtgcagtggctcactgcaacctgggtgacagaacaagacaaaaaaaaaaaaaagatacactgggtaatcactaacccattattccttgtggcgttacgaggtcggaccaatccttgatatcctcaaatttcaccttaatgaggctgacacctttcagcttatcgactggcaactcctttaggtattctagacggctaaagaagaacatttttggcacagctccagccttgagagtgtctgaaatgagcctgcgaccttccagcaggatcttcccttgtttttcccgaaatggcctggactttactattgtcattacactggctcagcctcctgtccccgggataagctttatcgtagcgaagcccagactcttcccaggtgctgggagcgcgggatgcggactcctcgagcggttgtttctctcgttgctcctgggcactggcctcagatggtgccttgcggggctgcttcccaggagcgcgcttctgttccaccacctctccggaaggacacaccactttcactgggctccgccgcagcgcacggacccagcgcctcgctcaaggtcccaagcctggaccacctgcagcaacggtcgcacgacaaacctcgcgggtctcaccagcgccgccatgttccctgagacccgggctgcgtcacgaaagcgcgccgtcgggcataggtgacgtcacggcccgtggcgcccttcgtggactgggctgtacggtgcgcgtgacggctgcgtgcggcgggaatcatggctgctcgcagagctctgcacttcgtattcaaagtgggaaaccgcttccagacggcgcgtttctatcgggacgtcctggggatgaaggttctgcggcatgaggaatttgaagaaggctgcaaagctgcctgtaatgggtatgataccttgtttcttaaaatctcctttaggctctgactacacccggataacagaagacagtttctcaaagtgagtataaagcagtggaattaattaaggaggcagtaaattagggaggcaacttcaggagcgtcgggaacacatactgtttctctgcactctcatgagtataaagcagtggaattaattaagaaggcagtaaattagggaggcaacttcaggagcgtcgggaacacatttctctgcactctcatacaacacctgtgggacac

SEQ ID NO: 283581 - DNA, 2723 bp, Homo sapiens
tttttgaggttttattatttttatttatttttgagactgagtcttgctctgtcatcaggctggagtgcagtggctcactgcaacctgggtgacagaacaagacaaaaaaaaaaaaaagatacactgggtaatcactaacccattattccttgtggcgttacgaggtcggaccaatccttgatatcctcaaatttcaccttaatgaggctgacacctttcagcttatcgactggcaactcctttaggtattctagacggctaaagaagaacatttttggcacagctccagccttgagagtgtctgaaatgagcctgcgaccttccagcaggatcttcccttgtttttcccgaaatggcctggactttactattgtcattacactggctcagcctcctgtccccgggataagctttatcgtagcgaagcccagactcttcccaggtgctgggagcgcgggatgcggactcctcgagcggttgtttctctcgttgctcctgggcactggcctcagatggtgccttgcggggctgcttcccaggagcgcgcttctgttccaccacctctccggaaggacacaccactttcactgggctccgccgcagcgcacggacccagcgcctcgctcaaggtcccaagcctggaccacctgcagcaacggtcgcacgacaaacctcgcgggtctcaccagcgccgccatgttccctgagacccgggctgcgtcacgaaagcgcgccgtcgggcataggtgacgtcacggcccgtggcgcccttcgtggactgggctgtacggtgcgcgtgacggctgcgtgcggcgggaatcatggctgctcgcagagctctgcacttcgtattcaaagtgggaaaccgcttccagacggcgcgtttctatcgggacgtcctggggatgaaggttctgcggcatgaggaatttgaagaaggctgcaaagctgcctgtaatgggccttatgatgggaaatggagtaaaacaatggtgggatttgggcctgaggatgatcattttgtcgcagaactgacttacaattatggcgtcggagactacaagcttggcaatgactttatgggaatcacgctcgcttctagccaggctgtcagcaacgccaggaagctggagtggccactgacggaagttgcagaaggtgtttttgaaaccgaggccccgggaggatataagttctatttgcagaatcgcagtctgcctcagtcagatcctgtattaaaagtaactctagcagtgtctgatcttcaaaagtccttgaactactggtgtaatctactgggaatgaaaatttatgaaaaagatgaagaaaagcaaagggctttgctgggctatgctgataaccagtgtaagctggagctacagggcgtcaagggtggggtggaccatgcagcagcttttggaagaattgccttctcttgcccccagaaagagttgccagacttagaagacttgatgaaaagggagaaccagaagattctgactcccctggtgagcctggacaccccagggaaagcaacagtacaggtggtcattctggccgaccctgacggacatgaaatttgctttgtcggggatgaagcatttcgagaactttctaagatggatccagagggaagcaaattgttggatgatgcaatggcagcagataaaagtgacgagtggtttgccaaacacaataaacccaaagcttcaggttaacggaagacatgatgcagagcaagcctctgtgattcctgcccagcacctgtgaggcctgacgtgtcagttcccaataaatgctcttctgatttgtttcccgtacaggcaaggaggcttgggtagtgcagatttgtgtatttcaatctttgaaagctctgatgtaatttagaaatgaaatccaatcatgagtccaggtagagaacgcctgctgtaatctacactgttgctgggactgcgcattctgtatataactgtgttggatgagtgacagatgattgtccagactaggacagcggcatgaacatgactttggttgggattgcggatagttagggttacctctgaatcgtgtagcttttatgagagcagctgtgcaagtgaatccacattaatgccttgtcgtggtgccattcccagcgcctgacgatacgctcttctattgtcttattctggcaggttttgacgttttaaattttttaaagaaattttattccttggaccaaaaggtttggttaaccacccccctcttacttgctttcacattttgagtgtccagaggaaacagaaaggaatgagtgtgtgacgttgctgcacgcctgactctgtgcgagcttctttctgtgtatatattttgttttatttttttccgtgtatatttttaatcccgacagaacatcatgtgagatttctttaaaatggattaaacgatttcttcagcctgaaaaaaaaggttttgaaaatgttttcttgtagttttgtttggttctaaacaacaaataggttttaatcactcgaaatggaattatattgtgtattcattgaataaattttttttgaaagtaagcttctgaaatcaagctgtgataccagtctctaagtctcatcatgtaaagtggtggccaggttcagatttttaaaaataaacttaggagattggaagggattgactcagaggatcctggttcccaaagaacacatagagaattacttgtaaatcgtaacctc

SEQ ID NO: 283582 - DNA, 2568 bp, Homo sapiens
tttttgaggttttattatttttatttatttttgagactgagtcttgctctgtcatcaggctggagtgcagtggctcactgcaacctgggtgacagaacaagacaaaaaaaaaaaaaagatacactgggtaatcactaacccattattccttgtggcgttacgaggtcggaccaatccttgatatcctcaaatttcaccttaatgaggctgacacctttcagcttatcgactggcaactcctttaggtattctagacggctaaagaagaacatttttggcacagctccagccttgagagtgtctgaaatgagcctgcgaccttccagcaggatcttcccttgtttttcccgaaatggcctggactttactattgtcattacactggctcagcctcctgtccccgggataagctttatcgtagcgaagcccagactcttcccaggtgctgggagcgcgggatgcggactcctcgagcggttgtttctctcgttgctcctgggcactggcctcagatggtgccttgcggggctgcttcccaggagcgcgcttctgttccaccacctctccggaaggacacaccactttcactgggctccgccgcagcgcacggacccagcgcctcgctcaaggtcccaagcctggaccacctgcagcaacggtcgcacgacaaacctcgcgggtctcaccagcgccgccatgttccctgagacccgggctgcgtcacgaaagcgcgccgtcgggcataggtgacgtcacggcccgtggcgcccttcgtggactgggctgtacggtgcgcgtgacggctgcgtgcggcgggaatcatggctgctcgcagagctctgcacttcgtattcaaagtgggaaaccgcttccagacggcgcgtttctatcgggacgtcctggggatgaaggttctgcggcatgaggaatttgaagaaggctgcaaagctgcctgtaatgggccttatgatgggaaatggagtaaaacaatggtgggatttgggcctgaggatgatcattttgtcgcagaactgacttacaattatggcgtcggagactacaagcttggcaatgactttatgggaatcacgctcgcttctagccaggctgtcagcaacgccaggaagctggagtggccactgacggaagttgcagaaggtgtttttgaaaccgaggccccgggaggatataagttctatttgcagaatcgcagtctgcctcagtcagatcctgtattaaaagtaactctagcagtgtctgatcttcaaaagtccttgaactactggtgtaatctactgggaatgaaaatttatgaaaaagatgaagaaaagcaaagggctttgctgggctatgctgataaccagtgtaagctggagctacagggcgtcaagggtggggtggaccatgcagcagcttttggaagaattgccttctcttgcccccagaaagagttgccagacttagaagacttgatgaaaagggagaaccagaagattctgactcccctggtgagcctggacaccccagggaaagcaacagtacaggtggtcattctggccgaccctgacggacatgaaatttgctttgtcggggatgaagcatttcgagaactttctaagatggatccagagggaagcaaattgttggatgatgcaatggcagcagataaaagtgacgagtggtttgccaaacacaataaacccaaagcttcaggttaacggaagacatgatgcagagcaagcctctgtgattcctgcccagcacctgtgaggcctgacgtgtcagttcccaataaatgctcttctgatttgtttcccgtacaggcaaggaggcttgggtagtgcagatttgtgtatttcaatctttgaaagctctgatgtaatttagaaatgaaatccaatcatgagtccaggtagagaacgcctgctgtaatctacactgttgctgggactgcgcattctgtatataactgtgttggatgagtgacagatgattgtccagactaggacagcggcatgaacatgactttggttgggattgcggatagttagggttacctctgaatcgtgtagcttttatgagagcagctgtgcaagtgaatccacattaatgccttgtcgtggtgccattcccagcgcctgacgatacgctcttctattgtcttattctggcaggttttgacgttttaaattttttaaagaaattttattccttggaccaaaaggtttggttaaccacccccctcttacttgctttcacattttgagtgtccagaggaaacagaaaggaatgagtgtgtgacgttgctgcacgcctgactctgtgcgagcttctttctgtgtatatattttgttttatttttttccgtgtatatttttaatcccgacagaacatcatgtgagatttctttaaaatggattaaacgatttcttcagcctgaaaaaaaaggttttgaaaatgttttcttgtagttttgtttggttctaaacaacaaataggttttaatcactcgaaatggaattatattgtgtattcattgaataaattttttttgaaagtaagcttctg

SEQ ID NO: 283583 - DNA, 2507 bp, Homo sapiens
tttttgaggttttattatttttatttatttttgagactgagtcttgctctgtcatcaggctggagtgcagtggctcactgcaacctgggtgacagaacaagacaaaaaaaaaaaaaagatacactgggtaatcactaacccattattccttgtggcgttacgaggtcggaccaatccttgatatcctcaaatttcaccttaatgaggctgacacctttcagcttatcgactggcaactcctttaggtattctagacggctaaagaagaacatttttggcacagctccagccttgagagtgtctgaaatgagcctgcgaccttccagcaggatcttcccttgtttttcccgaaatggcctggactttactattgtcattacactggctcagcctcctgtccccgggataagctttatcgtagcgaagcccagactcttcccaggtgctgggagcgcgggatgcggactcctcgagcggttgtttctctcgttgctcctgggcactggcctcagatggtgccttgcggggctgcttcccaggagcgcgcttctgttccaccacctctccggaaggacacaccactttcactgggctccgccgcagcgcacggacccagcgcctcgctcaaggtcccaagcctggaccacctgcagcaacggtcgcacgacaaacctcgcgggtctcaccagcgccgccatgttccctgagacccgggctgcgtcacgaaagcgcgccgtcgggcataggtgacgtcacggcccgtggcgcccttcgtggactgggctgtacggtgcgcgtgacggctgcgtgcggcgggaatcatggctgctcgcagagctctgcacttcgtattcaaagtgggaaaccgcttccagacggcgcgtttctatcgggacgtcctggggatgaaggttctgcggcatgaggaatttgaagaaggctgcaaagctgcctgtaatgggccttatgatgggaaatggagtaaaacaatggtgggatttgggcctgaggatgatcattttgtcgcagaactgacttacaattatggcgtcggagactacaagcttggcaatgactttatgggaatcacgctcgcttctagccaggctgtcagcaacgccaggaagctggagtggccactgacggaagttgcagaaggtgtttttgaaaccgaggccccgggaggatataagttctatttgcagaatcgcagtctgcctcagtcagatcctgtattaaaagtaactctagcagtgtctgatcttcaaaagtccttgaactactggtgtaatctactgggaatgaaaatttatgaaaaagatgaagaaaagcaaagggctttgctgggctatgctgataaccagtgtaagctggagctacagggcgtcaagggtggggtggaccatgcagcagcttttggaagaattgccttctcttgcccccagaaagagttgccagacttagaagacttgatgaaaagggagaaccagaagattctgactcccctggtgagcctggacaccccagggaaagcaacagtacaggtggtcattctggccgaccctgacggacatgaaatttgctttgtcggggatgaagcatttcgagaactttctaagatggatccagagggaagcaaattgttggatgatgttaacggaagacatgatgcagagcaagcctctgtgattcctgcccagcacctgtgaggcctgacgtgtcagttcccaataaatgctcttctgatttgtttcccgtacaggcaaggaggcttgggtagtgcagatttgtgtatttcaatctttgaaagctctgatgtaatttagaaatgaaatccaatcatgagtccaggtagagaacgcctgctgtaatctacactgttgctgggactgcgcattctgtatataactgtgttggatgagtgacagatgattgtccagactaggacagcggcatgaacatgactttggttgggattgcggatagttagggttacctctgaatcgtgtagcttttatgagagcagctgtgcaagtgaatccacattaatgccttgtcgtggtgccattcccagcgcctgacgatacgctcttctattgtcttattctggcaggttttgacgttttaaattttttaaagaaattttattccttggaccaaaaggtttggttaaccacccccctcttacttgctttcacattttgagtgtccagaggaaacagaaaggaatgagtgtgtgacgttgctgcacgcctgactctgtgcgagcttctttctgtgtatatattttgttttatttttttccgtgtatatttttaatcccgacagaacatcatgtgagatttctttaaaatggattaaacgatttcttcagcctgaaaaaaaaggttttgaaaatgttttcttgtagttttgtttggttctaaacaacaaataggttttaatcactcgaaatggaattatattgtgtattcattgaataaattttttttgaaagtaagcttctg

SEQ ID NO: 283584 - DNA, 2445 bp, Homo sapiens
tttttgaggttttattatttttatttatttttgagactgagtcttgctctgtcatcaggctggagtgcagtggctcactgcaacctgggtgacagaacaagacaaaaaaaaaaaaaagatacactgggtaatcactaacccattattccttgtggcgttacgaggtcggaccaatccttgatatcctcaaatttcaccttaatgaggctgacacctttcagcttatcgactggcaactcctttaggtattctagacggctaaagaagaacatttttggcacagctccagccttgagagtgtctgaaatgagcctgcgaccttccagcaggatcttcccttgtttttcccgaaatggcctggactttactattgtcattacactggctcagcctcctgtccccgggataagctttatcgtagcgaagcccagactcttcccaggtgctgggagcgcgggatgcggactcctcgagcggttgtttctctcgttgctcctgggcactggcctcagatggtgccttgcggggctgcttcccaggagcgcgcttctgttccaccacctctccggaaggacacaccactttcactgggctccgccgcagcgcacggacccagcgcctcgctcaaggtcccaagcctggaccacctgcagcaacggtcgcacgacaaacctcgcgggtctcaccagcgccgccatgttccctgagacccgggctgcgtcacgaaagcgcgccgtcgggcataggtgacgtcacggcccgtggcgcccttcgtggactgggctgtacggtgcgcgtgacggctgcgtgcggcgggaatcatggctgctcgcagagctctgcacttcgtattcaaagtgggaaaccgcttccagacggcgcgtttctatcgggacgtcctggggatgaaggttctgcggcatgaggaatttgaagaaggctgcaaagctgcctgtaatgggccttatgatgggaaatggagtaaaacaatggtgggatttgggcctgaggatgatcattttgtcgcagaactgacttacaattatggcgtcggagactacaagcttggcaatgactttatgggaatcacgctcgcttctagccaggctgtcagcaacgccaggaagctggagtggccactgacggaagttgcagaaggtgtttttgaaaccgaggccccgggaggatataagttctatttgcagaatcgcagtctgcctcagtcagatcctgtattaaaagtaactctagcagtgtctgatcttcaaaagtccttgaactactggtgtaatctactgggaatgaaaatttatgaaaaagatgaagaaaagcaaagggctttgctgggctatgctgataaccagtgtaagctggagctacagggcgtcaagggtggggtggaccatgcagcagcttttggaagaattgccttctcttgcccccagaaagagttgccagacttagaagacttgatgaaaagggagaaccagaagattctgactcccctggtgagcctggacaccccagggaaagcaacagtacaggtggtcattctggccgaccctgacggacatgaaatttgctttgtcggggatgaagcatttcgagaactttctaagatggatccagagggaagcaaattgttggatgatgcaatggcagcagataaaagtgacgagtggtttgccaaacacaataaacccaaagcttcaggttaacggaagacatgatgcagagcaagcctctgtgattcctgcccagcacctgtgaggcctgacgtggtggagtgcagtggggcaccatcgtggctttctgcagccttgacctctggggctcaagagatcctcccacctcagcctcccgaatggctgggcccacagccacgtgccaccacacccagccaacgttttgatcttttgtagcgaccgtctcactgcgttgttcaggctgcaagctgttgtttcaaacagatgaagttggaaagttcttcagcttctccagagttgtttttttgaatcaaggggttgtggagcctacatgtaaatacaagtgtgccttgagttaaatctccgggaagacttagaacggccgtgttgccagagctctcctagttagcctgcaggactgtctgaagtccgtgtccgtctgacatgttaccggaattaacaaacctagggacggtgagtgctccttcatgtggctttctggctctctcacctgccactcagtgccgctgtgacttagcagccagagttttcaggagacctccaacgtgtccgttgaaattcagggtaagagttgagaagtttccctgtttgttctaagagttcttaccccaacctcaggggaaatcaatagtaaatttactctgacttcaatgataataaagaagtgcccttgcctcatcctctttatataaagcaatagagccacatggttcaaaaa

SEQ ID NO: 283585 - DNA, 2547 bp, Homo sapiens
ctgaaagttcagtcctctaatcatttgtctttctggtgaccagccccatcctgagtctatgtagaggccccactctaagtcacttcattagcataaactcaggtgtgactgaaaggggctcattatgaatataacaaaagatattcctatcaggaaattccagaggttttgggagctctgagacaggaaccagggacaatgaccagatatgtttcatattatgccacaaatgcaaataagtacatgctctagatgaagcagcggctttccagtatctttttttttttgagacagaatctcactttgtcacccaggtgggagtgcggggtcattatcctggctcactgcaacctctgtcttctgagttcaagcaattctcctccctcagcctccctagtacgtgggactatgggcatgtgccaccatgcccagctaatttttgtatttttagtagagacggggtttcaccatgttggccaggctggtctcgaactcctgacctcaggtgatcctcccgcctcggcctcccaaagtgctgggattacaggcctgagccaccacgcccgtccatctcttaagcttagtaccgtgacaagttggaacagtccaaggcctattaggaatttcatgcttgttgattgatagtcaaggaaataacaggtcagttggagaactgtctttaggattctgttccttgctttacagaaaaggtgaacaaatctttccttcaggtagatgctggatagtctttggagcttgtagtagggtcccatgagcactgcccacagctgctttctgtaccatctgaggtcatctcatccttaagagaacttttaggaccagacaggaatgctcatctctctgtgcccagtagttctctgggggtggcctgaggctgacttgtctgtagtcactgagttcatttacttttattttctaggccttatgatgggaaatggagtaaaacaatggtgggatttgggcctgaggatgatcattttgtcgcagaactgacttacaattatggcgtcggagactacaagcttggcaatgactttatgggaatcacgctcgcttctagccaggctgtcagcaacgccaggaagctggagtggccactgacggaagttgcagaaggtgtttttgaaaccgaggccccgggaggatataagttctatttgcagaatcgcagtctgcctcagtcagatcctgtattaaaagtaactctagcagtgtctgatcttcaaaagtccttgaactactggtgtaatctactgggaatgaaaatttatgaaaaagatgaagaaaagcaaagggctttgctgggctatgctgataaccagtgtaagctggagctacagggcgtcaagggtggggtggaccatgcagcagcttttggaagaattgccttctcttgcccccagaaagagttgccagacttagaagacttgatgaaaagggagaaccagaagattctgactcccctggtgagcctggacaccccagggaaagcaacagtacaggtggtcattctggccgaccctgacggacatgaaatttgctttgtcggggatgaagcatttcgagaactttctaagatggatccagagggaagcaaattgttggatgatgcaatggcagcagataaaagtgacgagtggtttgccaaacacaataaacccaaagcttcaggttaacggaagacatgatgcagagcaagcctctgtgattcctgcccagcacctgtgaggcctgacgtgtcagttcccaataaatgctcttctgatttgtttcccgtacaggcaaggaggcttgggtagtgcagatttgtgtatttcaatctttgaaagctctgatgtaatttagaaatgaaatccaatcatgagtccaggtagagaacgcctgctgtaatctacactgttgctgggactgcgcattctgtatataactgtgttggatgagtgacagatgattgtccagactaggacagcggcatgaacatgactttggttgggattgcggatagttagggttacctctgaatcgtgtagcttttatgagagcagctgtgcaagtgaatccacattaatgccttgtcgtggtgccattcccagcgcctgacgatacgctcttctattgtcttattctggcaggttttgacgttttaaattttttaaagaaattttattccttggaccaaaaggtttggttaaccacccccctcttacttgctttcacattttgagtgtccagaggaaacagaaaggaatgagtgtgtgacgttgctgcacgcctgactctgtgcgagcttctttctgtgtatatattttgttttatttttttccgtgtatatttttaatcccgacagaacatcatgtgagatttctttaaaatggattaaacgatttcttcagcctgaaaaaaaaggttttgaaaatgttttcttgtagttttgtttggttctaaacaacaaataggttttaatcactcgaaatggaattatattgtgtattcattgaataaattttttttgaaagtaagcttctg

SEQ ID NO: 283586 - DNA, 1735 bp, Homo sapiens
tttttgaggttttattatttttatttatttttgagactgagtcttgctctgtcatcaggctggagtgcagtggctcactgcaacctgggtgacagaacaagacaaaaaaaaaaaaaagatacactgggtaatcactaacccattattccttgtggcgttacgaggtcggaccaatccttgatatcctcaaatttcaccttaatgaggctgacacctttcagcttatcgactggcaactcctttaggtattctagacggctaaagaagaacatttttggcacagctccagccttgagagtgtctgaaatgagcctgcgaccttccagcaggatcttcccttgtttttcccgaaatggcctggactttactattgtcattacactggctcagcctcctgtccccgggataagctttatcgtagcgaagcccagactcttcccaggtgctgggagcgcgggatgcggactcctcgagcggttgtttctctcgttgctcctgggcactggcctcagatggtgccttgcggggctgcttcccaggagcgcgcttctgttccaccacctctccggaaggacacaccactttcactgggctccgccgcagcgcacggacccagcgcctcgctcaaggtcccaagcctggaccacctgcagcaacggtcgcacgacaaacctcgcgggtctcaccagcgccgccatgttccctgagacccgggctgcgtcacgaaagcgcgccgtcgggcataggtgacgtcacggcccgtggcgcccttcgtggactgggctgtacggtgcgcgtgacggctgcgtgcggcgggaatcatggctgctcgcagagctctgcacttcgtattcaaagtgggaaaccgcttccagacggcgcgtttctatcgggacgtcctggggatgaaggttctgcggcatgaggaatttgaagaaggctgcaaagctgcctgtaatgggccttatgatgggaaatggagtaaaacaatggtgggatttgggcctgaggatgatcattttgtcgcagaactgacttacaattatggcgtcggagactacaagcttggcaatgactttatgggaatcacgctcgcttctagccaggctgtcagcaacgccaggaagctggagtggccactgacggaagttgcagaaggtgtttttgaaaccgaggccccgggaggatataagttctatttgcagaatcgcagtctgcctcagtcagatcctgtattaaaagtaactctagcagtgtctgatcttcaaaagtccttgaactactggtgtaatctactgggaatgaaaatttatgaaaaagatgaagaaaagcaaagggctttgctgggctatgctgataaccagtgtaagctggagctacagggcgtcaagggtggggtggaccatgcagcagcttttggaagaattgccttctcttgcccccagaaagagttgccagacttagaagacttgatgaaaagggagaaccagaagattctgactcccctggtgagcctggacaccccagggaaagcaacagtacaggtggtcattctggccgaccctgacggacatgaaatttgctttgtcggggatgaagcatttcgagaactttctaagatggatccagagggaagcaaattgttggatgatgcagcattgtggtgtcctggcgataagtgacagggtgcccacaataacaatcggtggaattgagaccgttcccccctacggcc

SEQ ID NO: 283587 - DNA, 2043 bp, Homo sapiens
tttttgaggttttattatttttatttatttttgagactgagtcttgctctgtcatcaggctggagtgcagtggctcactgcaacctgggtgacagaacaagacaaaaaaaaaaaaaagatacactgggtaatcactaacccattattccttgtggcgttacgaggtcggaccaatccttgatatcctcaaatttcaccttaatgaggctgacacctttcagcttatcgactggcaactcctttaggtattctagacggctaaagaagaacatttttggcacagctccagccttgagagtgtctgaaatgagcctgcgaccttccagcaggatcttcccttgtttttcccgaaatggcctggactttactattgtcattacactggctcagcctcctgtccccgggataagctttatcgtagcgaagcccagactcttcccaggtgctgggagcgcgggatgcggactcctcgagcggttgtttctctcgttgctcctgggcactggcctcagatggtgccttgcggggctgcttcccaggagcgcgcttctgttccaccacctctccggaaggacacaccactttcactgggctccgccgcagcgcacggacccagcgcctcgctcaaggtcccaagcctggaccacctgcagcaacggtcgcacgacaaacctcgcgggtctcaccagcgccgccatgttccctgagacccgggctgcgtcacgaaagcgcgccgtcgggcataggtgacgtcacggcccgtggcgcccttcgtggactgggctgtacggtgcgcgtgacggctgcgtgcggcgggaatcatggctgctcgcagagctctgcacttcgtattcaaagtgggaaaccgcttccagacggcgcgtttctatcgggacgtcctggggatgaaggttctgcggcatgaggaatttgaagaaggctgcaaagctgcctgtaatgggccttatgatgggaaatggagtaaaacaatggtgggatttgggcctgaggatgatcattttgtcgcagaactgacttacaattatggcgtcggagactacaagcttggcaatgactttatgggaatcacgctcgcttctagccaggctgtcagcaacgccaggaagctggagtggccactgacggaagttgcagaaggtgtttttgaaaccgaggccccgggaggatataagttctatttgcagaatcgcagtctgcctcagtcagatcctgtattaaaagtaactctagcagtgtctgatcttcaaaagtccttgaactactggtgtaatctactgggaatgaaaatttatgaaaaagatgaagaaaagcaaagggctttgctgggctatgctgataaccagtgtaagctggagctacagggcgtcaagggtggggtggaccatgcagcagcttttggaagaattgccttctcttgcccccagaaagagttgccagacttagaagacttgatgaaaagggagaaccagaagattctgactcccctggtgagcctggacaccccagggaaagcaacagtacaggtggtcattctggccgaccctgacggcacatgaacaactcggccttagtcgggggcatgacgcactctcgagcaacctttctaagatggatcccagagggacgccactcgtcggcatgctgcacttggcagcagattcaacgtgacgagtggttggccaacaccaccaatcactgccctacagcgttcagggttaccgcggaacgacagttgatggcacgcagaacagacctctggtgatatccatggccccatgccaccacttgttgatcggggccacttgtacgctgtggttcaagcgtcatcgccgacagttatacctggcctccgtttcctggaacttgtgggctgtacaccggtatcacggggccacgggacaggcatctgtgcgctatcgtgtcgtagaacttcgcgggatactttccgagagctctcttgtgagcagcgctcctgtactgttaacatctctacgaaaactgcacaacgctccaatcaccgta

SEQ ID NO: 283588 - DNA, 1284 bp, Homo sapiens
tttttgaggttttattatttttatttatttttgagactgagtcttgctctgtcatcaggctggagtgcagtggctcactgcaacctgggtgacagaacaagacaaaaaaaaaaaaaagatacactgggtaatcactaacccattattccttgtggcgttacgaggtcggaccaatccttgatatcctcaaatttcaccttaatgaggctgacacctttcagcttatcgactggcaactcctttaggtattctagacggctaaagaagaacatttttggcacagctccagccttgagagtgtctgaaatgagcctgcgaccttccagcaggatcttcccttgtttttcccgaaatggcctggactttactattgtcattacactggctcagcctcctgtccccgggataagctttatcgtagcgaagcccagactcttcccaggtgctgggagcgcgggatgcggactcctcgagcggttgtttctctcgttgctcctgggcactggcctcagatggtgccttgcggggctgcttcccaggagcgcgcttctgttccaccacctctccggaaggacacaccactttcactgggctccgccgcagcgcacggacccagcgcctcgctcaaggtcccaagcctggaccacctgcagcaacggtcgcacgacaaacctcgcgggtctcaccagcgccgccatgttccctgagacccgggctgcgtcacgaaagcgcgccgtcgggcataggtgacgtcacggcccgtggcgcccttcgtggactgggctgtacggtgcgcgtgacggctgcgtgcggcgggaatcatggctgctcgcagagctctgcacttcgtattcaaagtgggaaaccgcttccagacggcgcgtttctatcgggacgtcctggggatgaaggttctgcggcatgaggaatttgaagaaggctgcaaagctgcctgtaatgggccttatgatgggaaatggagtaaaacaatggtgggatttgggcctgaggatgatcattttgtcgcagaactgacttacaattatggcgtcggagactacaagcttggcaatgactttatgggaatcacgctcgcttctagccaggctgtcagcaacgccaggaagctggagtggccactgacggaagttgcagaaggtgtttttgaaaccgaggccccgggaggatataagttctatttgcagaatcgcagtctgcctcagtcagatcctgtattaaaagtaactctagcagtgtctgattgaggcagactgcgattctgca

SEQ ID NO: 283589 - DNA, 407 bp, Homo sapiens
gctctgcacttcgtattcaaagtgggaaaccgcttccagacggcgcgtttctatcgggacgtcctggggatgaaggtgcaggccggggccgacaggggctggcgcgcgaggctggaaccggcgcccgagccggccctggcggagggaggggaaaatgggtgtgtcgtgaacctaagccggagggtgtccgaccttaggccctgcgcggtgttcagcttcaggagcgtggcgagttgccgttggggatcataggccttggagaagggcctaacacgattagtccccgcggtgtgcccacgcacgtcctttcatttaagccactcgtaaacgtttattgagccccgcccttgtggagcttaccgtctaccggaaaagacggtaaataaaatgttatataatgctttcta

SEQ ID NO: 283590 - DNA, 2812 bp, Homo sapiens
  misc_feature (215)..(215): n is a, c, g, or t
cggtgctcgaggcggaggggaggaggcggggaaggcgaaaggaggggttcggaggagagggttcgatctccgtacgcaccaggtggagagcgcgcgcctggggaaggaggcgtgtcgagtagcgggagggaagttgtagtacgggtggggagaaccacactaaagggagatgggggtgagcagttaaggaaccgcgagagcgccaggtagagagntgcccttaatgggggaacctggagaagagtgtgagcgtagtggggaagaagggagaagacaaataggttcgggaatgtgtctccgagggcgcgagcgggcgctaggacccggcgtcgaaaagatgaggctttggggctgtcggggcgcgcgctcccgttggtgacgcgggggtggcggaggtctccggccgggacgaagccccgcagggagtggatactcgacagccttcggcctccgctcgcttctccctgcgcgctttcctgctcccctttccggctacagccctggggtcgagctctggtcgaagcgcattccgcctctcctttggccctgcggcttcctttgcaacccgccgcccacccttgctctccgtggtttacccctgggctctgaggcctggtggtagcggccactgccgcggattggctgttgcggacccggggcggggcaggtgggagaggctcgttctccgcgggtttcgttgtgtttcgcgccatgtcgtttgctgagagcgggtggcggtcggctctgcggcgccgcggtcccggcaccccgggccctgtggctcggccatcgtattcctcctttactcagggggacagctggggtgaaggcgaagtcgacgaggaggagggatgcgaccaagtggcccgcgacctgcgggcggagttctcggctggggcgtggtcagagcccagaaagcgctcggtgctcccgccggacgggaacgggtcgcccgttctgcccgataagcgcaatggtatctttcccgcggccgcgggcagcagagcccagcctcggcggtggccggtccaggtcctctctattctctgctcgctgctcttcgccattcttctcgccttcctcctcgccatcgcctacttgatcgttaaagagttgcatgctgagaatttgaaaaatgaagatgatgtagacactggactattaggattctggactctacttataatatccctaactgctggattctcctgttgcagcttttcttggacagtgacttactttgattcttttgaaccaggaatgtttcctcctactcctctttcacctgccaggttcaagaaactgactggacattctttccacatgggctatagcatggcgattttgaatggcatcgtagctgctcttactgtagcatggtgcctcatgtaaacccacactggagcgatattgttggcaaaacttaatcatgattgttttgtaataacaagaaggagcatcactgtctactcagaagactgagaaacctgctgttcattatgtagttcagatatttatcacaatcatcctcattatggaagaccttttaaagcattgttttagaatgtctgagtattaagatacagattaattgggaatatctgagtattaagtactttcttcagagtataagatgtttacctcatctttttacttttgtgtgtgtagttctttcaagttgtaggaaacattttaatggaatttaaactcaaaaacttgaatacaggacaatgcttgccttttcatgtatgtactacattttttgctaagaaatactgatatttctgtttagttgagctagaaatacttcttatttatacatttaggaaagcaaataatgcctactactccgacttttatagaagctacttttaaatcagaatatttaatttttgatattcatataattaatagaagttgcatttatattttttatggggcatagttccttatgtgtttttttaatgtattttcatactacatactgaatttgtatgtttttaaaattgttacatctagacaactgtaaacattatttttttagctagtgcaaacctagtacctgccatttttactaatttttgtctttaaaaaaagcaaaaaagcacattgacctaagttgaaaattaagtaagtttatttttaacaaaaaatgcctgaaaaaagctaaattatttaagtcattaagatattgagaaaaaatttgaaatttttactatttctgtttccacaattccaaatatttatcttggtgtatatattgttactttaacagaacttgcattattttgtttttaataaatataaacatgaaatttttgtatgtgagaatgattgaactagtttgttcttaatctcaaaaatttagttaccaaagtagaaaaggtattttgatactagatattaaaaactacatatagttaatataattttataatttttgtaattaaatgtgcttctgtaattgtgatattttgttttctaagtaattaagccttaatttttcccctatgttactaaagacttttaatgtttagaaagttacctcagttttagaaagatggactacttacaaagctgttttccctggccataggaaaacttacaataagaaaccattaagtagtcaaactgcttattcaggctaagtgggaaatgaatttgtgcagtgtgttcccttaattatctactgaatgttgttaccgactaaacaaggtttctaaaagtctcgcatttcttttactattcaaaactctttggttggaaatgactaatactgctccaatttaaattatctgaaatgtgtgtgtgt

SEQ ID NO: 283591 - DNA, 1632 bp, Homo sapiens
ctcctaggatctatccaagagaaataagtgcagattcccaccacccaccgaagacgtgttcatagtacctgtatgtataggagccccaaactggaaacacccatcagtagtaaaatgggaaactgactggacattctttccacatgggctatagcatggcgattttgaatggcatcgtagctgctcttactgtagcatggtgcctcatgtaaacccacactggagcgatattgttggcaaaacttaatcatgattgttttgtaataacaagaaggagcatcactgtctactcagaagactgagaaacctgctgttcattatgtagttcagatatttatcacaatcatcctcattatggaagaccttttaaagcattgttttagaatgtctgagtattaagatacagattaattgggaatatctgagtattaagtactttcttcagagtataagatgtttacctcatctttttacttttgtgtgtgtagttctttcaagttgtaggaaacattttaatggaatttaaactcaaaaacttgaatacaggacaatgcttgccttttcatgtatgtactacattttttgctaagaaatactgatatttctgtttagttgagctagaaatacttcttatttatacatttaggaaagcaaataatgcctactactccgacttttatagaagctacttttaaatcagaatatttaatttttgatattcatataattaatagaagttgcatttatattttttatggggcatagttccttatgtgtttttttaatgtattttcatactacatactgaatttgtatgtttttaaaattgttacatctagacaactgtaaacattatttttttagctagtgcaaacctagtacctgccatttttactaatttttgtctttaaaaaaagcaaaaaagcacattgacctaagttgaaaattaagtaagtttatttttaacaaaaaatgcctgaaaaaagctaaattatttaagtcattaagatattgagaaaaaatttgaaatttttactatttctgtttccacaattccaaatatttatcttggtgtatatattgttactttaacagaacttgcattattttgtttttaataaatataaacatgaaatttttgtatgtgagaatgattgaactagtttgttcttaatctcaaaaatttagttaccaaagtagaaaaggtattttgatactagatattaaaaactacatatagttaatataattttataatttttgtaattaaatgtgcttctgtaattgtgatattttgttttctaagtaattaagccttaatttttcccctatgttactaaagacttttaatgtttagaaagttacctcagttttagaaagatggactacttacaaagctgttttccctggccataggaaaacttacaataagaaaccattaagtagtcaaactgcttattcaggctaagtgggaaatgaatttgtgcagtgtgttcccttaattatctactgaatgttgttaccgactaaacaaggtttctaaaagtctcgcatttcttttactattcaaaactctttggttggaaatgactaatactgctccaatttaaattatctgaaatgtgtgtgtgt

SEQ ID NO: 283592 - DNA, 1567 bp, Homo sapiens
ggtttatgtgttccgacgtattgaaagtcgaaagacacaaggtcaggaactccgaaactgactggacattctttccacatgggctatagcatggcgattttgaatggcatcgtagctgctcttactgtagcatggtgcctcatgtaaacccacactggagcgatattgttggcaaaacttaatcatgattgttttgtaataacaagaaggagcatcactgtctactcagaagactgagaaacctgctgttcattatgtagttcagatatttatcacaatcatcctcattatggaagaccttttaaagcattgttttagaatgtctgagtattaagatacagattaattgggaatatctgagtattaagtactttcttcagagtataagatgtttacctcatctttttacttttgtgtgtgtagttctttcaagttgtaggaaacattttaatggaatttaaactcaaaaacttgaatacaggacaatgcttgccttttcatgtatgtactacattttttgctaagaaatactgatatttctgtttagttgagctagaaatacttcttatttatacatttaggaaagcaaataatgcctactactccgacttttatagaagctacttttaaatcagaatatttaatttttgatattcatataattaatagaagttgcatttatattttttatggggcatagttccttatgtgtttttttaatgtattttcatactacatactgaatttgtatgtttttaaaattgttacatctagacaactgtaaacattatttttttagctagtgcaaacctagtacctgccatttttactaatttttgtctttaaaaaaagcaaaaaagcacattgacctaagttgaaaattaagtaagtttatttttaacaaaaaatgcctgaaaaaagctaaattatttaagtcattaagatattgagaaaaaatttgaaatttttactatttctgtttccacaattccaaatatttatcttggtgtatatattgttactttaacagaacttgcattattttgtttttaataaatataaacatgaaatttttgtatgtgagaatgattgaactagtttgttcttaatctcaaaaatttagttaccaaagtagaaaaggtattttgatactagatattaaaaactacatatagttaatataattttataatttttgtaattaaatgtgcttctgtaattgtgatattttgttttctaagtaattaagccttaatttttcccctatgttactaaagacttttaatgtttagaaagttacctcagttttagaaagatggactacttacaaagctgttttccctggccataggaaaacttacaataagaaaccattaagtagtcaaactgcttattcaggctaagtgggaaatgaatttgtgcagtgtgttcccttaattatctactgaatgttgttaccgactaaacaaggtttctaaaagtctcgcatttcttttactattcaaaactctttggttggaaatgactaatactgctccaatttaaattatctgaaatgtgtgtgtgt

SEQ ID NO: 283593 - DNA, 869 bp, Homo sapiens
cggtgctcgaggcggaggggaggaggcggggaaggcgaaaggaggggttcggaggagagggttcgatctccgtacgcaccagagttgcatgctgagaatttgaaaaatgaagatgatgtagacactggactattaggattctggactctacttataatatccctaactgctggattctcctgttgcagcttttcttggacagtgacttactttgattcttttgaaccaggaatgtttcctcctactcctctttcacctgccaggttcaagaaactgactggacattctttccacatgggctatagcatggcgattttgaatggcatcgtagctgctcttactgtagcatggtgcctcatgtaaacccacactggagcgatattgttggcaaaacttaatcatgattgttttgtaataacaagaaggagcatcactgtctactcagaagactgagaaacctgctgttcattatgtagttcagatatttatcacaatcatcctcattatggaagaccttttaaagcattgttttagaatgtctgagtattaagatacagattaattgggaatatctgagtattaagtactttcttcagagtataagatgtttacctcatctttttacttttgtgtgtgtagttctttcaagttgtaggaaacattttaatggaatttaaactcaaaaacttgaatacaggacaatgcttgccttttcatgtatgtactacatttgcggcaaacggagttggtctttagagaaattattattggaggaaagatacccataagtacagcaatgttttcaggttgttgtgcgtattcattaattgtattatttctaataatagataacattcgggagtgggtat

SEQ ID NO: 283594 - DNA, 2333 bp, Homo sapiens
  misc_feature (215)..(215): n is a, c, g, or t
cggtgctcgaggcggaggggaggaggcggggaaggcgaaaggaggggttcggaggagagggttcgatctccgtacgcaccaggtggagagcgcgcgcctggggaaggaggcgtgtcgagtagcgggagggaagttgtagtacgggtggggagaaccacactaaagggagatgggggtgagcagttaaggaaccgcgagagcgccaggtagagagntgcccttaatgggggaacctggagaagagtgtgagcgtagtggggaagaagggagaagacaaataggttcgggcccgggccctgtggctcggccatcgtattcctcctttactcagggggacagctggggtgaaggcgaagtcgacgaggaggagggatgcgaccaagtggcccgcgacctgcgggcggagttctcggctggggcgtggtcagagcccagaaagcgctcggtgctcccgccggacgggaacgggtcgcccgttctgcccgataagcgcaatggtatctttcccgcggccgcgggcagcagagcccagcctcggcggtggccggtccaggtcctctctattctctgctcgctgctcttcgccattcttctcgccttcctcctcgccatcgcctacttgatcgttaaagagttgcatgctgagaatttgaaaaatgaagatgatgtagacactggactattaggattctggactctacttataatatccctaactgctggattctcctgttgcagcttttcttggacagtgacttactttgattcttttgaaccaggaatgtttcctcctactcctctttcacctgccaggttcaagaaactgactggacattctttccacatgggctatagcatggcgattttgaatggcatcgtagctgctcttactgtagcatggtgcctcatgtaaacccacactggagcgatattgttggcaaaacttaatcatgattgttttgtaataacaagaaggagcatcactgtctactcagaagactgagaaacctgctgttcattatgtagttcagatatttatcacaatcatcctcattatggaagaccttttaaagcattgttttagaatgtctgagtattaagatacagattaattgggaatatctgagtattaagtactttcttcagagtataagatgtttacctcatctttttacttttgtgtgtgtagttctttcaagttgtaggaaacattttaatggaatttaaactcaaaaacttgaatacaggacaatgcttgccttttcatgtatgtactacattttttgctaagaaatactgatatttctgtttagttgagctagaaatacttcttatttatacatttaggaaagcaaataatgcctactactccgacttttatagaagctacttttaaatcagaatatttaatttttgatattcatataattaatagaagttgcatttatattttttatggggcatagttccttatgtgtttttttaatgtattttcatactacatactgaatttgtatgtttttaaaattgttacatctagacaactgtaaacattatttttttagctagtgcaaacctagtacctgccatttttactaatttttgtctttaaaaaaagcaaaaaagcacattgacctaagttgaaaattaagtaagtttatttttaacaaaaaatgcctgaaaaaagctaaattatttaagtcattaagatattgagaaaaaatttgaaatttttactatttctgtttccacaattccaaatatttatcttggtgtatatattgttactttaacagaacttgcattattttgtttttaataaatataaacatgaaatttttgtatgtgagaatgattgaactagtttgttcttaatctcaaaaatttagttaccaaagtagaaaaggtattttgatactagatattaaaaactacatatagttaatataattttataatttttgtaattaaatgtgcttctgtaattgtgatattttgttttctaagtaattaagccttaatttttcccctatgttactaaagacttttaatgtttagaaagttacctcagttttagaaagatggactacttacaaagctgttttccctggccataggaaaacttacaataagaaaccattaagtagtcaaactgcttattcaggctaagtgggaaatgaatttgtgcagtgtgttcccttaattatctactgaatgttgttaccgactaaacaaggtttctaaaagtctcgcatttcttttactattcaaaactctttggttggaaatgactaatactgctccaatttaaattatctgaaatgtgtgtgtgt

SEQ ID NO: 283595 - DNA, 3282 bp, Homo sapiens
  misc_feature (215)..(215): n is a, c, g, or t
cggtgctcgaggcggaggggaggaggcggggaaggcgaaaggaggggttcggaggagagggttcgatctccgtacgcaccaggtggagagcgcgcgcctggggaaggaggcgtgtcgagtagcgggagggaagttgtagtacgggtggggagaaccacactaaagggagatgggggtgagcagttaaggaaccgcgagagcgccaggtagagagntgcccttaatgggggaacctggagaagagtgtgagcgtagtggggaagaagggagaagacaaataggttcgggaatgtgtctccgagggcgcgagcgggcgctaggacccggcgtcgaaaagatgaggctttggggctgtcggggcgcgcgctcccgttggtgacgcgggggtggcggaggtctccggccgggacgaagccccgcagggagtggatactcgacagccttcggcctccgctcgcttctccctgcgcgctttcctgctcccctttccggctacagccctggggtcgagctctggtcgaagcgcattccgcctctcctttggccctgcggcttcctttgcaacccgccgcccacccttgctctccgtggtttacccctgggctctgaggcctggtggtagcggccactgccgcggattggctgttgcggacccggggcggggcaggtgggagaggctcgttctccgcgggtttcgttgtgtttcgcgccatgtcgtttgctgagagcgggtggcggtcggctctgcggcgccgcggtcccggcaccccgggccctgtggctcggccatcgtattcctcctttactcagggggacagctggggtgaaggcgaagtcgacgaggaggagggatgcgaccaagtggcccgcgacctgcgggcggagttctcggctggggcgtggtcagagcccagaaagcgctcggtgctcccgccggacgggaacgggtcgcccgttctgcccgataagcgcaatggtatctttcccgcggccgcgggcagcagagcccagcctcggcggtggccggtccaggtcctctctattctctgctcgctgctcttcgccattcttctcgccttcctcctcgccatcgcctacttgatcgttaaagattgaagccgacgccttgaaagtctgtccagagtaaagttgagccagggtgtggctctcgtctccacccatctccctttccctcgcgctaagccctcaggctggcagctgctttcacccagagtcctcatttgcatcttactttgctctcccgccctttgccttttctaagtggagcgtcctgatccatgatcaggagacgtatttttaaaaaggatcgtttgattaaatgggtactcttgaagaaatatcttcaagtccttgaacactggggatgaaatattgtcaagattaaacaaaatgcgaaacacccaccattaaaaggagacagtgaaaagtgcatataattaaaataggccatgttcaatggccttcatccacaaataaagatgtgctgtccaccaattcctctacacagaatcttgagggacagagattttcatcgcatagtccaaatttcttctttcatagagttgcatgctgagaatttgaaaaatgaagatgatgtagacactggactattaggattctggactctacttataatatccctaactgctggattctcctgttgcagcttttcttggacagtgacttactttgattcttttgaaccaggaatgtttcctcctactcctctttcacctgccaggttcaagaaactgactggacattctttccacatgggctatagcatggcgattttgaatggcatcgtagctgctcttactgtagcatggtgcctcatgtaaacccacactggagcgatattgttggcaaaacttaatcatgattgttttgtaataacaagaaggagcatcactgtctactcagaagactgagaaacctgctgttcattatgtagttcagatatttatcacaatcatcctcattatggaagaccttttaaagcattgttttagaatgtctgagtattaagatacagattaattgggaatatctgagtattaagtactttcttcagagtataagatgtttacctcatctttttacttttgtgtgtgtagttctttcaagttgtaggaaacattttaatggaatttaaactcaaaaacttgaatacaggacaatgcttgccttttcatgtatgtactacattttttgctaagaaatactgatatttctgtttagttgagctagaaatacttcttatttatacatttaggaaagcaaataatgcctactactccgacttttatagaagctacttttaaatcagaatatttaatttttgatattcatataattaatagaagttgcatttatattttttatggggcatagttccttatgtgtttttttaatgtattttcatactacatactgaatttgtatgtttttaaaattgttacatctagacaactgtaaacattatttttttagctagtgcaaacctagtacctgccatttttactaatttttgtctttaaaaaaagcaaaaaagcacattgacctaagttgaaaattaagtaagtttatttttaacaaaaaatgcctgaaaaaagctaaattatttaagtcattaagatattgagaaaaaatttgaaatttttactatttctgtttccacaattccaaatatttatcttggtgtatatattgttactttaacagaacttgcattattttgtttttaataaatataaacatgaaatttttgtatgtgagaatgattgaactagtttgttcttaatctcaaaaatttagttaccaaagtagaaaaggtattttgatactagatattaaaaactacatatagttaatataattttataatttttgtaattaaatgtgcttctgtaattgtgatattttgttttctaagtaattaagccttaatttttcccctatgttactaaagacttttaatgtttagaaagttacctcagttttagaaagatggactacttacaaagctgttttccctggccataggaaaacttacaataagaaaccattaagtagtcaaactgcttattcaggctaagtgggaaatgaatttgtgcagtgtgttcccttaattatctactgaatgttgttaccgactaaacaaggtttctaaaagtctcgcatttcttttactattcaaaactctttggttggaaatgactaatactgctccaatttaaattatctgaaatgtgtgtgtgt

SEQ ID NO: 283596 - DNA, 2919 bp, Homo sapiens
  misc_feature (215)..(215): n is a, c, g, or t
cggtgctcgaggcggaggggaggaggcggggaaggcgaaaggaggggttcggaggagagggttcgatctccgtacgcaccaggtggagagcgcgcgcctggggaaggaggcgtgtcgagtagcgggagggaagttgtagtacgggtggggagaaccacactaaagggagatgggggtgagcagttaaggaaccgcgagagcgccaggtagagagntgcccttaatgggggaacctggagaagagtgtgagcgtagtggggaagaagggagaagacaaataggttcgggaatgtgtctccgagggcgcgagcgggcgctaggacccggcgtcgaaaagatgaggctttggggctgtcggggcgcgcgctcccgttggtgacgcgggggtggcggaggtctccggccgggacgaagccccgcagggagtggatactcgacagccttcggcctccgctcgcttctccctgcgcgctttcctgctcccctttccggctacagccctggggtcgagctctggtcgaagcgcattccgcctctcctttggccctgcggcttcctttgcaacccgccgcccacccttgctctccgtggtttacccctgggctctgaggcctggtggtagcggccactgccgcggattggctgttgcggacccggggcggggcaggtgggagaggctcgttctccgcgggtttcgttgtgtttcgcgccatgtcgtttgctgagagcgggtggcggtcggctctgcggcgccgcggtcccggcaccccgggccctgtggctcggccatcgtattcctcctttactcagggggacagctggggtgaaggcgaagtcgacgaggaggagggatgcgaccaagtggcccgcgacctgcgggcggagttctcggctggggcgtggtcagagcccagaaagcgctcggtgctcccgccggacgggaacgggtcgcccgttctgcccgataagcgcaatggtatctttcccgcggccgcgggcagcagagcccagcctcggcggtggccggtccaggtcctctctattctctgctcgctgctcttcgccattcttctcgccttcctcctcgccatcgcctacttgatcgttaaagcgtttagtgggctacagatggcatggcatctaaaaccttacaatgcttgattttcatacagaagacactttggccagttgatgtgggttttacctcttcataaaatgagttgcatgctgagaatttgaaaaatgaagatgatgtagacactggactattaggattctggactctacttataatatccctaactgctggattctcctgttgcagcttttcttggacagtgacttactttgattcttttgaaccaggaatgtttcctcctactcctctttcacctgccaggttcaagaaactgactggacattctttccacatgggctatagcatggcgattttgaatggcatcgtagctgctcttactgtagcatggtgcctcatgtaaacccacactggagcgatattgttggcaaaacttaatcatgattgttttgtaataacaagaaggagcatcactgtctactcagaagactgagaaacctgctgttcattatgtagttcagatatttatcacaatcatcctcattatggaagaccttttaaagcattgttttagaatgtctgagtattaagatacagattaattgggaatatctgagtattaagtactttcttcagagtataagatgtttacctcatctttttacttttgtgtgtgtagttctttcaagttgtaggaaacattttaatggaatttaaactcaaaaacttgaatacaggacaatgcttgccttttcatgtatgtactacattttttgctaagaaatactgatatttctgtttagttgagctagaaatacttcttatttatacatttaggaaagcaaataatgcctactactccgacttttatagaagctacttttaaatcagaatatttaatttttgatattcatataattaatagaagttgcatttatattttttatggggcatagttccttatgtgtttttttaatgtattttcatactacatactgaatttgtatgtttttaaaattgttacatctagacaactgtaaacattatttttttagctagtgcaaacctagtacctgccatttttactaatttttgtctttaaaaaaagcaaaaaagcacattgacctaagttgaaaattaagtaagtttatttttaacaaaaaatgcctgaaaaaagctaaattatttaagtcattaagatattgagaaaaaatttgaaatttttactatttctgtttccacaattccaaatatttatcttggtgtatatattgttactttaacagaacttgcattattttgtttttaataaatataaacatgaaatttttgtatgtgagaatgattgaactagtttgttcttaatctcaaaaatttagttaccaaagtagaaaaggtattttgatactagatattaaaaactacatatagttaatataattttataatttttgtaattaaatgtgcttctgtaattgtgatattttgttttctaagtaattaagccttaatttttcccctatgttactaaagacttttaatgtttagaaagttacctcagttttagaaagatggactacttacaaagctgttttccctggccataggaaaacttacaataagaaaccattaagtagtcaaactgcttattcaggctaagtgggaaatgaatttgtgcagtgtgttcccttaattatctactgaatgttgttaccgactaaacaaggtttctaaaagtctcgcatttcttttactattcaaaactctttggttggaaatgactaatactgctccaatttaaattatctgaaatgtgtgtgtgt

SEQ ID NO: 283597 - DNA, 2862 bp, Homo sapiens
  misc_feature (215)..(215): n is a, c, g, or t
cggtgctcgaggcggaggggaggaggcggggaaggcgaaaggaggggttcggaggagagggttcgatctccgtacgcaccaggtggagagcgcgcgcctggggaaggaggcgtgtcgagtagcgggagggaagttgtagtacgggtggggagaaccacactaaagggagatgggggtgagcagttaaggaaccgcgagagcgccaggtagagagntgcccttaatgggggaacctggagaagagtgtgagcgtagtggggaagaagggagaagacaaataggttcgggaatgtgtctccgagggcgcgagcgggcgctaggacccggcgtcgaaaagatgaggctttggggctgtcggggcgcgcgctcccgttggtgacgcgggggtggcggaggtctccggccgggacgaagccccgcagggagtggatactcgacagccttcggcctccgctcgcttctccctgcgcgctttcctgctcccctttccggctacagccctggggtcgagctctggtcgaagcgcattccgcctctcctttggccctgcggcttcctttgcaacccgccgcccacccttgctctccgtggtttacccctgggctctgaggcctggtggtagcggccactgccgcggattggctgttgcggacccggggcggggcaggtgggagaggctcgttctccgcgggtttcgttgtgtttcgcgccatgtcgtttgctgagagcgggtggcggtcggctctgcggcgccgcggtcccggcaccccgggccctgtggctcggccatcgtattcctcctttactcagggggacagctggggtgaaggcgaagtcgacgaggaggagggatgcgaccaagtggcccgcgacctgcgggcggagttctcggctggggcgtggtcagagcccagaaagcgctcggtgctcccgccggacgggaacgggtcgcccgttctgcccgataagcgcaatggtatctttcccgcggccgcgggcagcagagcccagcctcggcggtggccggtccaggtcctctctattctctgctcgctgctcttcgccattcttctcgccttcctcctcgccatcgcctacttgatcgttaaagagttgcatgctgagaatttgaaaaatgaagatgatgtagacactggactattaggaattatctgtattagcaggaaattttcccttatgctgtaagttgcaaaggattctggactctacttataatatccctaactgctggattctcctgttgcagcttttcttggacagtgacttactttgattcttttgaaccaggaatgtttcctcctactcctctttcacctgccaggttcaagaaactgactggacattctttccacatgggctatagcatggcgattttgaatggcatcgtagctgctcttactgtagcatggtgcctcatgtaaacccacactggagcgatattgttggcaaaacttaatcatgattgttttgtaataacaagaaggagcatcactgtctactcagaagactgagaaacctgctgttcattatgtagttcagatatttatcacaatcatcctcattatggaagaccttttaaagcattgttttagaatgtctgagtattaagatacagattaattgggaatatctgagtattaagtactttcttcagagtataagatgtttacctcatctttttacttttgtgtgtgtagttctttcaagttgtaggaaacattttaatggaatttaaactcaaaaacttgaatacaggacaatgcttgccttttcatgtatgtactacattttttgctaagaaatactgatatttctgtttagttgagctagaaatacttcttatttatacatttaggaaagcaaataatgcctactactccgacttttatagaagctacttttaaatcagaatatttaatttttgatattcatataattaatagaagttgcatttatattttttatggggcatagttccttatgtgtttttttaatgtattttcatactacatactgaatttgtatgtttttaaaattgttacatctagacaactgtaaacattatttttttagctagtgcaaacctagtacctgccatttttactaatttttgtctttaaaaaaagcaaaaaagcacattgacctaagttgaaaattaagtaagtttatttttaacaaaaaatgcctgaaaaaagctaaattatttaagtcattaagatattgagaaaaaatttgaaatttttactatttctgtttccacaattccaaatatttatcttggtgtatatattgttactttaacagaacttgcattattttgtttttaataaatataaacatgaaatttttgtatgtgagaatgattgaactagtttgttcttaatctcaaaaatttagttaccaaagtagaaaaggtattttgatactagatattaaaaactacatatagttaatataattttataatttttgtaattaaatgtgcttctgtaattgtgatattttgttttctaagtaattaagccttaatttttcccctatgttactaaagacttttaatgtttagaaagttacctcagttttagaaagatggactacttacaaagctgttttccctggccataggaaaacttacaataagaaaccattaagtagtcaaactgcttattcaggctaagtgggaaatgaatttgtgcagtgtgttcccttaattatctactgaatgttgttaccgactaaacaaggtttctaaaagtctcgcatttcttttactattcaaaactctttggttggaaatgactaatactgctccaatttaaattatctgaaatgtgtgtgtgt

SEQ ID NO: 283598 - DNA, 1783 bp, Homo sapiens
cggtgctcgaggcggaggggaggaggcggggaaggcgaaaggaggggttcggaggagagggttcgatctccgtacgcaccagagttgcatgctgagaatttgaaaaatgaagatgatgtagacactggactattaggattctggactctacttataatatccctaactgctggattctcctgttgcagcttttcttggacagtgacttactttgattcttttgaaccaggaatgtttcctcctactcctctttcacctgccaggttcaagaaactgactggacattctttccacatgggctatagcatggcgattttgaatggcatcgtagctgctcttactgtagcatggtgcctcatgtaaacccacactggagcgatattgttggcaaaacttaatcatgattgttttgtaataacaagaaggagcatcactgtctactcagaagactgagaaacctgctgttcattatgtagttcagatatttatcacaatcatcctcattatggaagaccttttaaagcattgttttagaatgtctgagtattaagatacagattaattgggaatatctgagtattaagtactttcttcagagtataagatgtttacctcatctttttacttttgtgtgtgtagttctttcaagttgtaggaaacattttaatggaatttaaactcaaaaacttgaatacaggacaatgcttgccttttcatgtatgtactacattttttgctaagaaatactgatatttctgtttagttgagctagaaatacttcttatttatacatttaggaaagcaaataatgcctactactccgacttttatagaagctacttttaaatcagaatatttaatttttgatattcatataattaatagaagttgcatttatattttttatggggcatagttccttatgtgtttttttaatgtattttcatactacatactgaatttgtatgtttttaaaattgttacatctagacaactgtaaacattatttttttagctagtgcaaacctagtacctgccatttttactaatttttgtctttaaaaaaagcaaaaaagcacattgacctaagttgaaaattaagtaagtttatttttaacaaaaaatgcctgaaaaaagctaaattatttaagtcattaagatattgagaaaaaatttgaaatttttactatttctgtttccacaattccaaatatttatcttggtgtatatattgttactttaacagaacttgcattattttgtttttaataaatataaacatgaaatttttgtatgtgagaatgattgaactagtttgttcttaatctcaaaaatttagttaccaaagtagaaaaggtattttgatactagatattaaaaactacatatagttaatataattttataatttttgtaattaaatgtgcttctgtaattgtgatattttgttttctaagtaattaagccttaatttttcccctatgttactaaagacttttaatgtttagaaagttacctcagttttagaaagatggactacttacaaagctgttttccctggccataggaaaacttacaataagaaaccattaagtagtcaaactgcttattcaggctaagtgggaaatgaatttgtgcagtgtgttcccttaattatctactgaatgttgttaccgactaaacaaggtttctaaaagtctcgcatttcttttactattcaaaactctttggttggaaatgactaatactgctccaatttaaattatctgaaatgtgtgtgtgt

SEQ ID NO: 283599 - DNA, 2377 bp, Homo sapiens
aaggtcccacacatttgtaaatcaggagtcaacttttgttcatatactgagcaaggttaaagaatcagaataggtttataatgttccataagaaaactgtaaagaggggatacccccaaattgaggcaagtttcaaaagtgcatggcgtggaatgaaaggaatcacttagtactaaataataaagatagcaaggtatgatttatgaaattaaatgaaaaatctgatgaactttttttctttttcgaagcggggtttcactctgtctcccaggctggagtgcagtggtgcaatctaggcacactgcaacctcaaactcctggccccaaaccatcctcccacctcagtctcccaaaacactgtgattgcaggcatgagccaccttgtctggcctcaagacatcttaagagtcttgtgaaatgttttgaccatgttttctgtagttgaattttataaaactgaagatgttatgttcttgttgaatttacccttttttcccacgtattatcatttaattaaaatattcaatgatatgacttctagttgtgctttagtaatgtacacttatttctacataagttagcttgcaataagttcaaatctcttaaaatatcagatccatataatttagaagatgagaaatatacatgatctgaacatgagagtactggtttaatttaaattgttttggtgttaataatgtactttttcccctctcttttcctgttaagggattctggactctacttataatatccctaactgctggattctcctgttgcagcttttcttggacagtgacttactttgattcttttgaaccaggaatgtttcctcctactcctctttcacctgccaggttcaagaaactgactggacattctttccacatgggctatagcatggcgattttgaatggcatcgtagctgctcttactgtagcatggtgcctcatgtaaacccacactggagcgatattgttggcaaaacttaatcatgattgttttgtaataacaagaaggagcatcactgtctactcagaagactgagaaacctgctgttcattatgtagttcagatatttatcacaatcatcctcattatggaagaccttttaaagcattgttttagaatgtctgagtattaagatacagattaattgggaatatctgagtattaagtactttcttcagagtataagatgtttacctcatctttttacttttgtgtgtgtagttctttcaagttgtaggaaacattttaatggaatttaaactcaaaaacttgaatacaggacaatgcttgccttttcatgtatgtactacattttttgctaagaaatactgatatttctgtttagttgagctagaaatacttcttatttatacatttaggaaagcaaataatgcctactactccgacttttatagaagctacttttaaatcagaatatttaatttttgatattcatataattaatagaagttgcatttatattttttatggggcatagttccttatgtgtttttttaatgtattttcatactacatactgaatttgtatgtttttaaaattgttacatctagacaactgtaaacattatttttttagctagtgcaaacctagtacctgccatttttactaatttttgtctttaaaaaaagcaaaaaagcacattgacctaagttgaaaattaagtaagtttatttttaacaaaaaatgcctgaaaaaagctaaattatttaagtcattaagatattgagaaaaaatttgaaatttttactatttctgtttccacaattccaaatatttatcttggtgtatatattgttactttaacagaacttgcattattttgtttttaataaatataaacatgaaatttttgtatgtgagaatgattgaactagtttgttcttaatctcaaaaatttagttaccaaagtagaaaaggtattttgatactagatattaaaaactacatatagttaatataattttataatttttgtaattaaatgtgcttctgtaattgtgatattttgttttctaagtaattaagccttaatttttcccctatgttactaaagacttttaatgtttagaaagttacctcagttttagaaagatggactacttacaaagctgttttccctggccataggaaaacttacaataagaaaccattaagtagtcaaactgcttattcaggctaagtgggaaatgaatttgtgcagtgtgttcccttaattatctactgaatgttgttaccgactaaacaaggtttctaaaagtctcgcatttcttttactattcaaaactctttggttggaaatgactaatactgctccaatttaaattatctgaaatgtgtgtgtgt

SEQ ID NO: 283600 - DNA, 327 bp, Homo sapiens
gaacatatatgtgcatcattttaacagatactgccaaactgctctccatagaaattaaaacaatttactctccaaaacagccatgcatgaagagtttctgtttattcacagcctcagcatcagagaatgttatccaactttttgatttttgtcagttgatgaaaaaatgatacctaatttctctgattattaatggtattgaattgagcatctgttcatgttttaacatttgtagtttttattctgcaattgcatttaactttatatttggattttggattgctggtctttttttttattggcttctaggaattatctgtattagca

SEQ ID NO: 283601 - DNA, 447 bp, Homo sapiens
tattgtcaagattaaacaaaatgcgaaacacccaccattaaaaggagacagtgaaaagtgcatataattaaaataggccatgttcaatggccttcatccacaaataaagatgtgctgtccaccaattcctctacacagaatcttgagggacagagattttcatcgcatagtccaaatttcttctttcataggtaaaataattagcctctcagtttttaagtttgtatccaggtgtagtgcacggagttctgttgcagaaagtatagtccactcgtcctctaataattttgtttttctgtctgaagttgaaatattggccggttgaagtttattgcaaggcatacggttgtataatttagttggctagtgtatattatagtggaaagaagcagagttaagtttaaatttccattctcactagtttggacctttgccaagttactgaaa

SEQ ID NO: 283602 - DNA, 2142 bp, Homo sapiens
gtgtcccagcttcccgagcttagacgctccatcaccgtagggggtggggcagtgggggtctgccaccttcaccctccccgcccgagttacgtacgccccacaaacctgaggccgccaggggtagggtggagggggcggggggggacagctggggtgaaggcgaagtcgacgaggaggagggatgcgaccaagtggcccgcgacctgcgggcggagttctcggctggggcgtggtcagagcccagaaagcgctcggtgctcccgccggacgggaacgggtcgcccgttctgcccgataagcgcaatggtatctttcccgcggccgcgggcagcagagcccagcctcggcggtggccggtccaggtcctctctattctctgctcgctgctcttcgccattcttctcgccttcctcctcgccatcgcctacttgatcgttaaagagttgcatgctgagaatttgaaaaatgaagatgatgtagacactggactattaggattctggactctacttataatatccctaactgctggattctcctgttgcagcttttcttggacagtgacttactttgattcttttgaaccaggaatgtttcctcctactcctctttcacctgccaggttcaagaaactgactggacattctttccacatgggctatagcatggcgattttgaatggcatcgtagctgctcttactgtagcatggtgcctcatgtaaacccacactggagcgatattgttggcaaaacttaatcatgattgttttgtaataacaagaaggagcatcactgtctactcagaagactgagaaacctgctgttcattatgtagttcagatatttatcacaatcatcctcattatggaagaccttttaaagcattgttttagaatgtctgagtattaagatacagattaattgggaatatctgagtattaagtactttcttcagagtataagatgtttacctcatctttttacttttgtgtgtgtagttctttcaagttgtaggaaacattttaatggaatttaaactcaaaaacttgaatacaggacaatgcttgccttttcatgtatgtactacattttttgctaagaaatactgatatttctgtttagttgagctagaaatacttcttatttatacatttaggaaagcaaataatgcctactactccgacttttatagaagctacttttaaatcagaatatttaatttttgatattcatataattaatagaagttgcatttatattttttatggggcatagttccttatgtgtttttttaatgtattttcatactacatactgaatttgtatgtttttaaaattgttacatctagacaactgtaaacattatttttttagctagtgcaaacctagtacctgccatttttactaatttttgtctttaaaaaaagcaaaaaagcacattgacctaagttgaaaattaagtaagtttatttttaacaaaaaatgcctgaaaaaagctaaattatttaagtcattaagatattgagaaaaaatttgaaatttttactatttctgtttccacaattccaaatatttatcttggtgtatatattgttactttaacagaacttgcattattttgtttttaataaatataaacatgaaatttttgtatgtgagaatgattgaactagtttgttcttaatctcaaaaatttagttaccaaagtagaaaaggtattttgatactagatattaaaaactacatatagttaatataattttataatttttgtaattaaatgtgcttctgtaattgtgatattttgttttctaagtaattaagccttaatttttcccctatgttactaaagacttttaatgtttagaaagttacctcagttttagaaagatggactacttacaaagctgttttccctggccataggaaaacttacaataagaaaccattaagtagtcaaactgcttattcaggctaagtgggaaatgaatttgtgcagtgtgttcccttaattatctactgaatgttgttaccgactaaacaaggtttctaaaagtctcgcatttcttttactattcaaaactctttggttggaaatgactaatactgctccaatttaaattatctgaaatgtgtgtgtgt

SEQ ID NO: 283603 - DNA, 2561 bp, Homo sapiens
  misc_feature (215)..(215): n is a, c, g, or t
cggtgctcgaggcggaggggaggaggcggggaaggcgaaaggaggggttcggaggagagggttcgatctccgtacgcaccaggtggagagcgcgcgcctggggaaggaggcgtgtcgagtagcgggagggaagttgtagtacgggtggggagaaccacactaaagggagatgggggtgagcagttaaggaaccgcgagagcgccaggtagagagntgcccttaatgggggaacctggagaagagtgtgagcgtagtggggaagaagggagaagacaaataggttcgggaatgtgtctccgagggcgcgagcgggcgctaggacccggcgtcgaaaagatgaggctttggggctgtcggggcgcgcgctcccgttggtgacgcgggggtggcggaggtctccggccgggacgaagccccgcagggagtggatactcgacagccttcggcctccgctcgcttctccctgcgcgctttcctgctcccctttccggctacagccctggggtcgagctctggtcgaagcgcattccgcctctcctttggccctgcggcttcctttgcaacccgccgcccacccttgctctccgtggtttacccctgggctctgaggcctggtggtagcggccactgccgcggattggctgttgcggacccggggcggggcaggtgggagaggctcgttctccgcgggtttcgttgtgtttcgcgccatgtcgtttgctgagagcgggtggcggtcggctctgcggcgccgcggtcccggcacggtggccggtccaggtcctctctattctctgctcgctgctcttcgccattcttctcgccttcctcctcgccatcgcctacttgatcgttaaagagttgcatgctgagaatttgaaaaatgaagatgatgtagacactggactattaggattctggactctacttataatatccctaactgctggattctcctgttgcagcttttcttggacagtgacttactttgattcttttgaaccaggaatgtttcctcctactcctctttcacctgccaggttcaagaaactgactggacattctttccacatgggctatagcatggcgattttgaatggcatcgtagctgctcttactgtagcatggtgcctcatgtaaacccacactggagcgatattgttggcaaaacttaatcatgattgttttgtaataacaagaaggagcatcactgtctactcagaagactgagaaacctgctgttcattatgtagttcagatatttatcacaatcatcctcattatggaagaccttttaaagcattgttttagaatgtctgagtattaagatacagattaattgggaatatctgagtattaagtactttcttcagagtataagatgtttacctcatctttttacttttgtgtgtgtagttctttcaagttgtaggaaacattttaatggaatttaaactcaaaaacttgaatacaggacaatgcttgccttttcatgtatgtactacattttttgctaagaaatactgatatttctgtttagttgagctagaaatacttcttatttatacatttaggaaagcaaataatgcctactactccgacttttatagaagctacttttaaatcagaatatttaatttttgatattcatataattaatagaagttgcatttatattttttatggggcatagttccttatgtgtttttttaatgtattttcatactacatactgaatttgtatgtttttaaaattgttacatctagacaactgtaaacattatttttttagctagtgcaaacctagtacctgccatttttactaatttttgtctttaaaaaaagcaaaaaagcacattgacctaagttgaaaattaagtaagtttatttttaacaaaaaatgcctgaaaaaagctaaattatttaagtcattaagatattgagaaaaaatttgaaatttttactatttctgtttccacaattccaaatatttatcttggtgtatatattgttactttaacagaacttgcattattttgtttttaataaatataaacatgaaatttttgtatgtgagaatgattgaactagtttgttcttaatctcaaaaatttagttaccaaagtagaaaaggtattttgatactagatattaaaaactacatatagttaatataattttataatttttgtaattaaatgtgcttctgtaattgtgatattttgttttctaagtaattaagccttaatttttcccctatgttactaaagacttttaatgtttagaaagttacctcagttttagaaagatggactacttacaaagctgttttccctggccataggaaaacttacaataagaaaccattaagtagtcaaactgcttattcaggctaagtgggaaatgaatttgtgcagtgtgttcccttaattatctactgaatgttgttaccgactaaacaaggtttctaaaagtctcgcatttcttttactattcaaaactctttggttggaaatgactaatactgctccaatttaaattatctgaaatgtgtgtgtgt

SEQ ID NO: 283604 - DNA, 2760 bp, Homo sapiens
  misc_feature (215)..(215): n is a, c, g, or t
cggtgctcgaggcggaggggaggaggcggggaaggcgaaaggaggggttcggaggagagggttcgatctccgtacgcaccaggtggagagcgcgcgcctggggaaggaggcgtgtcgagtagcgggagggaagttgtagtacgggtggggagaaccacactaaagggagatgggggtgagcagttaaggaaccgcgagagcgccaggtagagagntgcccttaatgggggaacctggagaagagtgtgagcgtagtggggaagaagggagaagacaaataggttcgggaatgtgtctccgagggcgcgagcgggcgctaggacccggcgtcgaaaagatgaggctttggggctgtcggggcgcgcgctcccgttggtgacgcgggggtggcggaggtctccggccgggacgaagccccgcagggagtggatactcgacagccttcggcctccgctcgcttctccctgcgcgctttcctgctcccctttccggctacagccctggggtcgagctctggtcgaagcgcattccgcctctcctttggccctgcggcttcctttgcaacccgccgcccacccttgctctccgtggtttacccctgggctctgaggcctggtggtagcggccactgccgcggattggctgttgcggacccggggcggggcaggtgggagaggctcgttctccgcgggtttcgttgtgtttcgcgccatgtcgtttgctgagagcgggtggcggtcggctctgcggcgccgcggtcccggcaccccgggccctgtggctcggccatcgtattcctcctttactcagggggacagctggggtgaaggcgaagtcgacgaggaggagggatgcgaccaagtggcccgcgacctgcgggcggagttctcggctggggcgtggtcagagcccagaaagcgctcggtgctcccgccggacgggaacgggtcgcccgttctgcccgataagcgcaatggtatctttcccgcggccgcgggcagcagagcccagcctcggcggtggccggtccaggtcctctctattctctgctcgctgctcttcgccattcttctcgccttcctcctcgccatcgcctacttgatcgttaaagagttgcatgctgagaatttgaaaaatgaagatgatgtagacactggactattagcttttcttggacagtgacttactttgattcttttgaaccaggaatgtttcctcctactcctctttcacctgccaggttcaagaaactgactggacattctttccacatgggctatagcatggcgattttgaatggcatcgtagctgctcttactgtagcatggtgcctcatgtaaacccacactggagcgatattgttggcaaaacttaatcatgattgttttgtaataacaagaaggagcatcactgtctactcagaagactgagaaacctgctgttcattatgtagttcagatatttatcacaatcatcctcattatggaagaccttttaaagcattgttttagaatgtctgagtattaagatacagattaattgggaatatctgagtattaagtactttcttcagagtataagatgtttacctcatctttttacttttgtgtgtgtagttctttcaagttgtaggaaacattttaatggaatttaaactcaaaaacttgaatacaggacaatgcttgccttttcatgtatgtactacattttttgctaagaaatactgatatttctgtttagttgagctagaaatacttcttatttatacatttaggaaagcaaataatgcctactactccgacttttatagaagctacttttaaatcagaatatttaatttttgatattcatataattaatagaagttgcatttatattttttatggggcatagttccttatgtgtttttttaatgtattttcatactacatactgaatttgtatgtttttaaaattgttacatctagacaactgtaaacattatttttttagctagtgcaaacctagtacctgccatttttactaatttttgtctttaaaaaaagcaaaaaagcacattgacctaagttgaaaattaagtaagtttatttttaacaaaaaatgcctgaaaaaagctaaattatttaagtcattaagatattgagaaaaaatttgaaatttttactatttctgtttccacaattccaaatatttatcttggtgtatatattgttactttaacagaacttgcattattttgtttttaataaatataaacatgaaatttttgtatgtgagaatgattgaactagtttgttcttaatctcaaaaatttagttaccaaagtagaaaaggtattttgatactagatattaaaaactacatatagttaatataattttataatttttgtaattaaatgtgcttctgtaattgtgatattttgttttctaagtaattaagccttaatttttcccctatgttactaaagacttttaatgtttagaaagttacctcagttttagaaagatggactacttacaaagctgttttccctggccataggaaaacttacaataagaaaccattaagtagtcaaactgcttattcaggctaagtgggaaatgaatttgtgcagtgtgttcccttaattatctactgaatgttgttaccgactaaacaaggtttctaaaagtctcgcatttcttttactattcaaaactctttggttggaaatgactaatactgctccaatttaaattatctgaaatgtgtgtgtgt

SEQ ID NO: 283605 - DNA, 2758 bp, Homo sapiens
  misc_feature (215)..(215): n is a, c, g, or t
cggtgctcgaggcggaggggaggaggcggggaaggcgaaaggaggggttcggaggagagggttcgatctccgtacgcaccaggtggagagcgcgcgcctggggaaggaggcgtgtcgagtagcgggagggaagttgtagtacgggtggggagaaccacactaaagggagatgggggtgagcagttaaggaaccgcgagagcgccaggtagagagntgcccttaatgggggaacctggagaagagtgtgagcgtagtggggaagaagggagaagacaaataggttcgggaatgtgtctccgagggcgcgagcgggcgctaggacccggcgtcgaaaagatgaggctttggggctgtcggggcgcgcgctcccgttggtgacgcgggggtggcggaggtctccggccgggacgaagccccgcagggagtggatactcgacagccttcggcctccgctcgcttctccctgcgcgctttcctgctcccctttccggctacagccctggggtcgagctctggtcgaagcgcattccgcctctcctttggccctgcggcttcctttgcaacccgccgcccacccttgctctccgtggtttacccctgggctctgaggcctggtggtagcggccactgccgcggattggctgttgcggacccggggcggggcaggtgggagaggctcgttctccgcgggtttcgttgtgtttcgcgccatgtcgtttgctgagagcgggtggcggtcggctctgcggcgccgcggtcccggcaccccgggccctgtggctcggccatcgtattcctcctttactcagggggacagctggggtgaaggcgaagtcgacgaggaggagggatgcgaccaagtggcccgcgacctgcgggcggagttctcggctggggcgtggtcagagcccagaaagcgctcggtgctcccgccggacgggaacgggtcgcccgttctgcccgataagcgcaatggtatctttcccgcggccgcgggcagcagagcccagcctcggcggtggccggtccaggtcctctctattctctgctcgctgctcttcgccattcttctcgccttcctcctcgccatcgcctacttgatcgttaaaggattctggactctacttataatatccctaactgctggattctcctgttgcagcttttcttggacagtgacttactttgattcttttgaaccaggaatgtttcctcctactcctctttcacctgccaggttcaagaaactgactggacattctttccacatgggctatagcatggcgattttgaatggcatcgtagctgctcttactgtagcatggtgcctcatgtaaacccacactggagcgatattgttggcaaaacttaatcatgattgttttgtaataacaagaaggagcatcactgtctactcagaagactgagaaacctgctgttcattatgtagttcagatatttatcacaatcatcctcattatggaagaccttttaaagcattgttttagaatgtctgagtattaagatacagattaattgggaatatctgagtattaagtactttcttcagagtataagatgtttacctcatctttttacttttgtgtgtgtagttctttcaagttgtaggaaacattttaatggaatttaaactcaaaaacttgaatacaggacaatgcttgccttttcatgtatgtactacattttttgctaagaaatactgatatttctgtttagttgagctagaaatacttcttatttatacatttaggaaagcaaataatgcctactactccgacttttatagaagctacttttaaatcagaatatttaatttttgatattcatataattaatagaagttgcatttatattttttatggggcatagttccttatgtgtttttttaatgtattttcatactacatactgaatttgtatgtttttaaaattgttacatctagacaactgtaaacattatttttttagctagtgcaaacctagtacctgccatttttactaatttttgtctttaaaaaaagcaaaaaagcacattgacctaagttgaaaattaagtaagtttatttttaacaaaaaatgcctgaaaaaagctaaattatttaagtcattaagatattgagaaaaaatttgaaatttttactatttctgtttccacaattccaaatatttatcttggtgtatatattgttactttaacagaacttgcattattttgtttttaataaatataaacatgaaatttttgtatgtgagaatgattgaactagtttgttcttaatctcaaaaatttagttaccaaagtagaaaaggtattttgatactagatattaaaaactacatatagttaatataattttataatttttgtaattaaatgtgcttctgtaattgtgatattttgttttctaagtaattaagccttaatttttcccctatgttactaaagacttttaatgtttagaaagttacctcagttttagaaagatggactacttacaaagctgttttccctggccataggaaaacttacaataagaaaccattaagtagtcaaactgcttattcaggctaagtgggaaatgaatttgtgcagtgtgttcccttaattatctactgaatgttgttaccgactaaacaaggtttctaaaagtctcgcatttcttttactattcaaaactctttggttggaaatgactaatactgctccaatttaaattatctgaaatgtgtgtgtgt

SEQ ID NO: 283606 - DNA, 2067 bp, Homo sapiens
tatcataaagtcacaaaaccatgataagtggaattccattgcagaagacattgaactgtgcttatttggaagaatagagaaaggaactgaactccacctagtatgccctttagtgtttaccactaccttagggaataaacagtactctcatcctatgtacggtatatagctgttggctcccttagtggtcaacacattaatttgcttgctgaaggtcacatagctggtaaattgaatcagaatttgaacccagttctttgtgactccagagcactttccacagctccacaatgccttcacagcccttgagttacttttcaaattatagtattgctttcctacctaagtccctctttgtatttgcagagttgcatgctgagaatttgaaaaatgaagatgatgtagacactggactattaggattctggactctacttataatatccctaactgctggattctcctgttgcagcttttcttggacagtgacttactttgattcttttgaaccaggaatgtttcctcctactcctctttcacctgccaggttcaagaaactgactggacattctttccacatgggctatagcatggcgattttgaatggcatcgtagctgctcttactgtagcatggtgcctcatgtaaacccacactggagcgatattgttggcaaaacttaatcatgattgttttgtaataacaagaaggagcatcactgtctactcagaagactgagaaacctgctgttcattatgtagttcagatatttatcacaatcatcctcattatggaagaccttttaaagcattgttttagaatgtctgagtattaagatacagattaattgggaatatctgagtattaagtactttcttcagagtataagatgtttacctcatctttttacttttgtgtgtgtagttctttcaagttgtaggaaacattttaatggaatttaaactcaaaaacttgaatacaggacaatgcttgccttttcatgtatgtactacattttttgctaagaaatactgatatttctgtttagttgagctagaaatacttcttatttatacatttaggaaagcaaataatgcctactactccgacttttatagaagctacttttaaatcagaatatttaatttttgatattcatataattaatagaagttgcatttatattttttatggggcatagttccttatgtgtttttttaatgtattttcatactacatactgaatttgtatgtttttaaaattgttacatctagacaactgtaaacattatttttttagctagtgcaaacctagtacctgccatttttactaatttttgtctttaaaaaaagcaaaaaagcacattgacctaagttgaaaattaagtaagtttatttttaacaaaaaatgcctgaaaaaagctaaattatttaagtcattaagatattgagaaaaaatttgaaatttttactatttctgtttccacaattccaaatatttatcttggtgtatatattgttactttaacagaacttgcattattttgtttttaataaatataaacatgaaatttttgtatgtgagaatgattgaactagtttgttcttaatctcaaaaatttagttaccaaagtagaaaaggtattttgatactagatattaaaaactacatatagttaatataattttataatttttgtaattaaatgtgcttctgtaattgtgatattttgttttctaagtaattaagccttaatttttcccctatgttactaaagacttttaatgtttagaaagttacctcagttttagaaagatggactacttacaaagctgttttccctggccataggaaaacttacaataagaaaccattaagtagtcaaactgcttattcaggctaagtgggaaatgaatttgtgcagtgtgttcccttaattatctactgaatgttgttaccgactaaacaaggtttctaaaagtctcgcatttcttttactattcaaaactctttggttggaaatgactaatactgctccaatttaaattatctgaaatgtgtgtgtgt

SEQ ID NO: 283607 - DNA, 1471 bp, Homo sapiens
cgatatttgtggttctggcttttctactataatattggaaactattatacaggcttcatatccctccagcactcactgaaaatgaccgagacagccagtcgccgttgaggaatcctctgttgtcaacatcgagacccctggttttcgggaaacccaatggtgatgcagttgattatcagaaacagctgaagcagatgattaaggatttagccaaagaaaaagataaaactgagaaagaattgcccaaaatgagccagagagaatttatccagttctgtaaaactctgtacagtatgttccatgaagatccagaagaaaatgatttgtatcaagccatcgccacagtcaccacactgctgctgcagatcggggaggtggggcagcgaggcagcagctctggaagctgctcccaggagtgtggggaggagctgcgggcttcagctccttctcctgaggactcggtttttgcagacactgggaagacgccccaggactcccaggcatttccagaggcggcagaaggggactggactgtctcccttgaacatattttagcttcacttctgactgaacagtcattagtcaacttttttgaaaagccactggacatgaaatccaaacttgaaaatgccaagatcaatcagtacaatctcaaaacttttgaaatgagccaccaatcacaatctgaacttaagctgagtaacttgtagcaagacagcagctgctatgcacactggagtccaccataccaaagcacgaaccagactgtttcttggggtcagccctaaaccgagatttcagtctaccttaccaatggggcatctggctaaacaacctgacaaactgtggccaggggaaccgacacaaccctcaagcatttctatgtattgagaattgtcagtgccctaaggtatccattggttcccttgatgccaacttacaatttttaccggatttgctgaaatgggcacttctgctgtgatgctagtgttgattttgctctcagatgaacacaatgtctcatactaaccaagaagcaagaaaagccccatgctttcatttttcacttggagtgacaatgggagaggtcaggaatcaagttcactttcaagatctaagggagtccactatctgtgcaattgtatttggcttttttttgcactgtttcaatgctggtaattgaaaccattttaatatatttggttgtattcactttatatgtccttccaaaaatgttgttgtgtacaaaccatgctttcaatgttggcttccaagttttttaataagaaactttttgtatttacttggtccttttcttttaccttgtagttaagtgtcttaagctgtagactgtggcagtgaatgggtaagctggagatgttgctgctgcccatccatggtttttgggtggtgcaacactactaggtacttctcagccctgccttgggtgtgccctacggcttcagagacc

SEQ ID NO: 283608 - DNA, 458 bp, Homo sapiens
cactggtaccggcaaggtatgagagaacatatgatgagctgttactgggagcagcccaggcccatggcctcacgccacgaccccagccggccctatgctgagcagtaccgcatagacgcccggcagtttgcacacctgtttcagctagtctcgccctggacctgcggggcccacacggagatcctcgccgaaaggacgttcaggctcttggatgacaacatggaccagctcatcgagttcaaagcgtttgtgagctgcctcgatattatgtataatggagaaatgaatgagaagattaaactattatacaggcttcatatccctccagcactcactgaaaatgaccgagacagccagtcgccgttgaggaatcctctgttgtcaacatcgagacccctggttttcgggaaacccaatggtgatgcagttgattatcagtaacagctaccttgcccggt

SEQ ID NO: 283609 - DNA, 346 bp, Homo sapiens
aaaaaaaaaaaaaaaaaaaaaaaaggaaaggaaaagaaaatgattgtttgtttgagaaccgggcttagaagtcaaatgatttgcccagagcctcatgatcggtaagtggccgagtgagagactggttcttgggttttctgaccccgactgccattccttttttttctgctgcagccgtgtgtctgggtggctgacggatgacacagctgagccattctcctcatcaggtgtgactgtcgttgaagcagcgcacacttctcgggggcctgtgcacctcagtccctcctgcttcctgtcccttgcaccccctgcctctatgtcgttttcgggatcctctagacagcca

SEQ ID NO: 283610 - DNA, 4231 bp, Homo sapiens
gaaagcaggatgcacgaggtggcggccctgcagcccttgagtggggcctcattcctggagatgcagcaaagagtttgccggtttgggcttgtggagggaaagtcagtctgaatgtagatggaactgtaggtcgcctggtcggcgctctggatgcagtgttggattccaatgcacgggtcgctccatttcgaattctgcttcaagttcccggctcccaggtttattctcccatagcatgtggtgagttactgaatggatcagacgtttactgggccatagccactggtgcaacattagaggaaatcaatcagcactgggactggctggaacaaaatctcctccacaccttgtctgtctttgataataaagatgacattgccagttttgtcaaagggaaggtaaaggctctgatagccgaggagaccagcagcaggctcgccgagcaggaggaggaacccgagaaattccgagaagccctggtgaagttcgaggccaggttcaacttccccgaggcggagaagctggtcacctactactcctgctgctgttggaagggcagggtgccccgccagggctggctgtacctcagcatcaaccacctctgcttctactccttcttcctgggcaaggaacttaaacttgtggttccgtgggttgatatccagaaattagaaagaacgtccaatgtctttctgacggataccatccgaatcaccacgcagaataaggagcgtgacttctccatgttcctgaacctggatgaggtgtttaaggtcatggagcagctggccgacgtgacgctgcgaaggctgctggataatgaggtctttgacctcgaccccgatctgcaggagccgagccagatcaccaagagggacctggaagccagagcacagaatgagttcttccgggctttcttcaggttgccgaggaaggagaagctgcacgcggttgtggactgttcgctctggacgccgttcagtcgctgtcacaccgcggggcggatgttcgcctctgacagctacatctgctttgccagcagagaagatggctgctgtaagatcatcctgccactcagagaggtggtgagcatcgagaagatggaggacacgagcctgctgccgcatcccatcattgtcagtatcagaagcaaggtggccttccagttcattgagctccgggaccgagacagcctggtggaggcgctgcttgcgaggttgaagcaggtccacgccaaccaccccgtgcactacgacacctctgcggatgatgacatggcttcactcgtgtttcattcaacaagcatgtgcagtgaccacagatttggggatcttgaaatgatgtcttctcaaaatagcgaggagagtgagaaagagaagagcccgctgatgcaccccgatgccctggtcaccgccttccagcagtcaggcagccagagccctgactcccgaatgtccagagaacagataaaaataagcctgtggaatgaccactttgtggaatacggcagaaccgtgtgtatgtttcgcacagagaagattcggaagctcgtagccatgggcatccctgaatctttgcgagggagactctggcttctcttctcagatgcggtgacggatcttgcctcacaccctggttactacgggaatctggtggaggagtccctggggaaatgctgcctggtaaccgaggagatagaacgagacctgcaccgctccctgccagagcaccccgccttccagaacgaaacgggaattgctgctttgaggagagtcttgacggcctatgcccaccggaaccccaagattggatactgccagtccatgaacatcctgacctccgtgctgctgctgtacaccaaggaggaggaagccttctggctgttggttgctgtgtgtgagcggatgctgcccgattacttcaaccaccgagtgatcggggcacaagttgaccagtctgtcttcgaggagctcatcaagggtcatctcccagagctggcagagcacatgaacgacctctcagccctggcgtccgtctctctctcgtggttcctgaccctgttcctcagcatcatgcctctagagagtgcggtgaatgtggtagactgcttcttctatgatggcatcaaagccatcttccagctgggactggctgtgcttgaggccaatgctgaggacctgtgcagcagcaaggatgatggccaggccttgatgatcctcagcaggtttctagatcacattaagaatgaggacagcccagggcccccagttggcagccaccatgcctttttctccgacgaccaggagccctaccctgtgactgatatttcggacctgatccgggattcctatgagaaatttggagaccagtctgtggagcagatcgagcacctacgttacaagcacaggatcagggtcctccaaggccacgaggacaccacaaagcagaacgtgcttcgagtcgttatcccggaagtctcaattcttcctgaagacctagaggagctctacgacttattcaagagagaacatatgatgagctgttactgggagcagcccaggcccatggcctcacgccacgaccccagccggccctatgctgagcagtaccgcatagacgcccggcagtttgcacacctgtttcagctagtctcgccctggacctgcggggcccacacggagatcctcgccgaaaggacgttcaggctcttggatgacaacatggaccagctcatcgagttcaaagcgtttgtgagctgcctcgatattatgtataatggagaaatgaatgagaagattaaactattatacaggcttcatatccctccagcactcactgaaaatgaccgagacagccagtcgccgttgaggaatcctctgttgtcaacatcgagacccctggttttcgggaaacccaatggtgatgcagttgattatcagaaacagctgaagcagatgattaaggatttagccaaagaaaaagataaaactgagaaagaattgcccaaaatgagccagagagaatttatccagttctgtaaaactctgtacagtatgttccatgaagatccagaagaaaatgatttgtatcaagccatcgccacagtcaccacactgctgctgcagatcggggaggtggggcagcgaggcagcagctctggaagctgctcccaggagtgtggggaggagctgcgggcttcagctccttctcctgaggactcggtttttgcagacactgggaagacgccccaggactcccaggcatttccagaggcggcagaaggggactggactgtctcccttgaacatattttagcttcacttctgactgaacagtcattagtcaacttttttgaaaagccactggacatgaaatccaaacttgaaaatgccaagatcaatcagtacaatctcaaaacttttgaaatgagccaccaatcacaatctgaacttaagctgagtaacttgtagcaagacagcagctgctatgcacactggagtccaccataccaaagcacgaaccagactgtttcttggggtcagccctaaaccgagatttcagtctaccttaccaatggggcatctggctaaacaacctgacaaactgtggccaggggaaccgacacaaccctcaagcatttctatgtattgagaattgtcagtgccctaaggtatccattggttcccttgatgccaacttacaatttttaccggatttgctgaaatgggcacttctgctgtgatgctagtgttgattttgctctcagatgaacacaatgtctcatactaaccaagaagcaagaaaagccccatgctttcatttttcacttggagtgacaatgggagaggtcaggaatcaagttcactttcaagatctaagggagtccactatctgtgcaattgtatttggcttttttttgcactgtttcaatgctggtaattgaaaccattttaatatatttggttgtattcactttatatgtccttccaaaaatgttgttgtgtacaaaccatgctttcaatgttggcttccaagttttttaataagaaactttttgtatttacttggtccttttcttttaccttgtagttaagtgtcttaagctgtagactgtggcagtgaatgggtaagctggagatgttgctgctgcccatccatggtttttgggtggtgcaacactactaggtacttctcagccctgccttgggtgtgccctacggcttcagagacc

SEQ ID NO: 283611 - DNA, 4186 bp, Homo sapiens
gaaagcaggatgcacgaggtggcggccctgcagcccttgagtggggcctcattcctggagatgcagcaaagagtttgccggtttgggcttgtggagggaaagtcagtctgaatgtagatggaactgtaggtcgcctggtcggcgctctggatgcagtgttggattccaatgcacgggtcgctccatttcgaattctgcttcaagttcccggctcccaggtttattctcccatagcatgtggtgcaacattagaggaaatcaatcagcactgggactggctggaacaaaatctcctccacaccttgtctgtctttgataataaagatgacattgccagttttgtcaaagggaaggtaaaggctctgatagccgaggagaccagcagcaggctcgccgagcaggaggaggaacccgagaaattccgagaagccctggtgaagttcgaggccaggttcaacttccccgaggcggagaagctggtcacctactactcctgctgctgttggaagggcagggtgccccgccagggctggctgtacctcagcatcaaccacctctgcttctactccttcttcctgggcaaggaacttaaacttgtggttccgtgggttgatatccagaaattagaaagaacgtccaatgtctttctgacggataccatccgaatcaccacgcagaataaggagcgtgacttctccatgttcctgaacctggatgaggtgtttaaggtcatggagcagctggccgacgtgacgctgcgaaggctgctggataatgaggtctttgacctcgaccccgatctgcaggagccgagccagatcaccaagagggacctggaagccagagcacagaatgagttcttccgggctttcttcaggttgccgaggaaggagaagctgcacgcggttgtggactgttcgctctggacgccgttcagtcgctgtcacaccgcggggcggatgttcgcctctgacagctacatctgctttgccagcagagaagatggctgctgtaagatcatcctgccactcagagaggtggtgagcatcgagaagatggaggacacgagcctgctgccgcatcccatcattgtcagtatcagaagcaaggtggccttccagttcattgagctccgggaccgagacagcctggtggaggcgctgcttgcgaggttgaagcaggtccacgccaaccaccccgtgcactacgacacctctgcggatgatgacatggcttcactcgtgtttcattcaacaagcatgtgcagtgaccacagatttggggatcttgaaatgatgtcttctcaaaatagcgaggagagtgagaaagagaagagcccgctgatgcaccccgatgccctggtcaccgccttccagcagtcaggcagccagagccctgactcccgaatgtccagagaacagataaaaataagcctgtggaatgaccactttgtggaatacggcagaaccgtgtgtatgtttcgcacagagaagattcggaagctcgtagccatgggcatccctgaatctttgcgagggagactctggcttctcttctcagatgcggtgacggatcttgcctcacaccctggttactacgggaatctggtggaggagtccctggggaaatgctgcctggtaaccgaggagatagaacgagacctgcaccgctccctgccagagcaccccgccttccagaacgaaacgggaattgctgctttgaggagagtcttgacggcctatgcccaccggaaccccaagattggatactgccagtccatgaacatcctgacctccgtgctgctgctgtacaccaaggaggaggaagccttctggctgttggttgctgtgtgtgagcggatgctgcccgattacttcaaccaccgagtgatcggggcacaagttgaccagtctgtcttcgaggagctcatcaagggtcatctcccagagctggcagagcacatgaacgacctctcagccctggcgtccgtctctctctcgtggttcctgaccctgttcctcagcatcatgcctctagagagtgcggtgaatgtggtagactgcttcttctatgatggcatcaaagccatcttccagctgggactggctgtgcttgaggccaatgctgaggacctgtgcagcagcaaggatgatggccaggccttgatgatcctcagcaggtttctagatcacattaagaatgaggacagcccagggcccccagttggcagccaccatgcctttttctccgacgaccaggagccctaccctgtgactgatatttcggacctgatccgggattcctatgagaaatttggagaccagtctgtggagcagatcgagcacctacgttacaagcacaggatcagggtcctccaaggccacgaggacaccacaaagcagaacgtgcttcgagtcgttatcccggaagtctcaattcttcctgaagacctagaggagctctacgacttattcaagagagaacatatgatgagctgttactgggagcagcccaggcccatggcctcacgccacgaccccagccggccctatgctgagcagtaccgcatagacgcccggcagtttgcacacctgtttcagctagtctcgccctggacctgcggggcccacacggagatcctcgccgaaaggacgttcaggctcttggatgacaacatggaccagctcatcgagttcaaagcgtttgtgagctgcctcgatattatgtataatggagaaatgaatgagaagattaaactattatacaggcttcatatccctccagcactcactgaaaatgaccgagacagccagtcgccgttgaggaatcctctgttgtcaacatcgagacccctggttttcgggaaacccaatggtgatgcagttgattatcagaaacagctgaagcagatgattaaggatttagccaaagaaaaagataaaactgagaaagaattgcccaaaatgagccagagagaatttatccagttctgtaaaactctgtacagtatgttccatgaagatccagaagaaaatgatttgtatcaagccatcgccacagtcaccacactgctgctgcagatcggggaggtggggcagcgaggcagcagctctggaagctgctcccaggagtgtggggaggagctgcgggcttcagctccttctcctgaggactcggtttttgcagacactgggaagacgccccaggactcccaggcatttccagaggcggcagaaggggactggactgtctcccttgaacatattttagcttcacttctgactgaacagtcattagtcaacttttttgaaaagccactggacatgaaatccaaacttgaaaatgccaagatcaatcagtacaatctcaaaacttttgaaatgagccaccaatcacaatctgaacttaagctgagtaacttgtagcaagacagcagctgctatgcacactggagtccaccataccaaagcacgaaccagactgtttcttggggtcagccctaaaccgagatttcagtctaccttaccaatggggcatctggctaaacaacctgacaaactgtggccaggggaaccgacacaaccctcaagcatttctatgtattgagaattgtcagtgccctaaggtatccattggttcccttgatgccaacttacaatttttaccggatttgctgaaatgggcacttctgctgtgatgctagtgttgattttgctctcagatgaacacaatgtctcatactaaccaagaagcaagaaaagccccatgctttcatttttcacttggagtgacaatgggagaggtcaggaatcaagttcactttcaagatctaagggagtccactatctgtgcaattgtatttggcttttttttgcactgtttcaatgctggtaattgaaaccattttaatatatttggttgtattcactttatatgtccttccaaaaatgttgttgtgtacaaaccatgctttcaatgttggcttccaagttttttaataagaaactttttgtatttacttggtccttttcttttaccttgtagttaagtgtcttaagctgtagactgtggcagtgaatgggtaagctggagatgttgctgctgcccatccatggtttttgggtggtgcaacactactaggtacttctcagccctgccttgggtgtgccctacggcttcagagacc

SEQ ID NO: 283612 - DNA, 4655 bp, Homo sapiens
gaaagcaggatgcacgaggtggcggccctgcagcccttgagtggggcctcattcctggagatgcagcaaagagtttgccggtttgggcttgtggagggaaagtcagtctgaatgtagatggaactgtaggtcgcctggtcggcgctctggatgcagtgttggattccaatgcacgggtcgctccatttcgaattctgcttcaagttcccggctcccaggtttattctcccatagcatgtggtgagttactgaatggatcagacgtttactgggccatagccactggtgcaacattagaggaaatcaatcagcactgggactggctggaacaaaatctcctccacaccttgtctgtctttgataataaagatgacattgccagttttgtcaaagggaaggtaaaggctctgatagccgaggagaccagcagcaggctcgccgagcaggaggaggaacccgagaaattccgagaagccctggtgaagttcgaggccaggttcaacttccccgaggcggagaagctggtcacctactactcctgctgctgttggaagggcagggtgccccgccagggctggctgtacctcagcatcaaccacctctgcttctactccttcttcctgggcaaggaacttaaacttgtggttccgtgggttgatatccagaaattagaaagaacgtccaatgtctttctgacggataccatccgaatcaccacgcagaataaggagcgtgacttctccatgttcctgaacctggatgaggtgtttaaggtcatggagcagctggccgacgtgacgctgcgaaggctgctggataatgaggtctttgacctcgaccccgatctgcaggagccgagccagatcaccaagagggacctggaagccagagcacagaatgagttcttccgggctttcttcaggttgccgaggaaggagaagctgcacgcggttgtggactgttcgctctggacgccgttcagtcgctgtcacaccgcggggcggatgttcgcctctgacagctacatctgctttgccagcagagaagatggctgctgtaagatcatcctgccactcagagaggtggtgagcatcgagaagatggaggacacgagcctgctgccgcatcccatcattgtcagtatcagaagcaaggtggccttccagttcattgagctccgggaccgagacagcctggtggaggcgctgcttgcgaggttgaagcaggtccacgccaaccaccccgtgcactacgacacctctgcggatgatgacatggcttcactcgtgtttcattcaacaagcatgtgcagtgaccacagatttggggatcttgaaatgatgtcttctcaaaatagcgaggagagtgagaaagagaagagcccgctgatgcaccccgatgccctggtcaccgccttccagcagtcaggcagccagagccctgactcccgaatgtccagagaacagataaaaataagcctgtggaatgaccactttgtggaatacggcagaaccgtgtgtatgtttcgcacagagaagattcggaagctcgtagccatgggcatccctgaatctttgcgagggagactctggcttctcttctcagatgcggtgacggatcttgcctcacaccctggttactacgggaatctggtggaggagtccctggggaaatgctgcctggtaaccgaggagatagaacgagacctgcaccgctccctgccagagcaccccgccttccagaacgaaacgggaattgctgctttgaggagagtcttgacggcctatgcccaccggaaccccaagattggatactgccagtccatgaacatcctgacctccgtgctgctgctgtacaccaaggaggaggaagccttctggctgttggttgctgtgtgtgagcggatgctgcccgattacttcaaccaccgagtgatcggggcacaagttgaccagtctgtcttcgaggagctcatcaagggtcatctcccagagctggcagagcacatgaacgacctctcagccctggcgtccgtctctctctcgtggttcctgaccctgttcctcagcatcatgcctctagagagtgcggtgaatgtggtagactgcttcttctatgatggcatcaaagccatcttccagctgggactggctgtgcttgaggccaatgctgaggacctgtgcagcagcaaggatgatggccaggccttgatgatcctcagcaggtttctagatcacattaagaatgaggacagcccagggcccccagttggcagccaccatgcctttttctccgacgaccaggagccctaccctgtgactgatatttcggacctgatccgggattcctatgagaaatttggagaccagtctgtggagcagatcgagcacctacgttacaagcacaggatcagggtcctccaaggccacgaggacaccacaaagcagaacgtgcttcgagtcgttatcccggaagtctcaattcttcctgaagacctagaggagctctacgacttattcaagagagaacatatgatgagctgttactgggagcagcccaggcccatggcctcacgccacgaccccagccggccctatgctgagcagtaccgcatagacgcccggcagtttgcacacctgtttcagctagtctcgccctggacctgcggggcccacacggagatcctcgccgaaaggacgttcaggctcttggatgacaacatggaccagctcatcgagttcaaagcgtttgtgagctgcctcgatattatgtataatggagaaatgaatgagaagattaaactattatacaggcttcatatccctccagcactcactgaaaatgaccgagacagccagtcgccgttgaggaatcctctgttgtcaacatcgagacccctggttttcgggaaacccaatggcacgtacctcttttcattgttgctttcccctgcataccactgcagtggcgggaggcaccagggttgccctcatccctcttcttgtagcagccttgtcttttcccttcgtccaatgaattatccccaaactcactgcctttagaggacagaagtgctcctagtgggggtgttgctgggtggctgccccttgcccccaccaccaagttccttcctcctgtttgctgtttcacgggtcctcttagagcagaagtcccccagttaccacccactggctctccaggggaatctcttgctttccagttttgtatggaatttgcttagtggaattcctcacccccttgctcctctctcctacatagtttcctttttgctgtcactgaatttatttaaattaaaccacatattgttttcctttgtttcaaggtgatgcagttgattatcagaaacagctgaagcagatgattaaggatttagccaaagaaaaagataaaactgagaaagaattgcccaaaatgagccagagagaatttatccagttctgtaaaactctgtacagtatgttccatgaagatccagaagaaaatgatttgtatcaagccatcgccacagtcaccacactgctgctgcagatcggggaggtggggcagcgaggcagcagctctggaagctgctcccaggagtgtggggaggagctgcgggcttcagctccttctcctgaggactcggtttttgcagacactgggaagacgccccaggactcccaggcatttccagaggcggcagaaggggactggactgtctcccttgaacatattttagcttcacttctgactgaacagtcattagtcaacttttttgaaaagccactggacatgaaatccaaacttgaaaatgccaagatcaatcagtacaatctcaaaacttttgaaatgagccaccaatcacaatctgaacttaagctgagtaacttgtagcaagacagcagctgctatgcacactggagtccaccataccaaagcacgaaccagactgtttcttggggtcagccctaaaccgagatttcagtctaccttaccaatggggcatctggctaaacaacctgacaaactgtggccaggggaaccgacacaaccctcaagcatttctatgtattgagaattgtcagtgccctaaggtatccattggttcccttgatgccaacttacaatttttaccggatttgctgaaatgggcacttctgctgtgatgctagtgttgattttgctctcagatgaacacaatgtctcatactaaccaagaagcaagaaaagccccatgctttcatttttcacttggagtgacaatgggagaggtcaggaatcaagttcactttcaagatctaagggagtccactatctgtgcaattgtatttggcttttttttgcactgtttcaatgctggtaattgaaaccattttaatatatttggttgtattcactttatatgtccttccaaaaatgttgttgtgtacaaaccatgctttcaatgttggcttccaagttttttaataagaaactttttgtatttacttggtccttttcttttaccttgtagttaagtgtcttaagctgtagactgtggcagtgaatgggtaagctggagatgttgctgctgcccatccatggtttttgggtggtgcaacactactaggtacttctcagccctgccttgggtgtgccctacggcttcagagacc

SEQ ID NO: 283613 - DNA, 2199 bp, Homo sapiens
agatttagtgtatttatttctagagtactttatgtgtgcatggatatatttcagttttacaaaatgggatttcactacatacattttttccaaatcagtattagcagtgtccttctatgaatgtgtatgttgttaattacaacagtctccacatacctctgggaaaaggcacacttggtgtgggggacattttattttctctgggtatccagacagtgcttggtgtgcatttgggttcgtggaccctgcaaaaactacagtccacaggctgggagctgctggcttagcctttagttgcctagaaagctacattactgtcagttttggtaaggcagaaaatttgtttaatttaaacctctcatctttttttaagcactcactgaaaatgaccgagacagccagtcgccgttgaggaatcctctgttgtcaacatcgagacccctggttttcgggaaacccaatggcacgtacctcttttcattgttgctttcccctgcataccactgcagtggcgggaggcaccagggttgccctcatccctcttcttgtagcagccttgtcttttcccttcgtccaatgaattatccccaaactcactgcctttagaggacagaagtgctcctagtgggggtgttgctgggtggctgccccttgcccccaccaccaagttccttcctcctgtttgctgtttcacgggtcctcttagagcagaagtcccccagttaccacccactggctctccaggggaatctcttgctttccagttttgtatggaatttgcttagtggaattcctcacccccttgctcctctctcctacatagtttcctttttgctgtcactgaatttatttaaattaaaccacatattgttttcctttgtttcaaggtgatgcagttgattatcagaaacagctgaagcagatgattaaggatttagccaaagaaaaagataaaactgagaaagaattgcccaaaatgagccagagagaatttatccagttctgtaaaactctgtacagtatgttccatgaagatccagaagaaaatgatttgtatcaagccatcgccacagtcaccacactgctgctgcagatcggggaggtggggcagcgaggcagcagctctggaagctgctcccaggagtgtggggaggagctgcgggcttcagctccttctcctgaggactcggtttttgcagacactgggaagacgccccaggactcccaggcatttccagaggcggcagaaggggactggactgtctcccttgaacatattttagcttcacttctgactgaacagtcattagtcaacttttttgaaaagccactggacatgaaatccaaacttgaaaatgccaagatcaatcagtacaatctcaaaacttttgaaatgagccaccaatcacaatctgaacttaagctgagtaacttgtagcaagacagcagctgctatgcacactggagtccaccataccaaagcacgaaccagactgtttcttggggtcagccctaaaccgagatttcagtctaccttaccaatggggcatctggctaaacaacctgacaaactgtggccaggggaaccgacacaaccctcaagcatttctatgtattgagaattgtcagtgccctaaggtatccattggttcccttgatgccaacttacaatttttaccggatttgctgaaatgggcacttctgctgtgatgctagtgttgattttgctctcagatgaacacaatgtctcatactaaccaagaagcaagaaaagccccatgctttcatttttcacttggagtgacaatgggagaggtcaggaatcaagttcactttcaagatctaagggagtccactatctgtgcaattgtatttggcttttttttgcactgtttcaatgctggtaattgaaaccattttaatatatttggttgtattcactttatatgtccttccaaaaatgttgttgtgtacaaaccatgctttcaatgttggcttccaagttttttaataagaaactttttgtatttacttggtccttttcttttaccttgtagttaagtgtcttaagctgtagactgtggcagtgaatgggtaagctggagatgttgctgctgcccatccatggtttttgggtggtgcaacactactaggtacttctcagccctgccttgggtgtgccctacggcttcagagacc

SEQ ID NO: 283614 - DNA, 3616 bp, Homo sapiens
cgtcgtgccggaattcgtcgtcgtggtgccggaattcgtcgtggtggtgagcatcgagaagatggaggacacgagcctgctgccgcatcccatcattgtcagtatcagaagcaaggtggccttccagttcattgagctccgggaccgagacagcctggtggaggcgctgcttgcgaggttgaagcaggtccacgccaaccaccccgtgcactacgacacctctgcggatgatgacatggcttcactcgtgtttcattcaacaagcatgtgcagtgaccacagatttggggatcttgaaatgatgtcttctcaaaatagcgaggagagtgagaaagagaagagcccgctgatgcaccccgatgccctggtcaccgccttccagcagtcaggcagccagagccctgactcccgaatgtccagagaacagataaaaataagcctgtggaatgaccactttgtggaatacggcagaaccgtgtgtatgtttcgcacagagaagattcggaagctcgtagccatgggcatccctgaatctttgcgagggagactctggcttctcttctcagatgcggtgacggatcttgcctcacaccctggttactacgggaatctggtggaggagtccctggggaaatgctgcctggtaaccgaggagatagaacgagacctgcaccgctccctgccagagcaccccgccttccagaacgaaacgggaattgctgctttgaggagagtcttgacggcctatgcccaccggaaccccaagattggatactgccagtccatgaacatcctgacctccgtgctgctgctgtacaccaaggaggaggaagccttctggctgttggttgctgtgtgtgagcggatgctgcccgattacttcaaccaccgagtgatcggggcacaagttgaccagtctgtcttcgaggagctcatcaagggtcatctcccagagctggcagagcacatgaacgacctctcagccctggcgtccgtctctctctcgtggttcctgaccctgttcctcagcatcatgcctctagagagtgcggtgaatgtggtagactgcttcttctatgatggcatcaaagccatcttccagctgggactggctgtgcttgaggccaatgctgaggacctgtgcagcagcaaggatgatggccaggccttgatgatcctcagcaggtttctagatcacattaagaatgaggacagcccagggcccccagttggcagccaccatgcctttttctccgacgaccaggagccctaccctgtgactgatatttcggacctgatccgggattcctatgagaaatttggagaccagtctgtggagcagatcgagcacctacgttacaagcacaggatcagggtcctccaaggccacgaggacaccacaaagcagaacgtgcttcgagtcgttatcccggaagtctcaattcttcctgaagacctagaggagctctacgacttattcaagagagaacatatgatgagctgttactgggagcagcccaggcccatggcctcacgccacgaccccagccggccctatgctgagcagtaccgcatagacgcccggcagtttgcacacctgtttcagctagtctcgccctggacctgcggggcccacacggagatcctcgccgaaaggacgttcaggctcttggatgacaacatggaccagctcatcgagttcaaagcgtttgtgagctgcctcgatattatgtataatggagaaatgaatgagaagattaaactattatacaggcttcatatccctccagcactcactgaaaatgaccgagacagccagtcgccgttgaggaatcctctgttgtcaacatcgagacccctggttttcgggaaacccaatggcacgtacctcttttcattgttgctttcccctgcataccactgcagtggcgggaggcaccagggttgccctcatccctcttcttgtagcagccttgtcttttcccttcgtccaatgaattatccccaaactcactgcctttagaggacagaagtgctcctagtgggggtgttgctgggtggctgccccttgcccccaccaccaagttccttcctcctgtttgctgtttcacgggtcctcttagagcagaagtcccccagttaccacccactggctctccaggggaatctcttgctttccagttttgtatggaatttgcttagtggaattcctcacccccttgctcctctctcctacatagtttcctttttgctgtcactgaatttatttaaattaaaccacatattgttttcctttgtttcaaggtgatgcagttgattatcagaaacagctgaagcagatgattaaggatttagccaaagaaaaagataaaactgagaaagaattgcccaaaatgagccagagagaatttatccagttctgtaaaactctgtacagtatgttccatgaagatccagaagaaaatgatttgtatcaagccatcgccacagtcaccacactgctgctgcagatcggggaggtggggcagcgaggcagcagctctggaagctgctcccaggagtgtggggaggagctgcgggcttcagctccttctcctgaggactcggtttttgcagacactgggaagacgccccaggactcccaggcatttccagaggcggcagaaggggactggactgtctcccttgaacatattttagcttcacttctgactgaacagtcattagtcaacttttttgaaaagccactggacatgaaatccaaacttgaaaatgccaagatcaatcagtacaatctcaaaacttttgaaatgagccaccaatcacaatctgaacttaagctgagtaacttgtagcaagacagcagctgctatgcacactggagtccaccataccaaagcacgaaccagactgtttcttggggtcagccctaaaccgagatttcagtctaccttaccaatggggcatctggctaaacaacctgacaaactgtggccaggggaaccgacacaaccctcaagcatttctatgtattgagaattgtcagtgccctaaggtatccattggttcccttgatgccaacttacaatttttaccggatttgctgaaatgggcacttctgctgtgatgctagtgttgattttgctctcagatgaacacaatgtctcatactaaccaagaagcaagaaaagccccatgctttcatttttcacttggagtgacaatgggagaggtcaggaatcaagttcactttcaagatctaagggagtccactatctgtgcaattgtatttggcttttttttgcactgtttcaatgctggtaattgaaaccattttaatatatttggttgtattcactttatatgtccttccaaaaatgttgttgtgtacaaaccatgctttcaatgttggcttccaagttttttaataagaaactttttgtatttacttggtccttttcttttaccttgtagttaagtgtcttaagctgtagactgtggcagtgaatgggtaagctggagatgttgctgctgcccatccatggtttttgggtggtgcaacactactaggtacttctcagccctgccttgggtgtgccctacggcttcagagacc

SEQ ID NO: 283615 - DNA, 2498 bp, Homo sapiens
tatgtgtggatggtgccgaggtatgtgaggactgtgcgacagatgatggcaggctgatgatctcatagtttctagatcacattaagaatgaggacagcccagggcccccagttggcagccaccatgcctttttctccgacgaccaggagccctaccctgtgactgatatttcggacctgatccgggattcctatgagaaatttggagaccagtctgtggagcagatcgagcacctacgttacaagcacaggatcagggtcctccaaggccacgaggacaccacaaagcagaacgtgcttcgagtcgttatcccggaagtctcaattcttcctgaagacctagaggagctctacgacttattcaagagagaacatatgatgagctgttactgggagcagcccaggcccatggcctcacgccacgaccccagccggccctatgctgagcagtaccgcatagacgcccggcagtttgcacacctgtttcagctagtctcgccctggacctgcggggcccacacggagatcctcgccgaaaggacgttcaggctcttggatgacaacatggaccagctcatcgagttcaaagcgtttgtgagctgcctcgatattatgtataatggagaaatgaatgagaagattaaactattatacaggcttcatatccctccagcactcactgaaaatgaccgagacagccagtcgccgttgaggaatcctctgttgtcaacatcgagacccctggttttcgggaaacccaatggcacgtacctcttttcattgttgctttcccctgcataccactgcagtggcgggaggcaccagggttgccctcatccctcttcttgtagcagccttgtcttttcccttcgtccaatgaattatccccaaactcactgcctttagaggacagaagtgctcctagtgggggtgttgctgggtggctgccccttgcccccaccaccaagttccttcctcctgtttgctgtttcacgggtcctcttagagcagaagtcccccagttaccacccactggctctccaggggaatctcttgctttccagttttgtatggaatttgcttagtggaattcctcacccccttgctcctctctcctacatagtttcctttttgctgtcactgaatttatttaaattaaaccacatattgttttcctttgtttcaaggtgatgcagttgattatcagaaacagctgaagcagatgattaaggatttagccaaagaaaaagataaaactgagaaagaattgcccaaaatgagccagagagaatttatccagttctgtaaaactctgtacagtatgttccatgaagatccagaagaaaatgatttgtatcaagccatcgccacagtcaccacactgctgctgcagatcggggaggtggggcagcgaggcagcagctctggaagctgctcccaggagtgtggggaggagctgcgggcttcagctccttctcctgaggactcggtttttgcagacactgggaagacgccccaggactcccaggcatttccagaggcggcagaaggggactggactgtctcccttgaacatattttagcttcacttctgactgaacagtcattagtcaacttttttgaaaagccactggacatgaaatccaaacttgaaaatgccaagatcaatcagtacaatctcaaaacttttgaaatgagccaccaatcacaatctgaacttaagctgagtaacttgtagcaagacagcagctgctatgcacactggagtccaccataccaaagcacgaaccagactgtttcttggggtcagccctaaaccgagatttcagtctaccttaccaatggggcatctggctaaacaacctgacaaactgtggccaggggaaccgacacaaccctcaagcatttctatgtattgagaattgtcagtgccctaaggtatccattggttcccttgatgccaacttacaatttttaccggatttgctgaaatgggcacttctgctgtgatgctagtgttgattttgctctcagatgaacacaatgtctcatactaaccaagaagcaagaaaagccccatgctttcatttttcacttggagtgacaatgggagaggtcaggaatcaagttcactttcaagatctaagggagtccactatctgtgcaattgtatttggcttttttttgcactgtttcaatgctggtaattgaaaccattttaatatatttggttgtattcactttatatgtccttccaaaaatgttgttgtgtacaaaccatgctttcaatgttggcttccaagttttttaataagaaactttttgtatttacttggtccttttcttttaccttgtagttaagtgtcttaagctgtagactgtggcagtgaatgggtaagctggagatgttgctgctgcccatccatggtttttgggtggtgcaacactactaggtacttctcagccctgccttgggtgtgccctacggcttcagagacc

SEQ ID NO: 283616 - DNA, 3488 bp, Homo sapiens
gaaagcaggatgcacgaggtggcggccctgcagcccttgagtggggcctcattcctggagatgcagcaaagagtttgccggtttgggcttgtggagggaaagtcagtctgaatgtagatggaactgtaggtcgcctggtcggcgctctggatgcagtgttggattccaatgcacgggtcgctccatttcgaattctgcttcaagttcccggctcccaggtttattctcccatagcatgtggtgagttactgaatggatcagacgtttactgggccatagccactggtgcaacattagaggaaatcaatcagcactgggactggctggaacaaaatctcctccacaccttgtctgtctttgataataaagatgacattgccagttttgtcaaagggaaggtaaaggctctgatagccgaggagaccagcagcaggctcgccgagcaggaggaggaacccgagaaattccgagaagccctggtgaagttcgaggccaggttcaacttccccgaggcggagaagctggtcacctactactcctgctgctgttggaagggcagggtgccccgccagggctggctgtacctcagcatcaaccacctctgcttctactccttcttcctgggcaaggaacttaaacttgtggttccgtgggttgatatccagaaattagaaagaacgtccaatgtctttctgacggataccatccgaatcaccacgcagaataaggagcgtgacttctccatgttcctgaacctggatgaggtgtttaaggtcatggagcagctggccgacgtgacgctgcgaaggctgctggataatgaggtctttgacctcgaccccgatctgcaggagccgagccagatcaccaagagggacctggaagccagagcacagaatgagttcttccgggctttcttcaggttgccgaggaaggagaagctgcacgcggttgtggactgttcgctctggacgccgttcagtcgctgtcacaccgcggggcggatgttcgcctctgacagctacatctgctttgccagcagagaagatggctgctgtaagatcatcctgccactcagagaggtggtgagcatcgagaagatggaggacacgagcctgctgccgcatcccatcattgtcagtatcagaagcaaggtggccttccagttcattgagctccgggaccgagacagcctggtggaggcgctgcttgcgaggttgaagcaggtccacgccaaccaccccgtgcactacgacacctctgcggatgatgacatggcttcactcgtgtttcattcaacaagcatgtgcagtgaccacagatttggggatcttgaaatgatgtcttctcaaaatagcgaggagagtgagaaagagaagagcccgctgatgcaccccgatgccctggtcaccgccttccagcagtcaggcagccagagccctgactcccgaatgtccagagaacagataaaaataagcctgtggaatgaccactttgtggaatacggcagaaccgtgtgtatgtttcgcacagagaagattcggaagctcgtagccatgggcatccctgaatctttgcgagggagactctggcttctcttctcagatgcggtgacggatcttgcctcacaccctggttactacgggaatctggtggaggagtccctggggaaatgctgcctggtaaccgaggagatagaacgagacctgcaccgctccctgccagagcaccccgccttccagaacgaaacgggaattgctgctttgaggagagtcttgacggcctatgcccaccggaaccccaagattggatactgccagtccatgaacatcctgacctccgtgctgctgctgtacaccaaggaggaggaagccttctggctgttggttgctgtgtgtgagcggatgctgcccgattacttcaaccaccgagtgatcggggcacaagttgaccagtctgtcttcgaggagctcatcaagggtcatctcccagagctggcagagcacatgaacgacctctcagccctggcgtccgtctctctctcgtggttcctgaccctgttcctcagcatcatgcctctagagagtgcggtgaatgtggtagactgcttcttctatgatggcatcaaagccatcttccagctgggactggctgtgcttgaggccaatgctgaggacctgtgcagcagcaaggatgatggccaggccttgatgatcctcagcaggtttctagatcacattaagaatgaggacagcccagggcccccagttggcagccaccatgcctttttctccgacgaccaggagccctaccctgtgactgatatttcggacctgatccgggattcctatgagaaatttggagaccagtctgtggagcagatcgagcacctacgttacaagcacaggatcagggtcctccaaggccacgaggacaccacaaagcagaacgtgcttcgagtcgttatcccggaagtctcaattcttcctgaagacctagaggagctctacgacttattcaagagagaacatatgatgagctgttactgggagcagcccaggcccatggcctcacgccacgaccccagccggccctatgctgagcagtaccgcatagacgcccggcagtttgcacacctgtttcagctagtctcgccctggacctgcggggcccacacggagatcctcgccgaaaggacgttcaggctcttggatgacaacatggaccagctcatcgagttcaaagcgtttgtgagctgcctcgatattatgtataatggagaaatgaatgagaagattaaactattatacaggcttcatatccctccagcactcactgaaaatgaccgagacagccagtcgccgttgaggaatcctctgttgtcaacatcgagacccctggttttcgggaaacccaatggcacgtacctcttttcattgttgctttcccctgcataccactgcagtggcgggaggcaccagggttgccctcatccctcttcttgtagcagccttgtcttttcccttcgtccaatgaattatccccaaactcactgcctttagaggacagaagtgctcctagtgggggtgttgctgggtggctgccccttgcccccaccaccaagttccttcctcctgtttgctgtttcacgggtcctcttagagcagaagtcccccagttaccacccactggctctccaggggaatctcttgctttccagttttgtatggaatttgcttagtggaattcctcacccccttgctcctctctcctacatagtttcctttttgctgtcactgaatttatttaaattaaaccacatattgttttcctttgtttcaaggtgatgcagttgattatcagaaacagctgaagcagatgattaaggatttagccaaagaaaaagataaaactgagaaagaattgcccaaaatgagccaggtatggactttcttcagtgcagagaattaactttttttttttttttt

SEQ ID NO: 283617 - DNA, 517 bp, Homo sapiens
tttatttcccccatgccactttccagctgatcaagcagtattttttttaaaaaggctatcttttacccattgaattaccttggtctaaaagtcagaatcaatgaactaagcatggacgcttttctggactcaaattccatctctttgttctggttacctcagagtgattttaatttcagactgaccttagagagtgagtcctaccccagccagagccctgtgccctttcttttccaggggcacaagttgaccagtctgtcttcgaggagctcatcaagggtcatctcccagagctggcagagcacatgaacgacctctcagccctggcgtccgtctctctctcgtggttcctgaccctgttcctcagcatcatgcctctagagagtgcggtgaatgtggtagactgcttcttctatgatggcatcaaagccatcttccagctgggactggctgtgcttgaggccaatgctgaggacctgtgcagcagcaaggatgatggccaggccttgatgatcct

SEQ ID NO: 283618 - DNA, 303 bp, Homo sapiens
agcagctggccgacgtgacgctgcgaaggctgctggataatgaggtctttgacctcgaccccgatctgcaggagccgagccagatcaccaagaggtgaaagtgactgttctagagtgtctcccacccgcacgggggacccataagctgtgcccatcccttatgtacaagtgcttttgttagccttggttatgttagatttaaatttcccttgtggcataatccagatttttgtatgtcgttaatctcgacagagatatgacagaaatgatgattactcatttcatttatgcagtggacttcaa

SEQ ID NO: 283619 - DNA, 4572 bp, Homo sapiens
actcggccggcagcggaccgcagccaccagccgcccgcgccctccagccccgtccgggagtccccggcccgctgcggtgccgtgagtacctccaaccccctgcgccccggaggaggccgaggggcttagccaccagggctcggaagtgggggccgaatccggtgcgagacccaaggagaggggagcagagccggagttggggagactgtggctgaaaactgtgtcttcctggagactaggctggcattttgactttggggttgctgaaaagccaggagtcaaaatgactgagcgctttgactgccaccattgcaacgaatctctctttggcaagaggtacatcctgcgggaggagagcccctactgcgtggtgtgctttgagaccctgttcgccaacacctgcgaggagtgtgggaagcccatcggctgtgactgcaaggtgcaacattagaggaaatcaatcagcactgggactggctggaacaaaatctcctccacaccttgtctgtctttgataataaagatgacattgccagttttgtcaaagggaaggtaaagccgtgtgtctgggtggctgacggatgacacagctgagccattctcctcatcaggtgtgactgtcgttgaagcagcgcacacttctcgggggcctgtgcacctcagtccctcctgcttcctgtcccttgcaccccctgccttcccattgctggctcactgagcagggactgtcatctctgtgtgtcaggctctgatagccgaggagaccagcagcaggctcgccgagcaggaggaggaacccgagaaattccgagaagccctggtgaagttcgaggccaggttcaacttccccgaggcggagaagctggtcacctactactcctgctgctgttggaagggcagggtgccccgccagggctggctgtacctcagcatcaaccacctctgcttctactccttcttcctgggcaaggaacttaaacttgtggttccgtgggttgatatccagaaattagaaagaacgtccaatgtctttctgacggataccatccgaatcaccacgcagaataaggagcgtgacttctccatgttcctgaacctggatgaggtgtttaaggtcatggagcagctggccgacgtgacgctgcgaaggctgctggataatgaggtctttgacctcgaccccgatctgcaggagccgagccagatcaccaagagggacctggaagccagagcacagaatgagttcttccgggctttcttcaggttgccgaggaaggagaagctgcacgcggttgtggactgttcgctctggacgccgttcagtcgctgtcacaccgcggggcggatgttcgcctctgacagctacatctgctttgccagcagagaagatggctgctgtaagatcatcctgccactcagagaggtggtgagcatcgagaagatggaggacacgagcctgctgccgcatcccatcattgtcagtatcagaagcaaggtggccttccagttcattgagctccgggaccgagacagcctggtggaggcgctgcttgcgaggttgaagcaggtccacgccaaccaccccgtgcactacgacacctctgcggatgatgacatggcttcactcgtgtttcattcaacaagcatgtgcagtgaccacagatttggggatcttgaaatgatgtcttctcaaaatagcgaggagagtgagaaagagaagagcccgctgatgcaccccgatgccctggtcaccgccttccagcagtcaggcagccagagccctgactcccgaatgtccagagaacagataaaaataagcctgtggaatgaccactttgtggaatacggcagaaccgtgtgtatgtttcgcacagagaagattcggaagctcgtagccatgggcatccctgaatctttgcgagggagactctggcttctcttctcagatgcggtgacggatcttgcctcacaccctggttactacgggaatctggtggaggagtccctggggaaatgctgcctggtaaccgaggagatagaacgagacctgcaccgctccctgccagagcaccccgccttccagaacgaaacgggaattgctgctttgaggagagtcttgacggcctatgcccaccggaaccccaagattggatactgccagtccatgaacatcctgacctccgtgctgctgctgtacaccaaggaggaggaagccttctggctgttggttgctgtgtgtgagcggatgctgcccgattacttcaaccaccgagtgatcggggcacaagttgaccagtctgtcttcgaggagctcatcaagggtcatctcccagagctggcagagcacatgaacgacctctcagccctggcgtccgtctctctctcgtggttcctgaccctgttcctcagcatcatgcctctagagagtgcggtgaatgtggtagactgcttcttctatgatggcatcaaagccatcttccagctgggactggctgtgcttgaggccaatgctgaggacctgtgcagcagcaaggatgatggccaggccttgatgatcctcagcaggtttctagatcacattaagaatgaggacagcccagggcccccagttggcagccaccatgcctttttctccgacgaccaggagccctaccctgtgactgatatttcggacctgatccgggattcctatgagaaatttggagaccagtctgtggagcagatcgagcacctacgttacaagcacaggatcagggtcctccaaggccacgaggacaccacaaagcagaacgtgcttcgagtcgttatcccggaagtctcaattcttcctgaagacctagaggagctctacgacttattcaagagagaacatatgatgagctgttactgggagcagcccaggcccatggcctcacgccacgaccccagccggccctatgctgagcagtaccgcatagacgcccggcagtttgcacacctgtttcagctagtctcgccctggacctgcggggcccacacggagatcctcgccgaaaggacgttcaggctcttggatgacaacatggaccagctcatcgagttcaaagcgtttgtgagctgcctcgatattatgtataatggagaaatgaatgagaagattaaactattatacaggcttcatatccctccagcactcactgaaaatgaccgagacagccagtcgccgttgaggaatcctctgttgtcaacatcgagacccctggttttcgggaaacccaatggtgatgcagttgattatcagaaacagctgaagcagatgattaaggatttagccaaagaaaaagataaaactgagaaagaattgcccaaaatgagccagagagaatttatccagttctgtaaaactctgtacagtatgttccatgaagatccagaagaaaatgatttgtatcaagccatcgccacagtcaccacactgctgctgcagatcggggaggtggggcagcgaggcagcagctctggaagctgctcccaggagtgtggggaggagctgcgggcttcagctccttctcctgaggactcggtttttgcagacactgggaagacgccccaggactcccaggcatttccagaggcggcagaaggggactggactgtctcccttgaacatattttagcttcacttctgactgaacagtcattagtcaacttttttgaaaagccactggacatgaaatccaaacttgaaaatgccaagatcaatcagtacaatctcaaaacttttgaaatgagccaccaatcacaatctgaacttaagctgagtaacttgtagcaagacagcagctgctatgcacactggagtccaccataccaaagcacgaaccagactgtttcttggggtcagccctaaaccgagatttcagtctaccttaccaatggggcatctggctaaacaacctgacaaactgtggccaggggaaccgacacaaccctcaagcatttctatgtattgagaattgtcagtgccctaaggtatccattggttcccttgatgccaacttacaatttttaccggatttgctgaaatgggcacttctgctgtgatgctagtgttgattttgctctcagatgaacacaatgtctcatactaaccaagaagcaagaaaagccccatgctttcatttttcacttggagtgacaatgggagaggtcaggaatcaagttcactttcaagatctaagggagtccactatctgtgcaattgtatttggcttttttttgcactgtttcaatgctggtaattgaaaccattttaatatatttggttgtattcactttatatgtccttccaaaaatgttgttgtgtacaaaccatgctttcaatgttggcttccaagttttttaataagaaactttttgtatttacttggtccttttcttttaccttgtagttaagtgtcttaagctgtagactgtggcagtgaatgggtaagctggagatgttgctgctgcccatccatggtttttgggtggtgcaacactactaggtacttctcagccctgccttgggtgtgccctacggcttcagagacc

SEQ ID NO: 283620 - DNA, 1286 bp, Homo sapiens
aggtatgtttaaaaaaaaaaatgacacttccaccctggttctgctgctacctaagacttatttcaatttcagagagaatttatccagttctgtaaaactctgtacagtatgttccatgaagatccagaagaaaatgatttgtatcaagccatcgccacagtcaccacactgctgctgcagatcggggaggtggggcagcgaggcagcagctctggaagctgctcccaggagtgtggggaggagctgcgggcttcagctccttctcctgaggactcggtttttgcagacactgggaagacgccccaggactcccaggcatttccagaggcggcagaaggggactggactgtctcccttgaacatattttagcttcacttctgactgaacagtcattagtcaacttttttgaaaagccactggacatgaaatccaaacttgaaaatgccaagatcaatcagtacaatctcaaaacttttgaaatgagccaccaatcacaatctgaacttaagctgagtaacttgtagcaagacagcagctgctatgcacactggagtccaccataccaaagcacgaaccagactgtttcttggggtcagccctaaaccgagatttcagtctaccttaccaatggggcatctggctaaacaacctgacaaactgtggccaggggaaccgacacaaccctcaagcatttctatgtattgagaattgtcagtgccctaaggtatccattggttcccttgatgccaacttacaatttttaccggatttgctgaaatgggcacttctgctgtgatgctagtgttgattttgctctcagatgaacacaatgtctcatactaaccaagaagcaagaaaagccccatgctttcatttttcacttggagtgacaatgggagaggtcaggaatcaagttcactttcaagatctaagggagtccactatctgtgcaattgtatttggcttttttttgcactgtttcaatgctggtaattgaaaccattttaatatatttggttgtattcactttatatgtccttccaaaaatgttgttgtgtacaaaccatgctttcaatgttggcttccaagttttttaataagaaactttttgtatttacttggtccttttcttttaccttgtagttaagtgtcttaagctgtagactgtggcagtgaatgggtaagctggagatgttgctgctgcccatccatggtttttgggtggtgcaacactactaggtacttctcagccctgccttgggtgtgccctacggcttcagagacc

SEQ ID NO: 283621 - DNA, 754 bp, Homo sapiens
actgtcgctgctagaggacggtcattccactgtacagtgtcagtgtggttggtgtatgctggatctctcacctatgaaatctttacttttgtgggttgtttgggcttggatgcttgtaacatctctgtggcatcacatgggccagtcagtaactgccctccttgacccccgagcagtccatgaacatcctgacctccgtgctgctgctgtacaccaaggaggaggaagccttctggctgttggttgctgtgtgtgagcggatgctgcccgattacttcaaccaccgagtgatcggggcacaagttgaccagtctgtcttcgaggagctcatcaagggtcatctcccagagctggcagagcacatgaacgacctctcagccctggcgtccgtctctctctcgtggttcctgaccctgttcctcagcatcatgcctctagagagtgcggtgaatgtggtagactgcttcttctatgatggcatcaaagccatcttccagctgggactggctgtgcttgaggccaatgctgaggacctgtgcagcagcaaggatgatggccaggccttgatgatcctcagcaggtttctagatcacattaagaatgaggacagcccagggcccccagttggcagccaccatgcctttttctccgacgaccaggagccctaccctgtgactgatatttcggacctgatccgggattcctatgagaatttggagacccgtctagagcgtaatcggtaccgagctcgatt

SEQ ID NO: 283622 - DNA, 180 bp, Homo sapiens
ctcggtacccggatattttcttcttccggccctatgctgagcagtaccgcatagacgcccggcagtttgcacacctgtttcagctagtctcgccctggacctgcggggcgctcgttgaagttgacagaagggcaatgacgaatgccctggcaccaaccgctgccggaagaagaaaatgat

SEQ ID NO: 283623 - DNA, 3011 bp, Homo sapiens
actgtcgctgctagaggacggtcattccactgtacagtgtcagtgtggttggtgtatgctggatctctcacctatgaaatctttacttttgtgggttgtttgggcttggatgcttgtaacatctctgtggcatcacatgggccagtcagtaactgccctccttgacccccgagcagtccatgaacatcctgacctccgtgctgctgctgtacaccaaggaggaggaagccttctggctgttggttgctgtgtgtgagcggatgctgcccgattacttcaaccaccgagtgatcggggcacaagttgaccagtctgtcttcgaggagctcatcaagggtcatctcccagagctggcagagcacatgaacgacctctcagccctggcgtccgtctctctctcgtggttcctgaccctgttcctcagcatcatgcctctagagagtgcggtgaatgtggtagactgcttcttctatgatggcatcaaagccatcttccagctgggactggctgtgcttgaggccaatgctgaggacctgtgcagcagcaaggatgatggccaggccttgatgatcctcagcaggtttctagatcacattaagaatgaggacagcccagggcccccagttggcagccaccatgcctttttctccgacgaccaggagccctaccctgtgactgatatttcggacctgatccgggattcctatgagaaatttggagaccagtctgtggagcagatcgagcacctacgttacaagcacaggatcagggtcctccaaggccacgaggacaccacaaagcagaacgtgcttcgagtcgttatcccggaagtctcaattcttcctgaagacctagaggagctctacgacttattcaagagagaacatatgatgagctgttactgggagcagcccaggcccatggcctcacgccacgaccccagccggccctatgctgagcagtaccgcatagacgcccggcagtttgcacacctgtttcagctagtctcgccctggacctgcggggcccacacggagatcctcgccgaaaggacgttcaggctcttggatgacaacatggaccagctcatcgagttcaaagcgtttgtgagctgcctcgatattatgtataatggagaaatgaatgagaagattaaactattatacaggcttcatatccctccagcactcactgaaaatgaccgagacagccagtcgccgttgaggaatcctctgttgtcaacatcgagacccctggttttcgggaaacccaatggcacgtacctcttttcattgttgctttcccctgcataccactgcagtggcgggaggcaccagggttgccctcatccctcttcttgtagcagccttgtcttttcccttcgtccaatgaattatccccaaactcactgcctttagaggacagaagtgctcctagtgggggtgttgctgggtggctgccccttgcccccaccaccaagttccttcctcctgtttgctgtttcacgggtcctcttagagcagaagtcccccagttaccacccactggctctccaggggaatctcttgctttccagttttgtatggaatttgcttagtggaattcctcacccccttgctcctctctcctacatagtttcctttttgctgtcactgaatttatttaaattaaaccacatattgttttcctttgtttcaaggtgatgcagttgattatcagaaacagctgaagcagatgattaaggatttagccaaagaaaaagataaaactgagaaagaattgcccaaaatgagccagagagaatttatccagttctgtaaaactctgtacagtatgttccatgaagatccagaagaaaatgatttgtatcaagccatcgccacagtcaccacactgctgctgcagatcggggaggtggggcagcgaggcagcagctctggaagctgctcccaggagtgtggggaggagctgcgggcttcagctccttctcctgaggactcggtttttgcagacactgggaagacgccccaggactcccaggcatttccagaggcggcagaaggggactggactgtctcccttgaacatattttagcttcacttctgactgaacagtcattagtcaacttttttgaaaagccactggacatgaaatccaaacttgaaaatgccaagatcaatcagtacaatctcaaaacttttgaaatgagccaccaatcacaatctgaacttaagctgagtaacttgtagcaagacagcagctgctatgcacactggagtccaccataccaaagcacgaaccagactgtttcttggggtcagccctaaaccgagatttcagtctaccttaccaatggggcatctggctaaacaacctgacaaactgtggccaggggaaccgacacaaccctcaagcatttctatgtattgagaattgtcagtgccctaaggtatccattggttcccttgatgccaacttacaatttttaccggatttgctgaaatgggcacttctgctgtgatgctagtgttgattttgctctcagatgaacacaatgtctcatactaaccaagaagcaagaaaagccccatgctttcatttttcacttggagtgacaatgggagaggtcaggaatcaagttcactttcaagatctaagggagtccactatctgtgcaattgtatttggcttttttttgcactgtttcaatgctggtaattgaaaccattttaatatatttggttgtattcactttatatgtccttccaaaaatgttgttgtgtacaaaccatgctttcaatgttggcttccaagttttttaataagaaactttttgtatttacttggtccttttcttttaccttgtagttaagtgtcttaagctgtagactgtggcagtgaatgggtaagctggagatgttgctgctgcccatccatggtttttgggtggtgcaacactactaggtacttctcagccctgccttgggtgtgccctacggcttcagagacc

SEQ ID NO: 283624 - DNA, 2959 bp, Homo sapiens
gaaagcaggatgcacgaggtggcggccctgcagcccttgagtggggcctcattcctggagatgcagcaaagagtttgccggtttgggcttgtggagggaaagtcagtctgaatgtagatggaactgtaggtcgcctggtcggcgctctggatgcagtgttggattccaatgcacgggtcgctccatttcgaattctgcttcaagttcccggctcccaggtttattctcccatagcatgtggtgagttactgaatggatcagacgtttactgggccatagccactggtgcaacattagaggaaatcaatcagcactgggactggctggaacaaaatctcctccacaccttgtctgtctttgataataaagatgacattgccagttttgtcaaagggaaggtaaaggctctgatagccgaggagaccagcagcaggctcgccgagcaggaggaggaacccgagaaattccgagaagccctggtgaagttcgaggccaggttcaacttccccgaggcggagaagctggtcacctactactcctgctgctgttggaagggcagggtgccccgccagggctggctgtacctcagcatcaaccacctctgcttctactccttcttcctgggcaaggaacttaaacttgtggttccgtgggttgatatccagaaattagaaagaacgtccaatgtctttctgacggataccatccgaatcaccacgcagaataaggagcgtgacttctccatgttcctgaacctggatgaggtgtttaaggtcatggagcagctggccgacgtgacgctgcgaaggctgctggataatgaggtctttgacctcgaccccgatctgcaggagccgagccagatcaccaagagggacctggaagccagagcacagaatgagttcttccgggctttcttcaggttgccgaggaaggagaagctgcacgcggttgtggactgttcgctctggacgccgttcagtcgctgtcacaccgcggggcggatgttcgcctctgacagctacatctgctttgccagcagagaagatggctgctgtaagatcatcctgccactcagagaggtggtgagcatcgagaagatggaggacacgagcctgctgccgcatcccatcattgtcagtatcagaagcaaggtggccttccagttcattgagctccgggaccgagacagcctggtggaggcgctgcttgcgaggttgaagcaggtccacgccaaccaccccgtgcactacgacacctctgcggatgatgacatggcttcactcgtgtttcattcaacaagcatgtgcagtgaccacagatttggggatcttgaaatgatgtcttctcaaaatagcgaggagagtgagaaagagaagagcccgctgatgcaccccgatgccctggtcaccgccttccagcagtcaggcagccagagccctgactcccgaatgtccagagaacagataaaaataagcctgtggaatgaccactttgtggaatacggcagaaccgtgtgtatgtttcgcacagagaagattcggaagctcgtagccatgggcatccctgaatctttgcgagggagactctggcttctcttctcagatgcggtgacggatcttgcctcacaccctggttactacgggaatctggtggaggagtccctggggaaatgctgcctggtaaccgaggagatagaacgagacctgcaccgctccctgccagagcaccccgccttccagaacgaaacgggaattgctgctttgaggagagtcttgacggcctatgcccaccggaaccccaagattggatactgccagtccatgaacatcctgacctccgtgctgctgctgtacaccaaggaggaggaagccttctggctgttggttgctgtgtgtgagcggatgctgcccgattacttcaaccaccgagtgatcggggcacaagttgaccagtctgtcttcgaggagctcatcaagggtcatctcccagagctggcagagcacatgaacgacctctcagccctggcgtccgtctctctctcgtggttcctgaccctgttcctcagcatcatgcctctagagagtgcggtgaatgtggtagactgcttcttctatgatggcatcaaagccatcttccagctgggactggctgtgcttgaggccaatgctgaggacctgtgcagcagcaaggatgatggccaggccttgatgatcctcagcaggtttctagatcacattaagaatgaggacagcccagggcccccagttggcagccaccatgcctttttctccgacgaccaggagccctaccctgtgactgatatttcggacctgatccgggattcctatgagaaatttggagaccagtctgtggagcagatcgagcacctacgttacaagcacaggatcagggtcctccaaggccacgaggacaccacaaagcagaacgtgcttcgagtcgttatcccggaagtctcaattcttcctgaagacctagaggagctctacgacttattcaagagagaacatatgatgagctgttactgggagcagcccaggcccatggcctcacgccacgaccccagccggccctatgctgagcagtaccgcatagacgcccggcagtttgcacacctgtttcagctagtctcgccctggacctgcggggcccacacggagatcctcgccgaaaggacgttcaggctcttggatgacaacatggaccagctcatcgagttcaaagcgtttgtgagctgcctcgatattatgtataatggagaaatgaatgagaagattaaactattatacaggcttcatatccctccagcactcactgaaaatgaccgagacagccagtcgccgttgaggaatcctctgttgtcaacatcgagacccctggttttcgggaaacccaatggtgatgcagttgattatcagtaacagctaccttgcccggt

SEQ ID NO: 283625 - DNA, 2232 bp, Homo sapiens
gaaagcaggatgcacgaggtggcggccctgcagcccttgagtggggcctcattcctggagatgcagcaaagagtttgccggtttgggcttgtggagggaaagtcagtctgaatgtagatggaactgtaggtcgcctggtcggcgctctggatgcagtgttggattccaatgcacgggtcgctccatttcgaattctgcttcaagttcccggctcccaggtttattctcccatagcatgtggtgagttactgaatggatcagacgtttactgggccatagccactggtgcaacattagaggaaatcaatcagcactgggactggctggaacaaaatctcctccacaccttgtctgtctttgataataaagatgacattgccagttttgtcaaagggaaggtaaaggctctgatagccgaggagaccagcagcaggctcgccgagcaggaggaggaacccgagaaattccgagaagccctggtgaagttcgaggccaggttcaacttccccgaggcggagaagctggtcacctactactcctgctgctgttggaagggcagggtgccccgccagggctggctgtacctcagcatcaaccacctctgcttctactccttcttcctgggcaaggaacttaaacttgtggttccgtgggttgatatccagaaattagaaagaacgtccaatgtctttctgacggataccatccgaatcaccacgcagaataaggagcgtgacttctccatgttcctgaacctggatgaggtgtttaaggtcatggagcagctggccgacgtgacgctgcgaaggctgctggataatgaggtctttgacctcgaccccgatctgcaggagccgagccagatcaccaagagggacctggaagccagagcacagaatgagttcttccgggctttcttcaggttgccgaggaaggagaagctgcacgcggttgtggactgttcgctctggacgccgttcagtcgctgtcacaccgcggggcggatgttcgcctctgacagctacatctgctttgccagcagagaagatggctgctgtaagatcatcctgccactcagagaggtggtgagcatcgagaagatggaggacacgagcctgctgccgcatcccatcattgtcagtatcagaagcaaggtggccttccagttcattgagctccgggaccgagacagcctggtggaggcgctgcttgcgaggttgaagcaggtccacgccaaccaccccgtgcactacgacacctctgcggatgatgacatggcttcactcgtgtttcattcaacaagcatgtgcagtgaccacagatttggggatcttgaaatgatgtcttctcaaaatagcgaggagagtgagaaagagaagagcccgctgatgcaccccgatgccctggtcaccgccttccagcagtcaggcagccagagccctgactcccgaatgtccagagaacagataaaaataagcctgtggaatgaccactttgtggaatacggcagaaccgtgtgtatgtttcgcacagagaagattcggaagctcgtagccatgggcatccctgaatctttgcgagggagactctggcttctcttctcagatgcggtgacggatcttgcctcacaccctggttactacgggaatctggtggaggagtccctggggaaatgctgcctggtaaccgaggagatagaacgagacctgcaccgctccctgccagagcaccccgccttccagaacgaaacgggaattgctgctttgaggagagtcttgacggcctatgcccaccggaaccccaagattggatactgccaggtgaaaggggtgtgctctggggcgcagagagtctttagttggtgtctcatgttgtccttcccagggtttcatttgcattcccagtcatctggtcctgagtgttgtcgtgtgaaggcgctgtactcggtccctttccggaaagaaagtatcaaatgagggccaaagggactactcatcttataatcaacggatcatgaggtcaggagatcgagaccatcctggccaacatggtgaaaccccatctactaaaaatacaaaaattagctgggcatggtggcgcgtgcctgtaatcccagctactcaggaggctgaggcaggagaatcacttgaaccagggagtcgcaggttgcggtgagccgagatcatgccactgcattccagcctggcaacagagcgagactctgtctcaaaa

SEQ ID NO: 283626 - DNA, 558 bp, Homo sapiens
gccctatgctgagcagtaccgcatagacgcccggcagtttgcacacctgtttcagctagtctcgccctggacctgcggggcccacacggagatcctcgccgaaaggacgttcaggctcttggatgacaacatggaccagctcatcgagttcaaagcgtttgtgagctgcctcggtatgcctctgtgggatttcgcagtgatgtgctttggggtgtgggtctgtgagcagaacacaaagtggatcttcggagcaggcagatgcacatggtgtaacacttttgtgactggcctgacatgaacttatgattttgaaatatcactctgcaggcccctctcaggatctactttctgaagggggatgggagaggggcccacgctctcaacatacgaggctgttcaccttgctttccttggcatccacgatgtggtggtggcttgttgggagccatgttcctaacttttgtccataaaattaaaatgttttggaaggtatgaggccagacaacattcacaaagttccgtggagctcacatagtcaccagcccagtctttaacact

SEQ ID NO: 283627 - DNA, 1032 bp, Homo sapiens
aagaggaccctgggaaggtggctcccgcctcactcctagagtgaaatcctcgcagccctgccctcgcgggcggagcagagacgccgccgcttggccggttcacgcctgtcacacaaagccgccgagggtcggctgcgcccctggcaaggctgtagggctggggatactgagtatgacaggcgaggtccctgctctcaagaacttacatgggagagaaggggagacaagataaacagatggagcaactcaacccaaaaaggttggtctgtatggtgacggaatgtggtctcccagttttcagcacagcactcattcagctattctgctcttcagaaagcaggagggatgtgccctaaggtggactattgaaatgatgaaagccactgaggaagagccagagaattctcgtagctgtgattagacatcaaccttgggcatgctaaacatttcagcctggacaccctgagaagagccagtgccactggtgacagctgcttctgtgcgggcttttgcttggccagagaggcaggaccttctccctggcattttgaggagtggtgccgggtgggcagtgactgcactagcaacagtctataccaagagaagacctcaaattcccagagaagaaaggcagcgaggccaagaaatgctgccgccgcttaacaagtgaagatgcatactggagaataggaactgaacacgcgaaggagtttcggctttactgccttctctcctagcattgaacagatcttctctgctgttgattattctccatgaatcatcatccatagaaagtgactgaggcaatagagagtgaataatgaatctctcaaatagtcttttgtgtttctgcctggagggttttggaaataacttgcatcttaatctttctgacttagaatcatagaatttgggagctgaaaaggaccttcatcagggcatgtggcctcacagaaagactggaagaaaagatttgtgggtatgagcctctggttcatcactaaaaataggcctagtctaacatatattgga

SEQ ID NO: 283628 - DNA, 877 bp, Homo sapiens
aagaggaccctgggaaggtggctcccgcctcactcctagagtgaaatcctcgcagccctgccctcgcgggcggagcagagacgccgccgcttggccggttcacgcctgtcacacaaagccgccgagggtcggctgcgcccctggcaaggctgtagggctggggatactgagtatgacaggcgaggtccctgctctcaagaacttacatgggagagaaggggagacaagataaacaggagccagagaattctcgtagctgtgattagacatcaaccttgggcatgctaaacatttcagcctggacaccctgagaagagccagtgccactggtgacagctgcttctgtgcgggcttttgcttggccagagaggcaggaccttctccctggcattttgaggagtggtgccgggtgggcagtgactgcactagcaacagtctataccaagagaagacctcaaattcccagagaagaaaggcagcgaggccaagaaatgctgccgccgcttaacaagtgaagatgcatactggagaataggaactgaacacgcgaaggagtttcggctttactgccttctctcctagcattgaacagatcttctctgctgttgattattctccatgaatcatcatccatagaaagtgactgaggcaatagagagtgaataatgaatctctcaaatagtcttttgtgtttctgcctggagggttttggaaataacttgcatcttaatctttctgacttagaatcatagaatttgggagctgaaaaggaccttcatcagggcatgtggcctcacagaaagactggaagaaaagatttgtgggtatgagcctctggttcatcactaaaaataggcctagtctaacatatattgga

SEQ ID NO: 283629 - DNA, 719 bp, Homo sapiens
gaggccgggcaggctgcaatgggggagggctgccatggggccagggcggaggaagcaggtccggcagagctggggagccgaccggccgaagggcatcctagcgtggccggactcacaggaatgcggtccagcccaggagagtccttccccaccagagctacgtgagcgtggcgggagcaaagcccggccggcggggcagcgggaagcgcggcccggccggccgagggggtctggcggggacccccgcgctggtcaagtggccgggtccgctgaaggctccgggagccggggcacggcgcgaggggagggcgcggcccgcgcggcactcactctcggtgacccggctgaggcgcaggacgtgctcgggccggatggtgtccagcgccagcagctcctgctccgtgaccgctgccccgacgccgtcgtcggccgcgtggtggggcgcctgccgccgcgccttcaggcggttcaggacgccgccgcccgccttcttcttctcctccttgccagccaccagcccccccgggcccagccgccgacgccgcggccgcagccttcgggttagacccgctcatcgctccgccgccaagatggccgccgcctccacagcgcgggatgatggcaaatgtaacctcttcacctgcaattccacatctaggaatttaccctacctgcatgcacagagatttgtaatattgacaaattacaataaattacat

SEQ ID NO: 283630 - DNA, 1022 bp, Homo sapiens
gaggccgggcaggctgcaatgggggagggctgccatggggccagggcggaggaagcaggtccggcagagctggggagccgaccggccgaagggcatcctagcgtggccggactcacaggaatgcggtccagcccaggagagtccttccccaccagagctacgtgagcgtggcgggagcaaagcccggccggcggggcagcgggaagcgcggcccggccggccgagggggtctggcggggacccccgcgctggtcaagtggccgggtccgctgaaggctccgggagccggggcacggcgcgaggggagggcgcggcccgcgcggcactcactctcggtgacccggctgaggcgcaggacgtgctcgggccggatggtgtccagcgccagcagctcctgctccgtgaccgctgccccgacgccgtcgtcggccgcgtggtggggcgcctgccgccgcgccttcaggcggttcaggacgccgccgcccgccttcttcttctcctccttgccagccaccagcccccccgggcccagccgccgacgccgcggccgcagccttcgggttagacccgctcatcgctccgccgccaagatggccgccgcctccacagcgcggtaactatggagagcgggggcggggcccggggcccggcggggaaggggcggggagggggcggggcgggggcgggggcgggcgcccggggggctgtggaattccctttcgcacagggtggaccaaggcccactctccccaaacttccatccccaaataactagagctgccatcagcaacctgaggtgcacatgagcagccctgggctgactcctatagcaattcagcggacgacaccatggcagccttcgatccattcagggaatgctgctgctgccacagggttaggagaccgcaggccaggagtgatgggcaggccaagataggcctaactgggtgactgcacactcctgcggggcccggggggcggtgcttcggctactgccccaactttggtcctgccaggtggag

SEQ ID NO: 283631 - DNA, 447 bp, Homo sapiens
cctccgcagggcgggacaagctgagccgaaaccacacctgcagcttcagcgattggtggagaagttcaagtaggcactttctacgaggggaggagtccaattagtggactagcccaagactgaaacagctgattttcgagaacccgcgcgtgagccccggaaccgaaactagcttgaggagcctggagacgccaagggctccatgggaaggggtgggaccggaatttcgacgccttgggataggaagaggagggctgagaaacttcaaaactgatcttagttcaagaaagaagttactattcagtgatcaccgaggctctaacaagtggagcctagattcgaaaccaaaccctgtgacttcaacacccaaacatttacgttcttacgttttactgtacagccttcctcctggataaatcagattaaaattttgaagacatgtatata

SEQ ID NO: 283632 - DNA, 861 bp, Homo sapiens
cctgttctatggacgtgactgtttccaccgagtcgtcctgcaaccgctctcgcgcgtgctcgggcctcagactgtacagcggctctgaccagacgggggaggaagatggagggcaatagtaggtgaaagaactcggagaagccatgatcaggagagcagcagacagtgtgtaggactctgcttcgttaagcaacaacgcgcattgaaactcgagcgggctaaagcgctacggcgagcggatagaggcaaaaagattttgaacgcgaatgtctcctcccgcctacccgtctttcgagtgagttactgagatgctgccgccccccattgggcagaggagctgctgcaagagcgtagagtcctgaagcgcaagggtgtctacatccgaatttcatttcagcgagatggcgtaggacgcctcggtgcccaagaacccaatgaatgttaagtttgaaagcatttctgacagctctactgatttgcctcagtcaggcaattactaaaagaattattgtgcaccttggggtacttgacagcctcccaggagaaggcagcagctgctcaaacgtgcaaggacgccgtctcagtatcactcagtgatggagggaggggggtattatgattttctcctgtctcttggaggttacactgcagtagcgagaactgaaatgcagtacaaggaacaaggataagtgaaatagacagtcagtccgcagatatttatggaacacctgctatgtgtcaggcattgtgctaggttctaggaatacaaaagtgaacaaaacgaagtcccttcccttggaaaccttacattctaagaaaatcgacagaattgaatgtatccaacgcaataaatatatgaag

SEQ ID NO: 283633 - DNA, 466 bp, Homo sapiens
  misc_feature (1)..(1): n is a, c, g, or t
  misc_feature (461)..(466): n is a, c, g, or t
ngacatattcagaacatggcagcttctagaattggttcaatcttctgctcgagtggcagtggccaaaggcctggagccgaccaaggagaggttatctaggtaagaatcatcagtggctgatcatccctcaaagacaaacaactagacaagatgtggctcctgatggaagaacgcaggccaccacctacaaagcaccctggctgcctccctcccccaggaaacaaggcatgaagagaaaaccaacctctcctttctggttgatgatgggaacagcgtattgtaacttcacatcatagaaaagtgactcgaggaagacattggccaccccaatgagactgtgattttcctgctcatcatagaatggatcagcacgtttgaagtatgatcgtattacctgtaaagagattgagaacacacaacttcagaaaaaccatttacaataaatgcattcaacctaaaannnnnn

SEQ ID NO: 283634 - DNA, 443 bp, Homo sapiens
  misc_feature (438)..(443): n is a, c, g, or t
tactaggatgaagctgggacttaccatgcacaccagtttgttctcctgggtctccttctcaaaggagacctctgccacctcatcgcctcctgcgatcctctccccaacatcaccactgagtcgcatcacctccacgtgcagccgacctgccacctgcagcaatgagggaaggcagaaacatttctccagatttggaaacaaggcatgaagagaaaaccaacctctcctttctggttgatgatgggaacagcgtattgtaacttcacatcatagaaaagtgactcgaggaagacattggccaccccaatgagactgtgattttcctgctcatcatagaatggatcagcacgtttgaagtatgatcgtattacctgtaaagagattgagaacacacaacttcagaaaaaccatttacaataaatgcattcaacctaaaannnnnn

SEQ ID NO: 283635 - DNA, 452 bp, Homo sapiens
ataaattggagtgtttctgcaaattctaagaggttcttaacattatccagaatggtgccctggtggacgatcatgcaccttgctggcgaggcgctttcttcaggtccataaatgcttgctgtgagtgaagaactgaagaactgtcctatttgcattctaaccacaaaaaagctagaggactcaggagttagagttgctttgatctacacatattcttgttgcttctatccctttctaatgctacagattgcactgatgcagtgaagcactgccaaatcaacgtggttaggaaagcagaagagcaaattaacagaagtctccttacagtatgaccacacaacaggagaaattgcaaaacattaactaaagttaaaaagtggtcgaactagcatgtgcacataaacatcttattatttaacaaaaaataaatttacccctaggaatacctactg

SEQ ID NO: 283636 - DNA, 4203 bp, Homo sapiens
atttttggctgcctctgtcggtctgttcagttaccacgtgaaccgccgacggagacccgtagtgggggaggcggcggcagcgttaagtgagaaaggaaaaaagacaacgaggaaaaaggaggtgtccgggtagggcaacgcggcgacacccgaggcctggtggtggcggcggatcgagatattcaaggctgaagcagctacggaacggcagcggcggcggtcggacaaactgactgaccgagccgggtggtggcgggagcagcgggagcagccggaacgatgccggccgtgagcctcccgcccaaggagaatgcgctcttcaagcggatcttgaggtgttatgaacataaacagtatagaaatggattgaaattctgtaaacaaatactttctaatcccaaatttgcagagcatggagaaaccttggctatgaaaggattaacattgaactgtttggggaaaaaggaagaagcttatgaattggttcgtagaggtttgagaaatgacttgaagagtcatgtgtgttggcacgtttatggccttcttcagaggtcagacaagaagtatgatgaagccattaagtgttacagaaatgcactaaaatgggataaagacaatcttcaaatcttaagggacctttccttactacagattcaaatgcgagatcttgagggttacagggaaacgaggtatcagttacttcagcttcgacctgcgcagagagcatcatggattggttatgctattgcttaccatttattagaagattatgaaatggcagcaaagattttagaagaatttaggaaaacacaacagacatcccctgacaaggtggattatgaatatagtgaactactcttatatcagaatcaagttcttcgggaagcaggtctctatagagaagctttggaacatctttgtacctatgaaaagcagatttgtgataaacttgctgtagaagaaaccaaaggggaacttctgttgcaactatgtcgtttggaagatgctgcagatgtttatagaggattgcaagagagaaatcctgaaaactgggcctattacaaaggcttggaaaaagcactcaagccagctaatatgttagaacggctaaaaatttatgaggaagcctggactaaatatcccaggggactggtgccaagaaggctgccgttaaactttttatctggtgagaagtttaaagaatgtttggataagttcctaaggatgaatttcagcaagggttgcccaccagtcttcaatactttaagatcattatacaaagacaaagaaaaggtggcaatcatagaagagttagtagtaggttatgaaacctctctaaaaagctgccggttatttaaccccaatgatgatggaaaggaggaaccaccaaccacattactttgggtccagtactacttggcacaacattatgacaaaattggtcagccatctattgctttggagtacataaatactgctattgaaagtacacctacattaatagaactctttctcgtgaaagctaaaatctataagcatgctggaaatattaaagaagctgcaaggtggatggatgaggcccaggccttggacacagcagacagatttatcaactccaaatgtgcaaaatacatgctaaaagccaacctgattaaagaagctgaagaaatgtgctcaaagtttacaagggaaggaacatcagcggtagagaatttgaatgaaatgcagtgcatgtggttccaaacagaatgtgcccaggcttataaagcaatgaataaatttggtgaagcacttaagaaatgtcatgagattgagagacattttatagaaatcactgatgaccagtttgactttcatacatactgtatgaggaagattacccttagatcatatgtggacttattaaaactagaagatgtacttcgacagcatccattttacttcaaggcagcaagaattgctatagagatctatttgaagcttcatgacaacccccttacagatgagaataaagaacacgaagctgatacagcaaacatgtctgacaaagagctaaagaagctacgtaataaacaaagaagagctcaaaagaaagcccagatagaagaagagaaaaaaaatgcagaaaaagaaaagcagcagagaaatcagaaaaagaagaaggatgatgatgatgaggagataggaggtccaaaagaagaacttattccagagaaactggccaaggttgaaactccattggaagaagctattaaatttttaacaccgttgaagaacttggtgaagaacaagatagagactcatctttttgcctttgagatttactttaggaaagaaaagtttcttttgatgctacaatcagtaaagagggcatttgctattgattctagtcatccctggcttcatgagtgtatgattcgtctctttaatactgcagtgtgtgaaagtaaagatttatctgatacagttagaacagtattaaaacaagaaatgaatcgtctttttggagcaacgaatccaaagaattttaatgaaacttttctgaaaaggaattctgattcattgccacacagattatcagctgccaaaatggtatattacttagatccttctagtcagaagcgagctatagagttggcaacaacacttgatgaatctctcactaacagaaacctccagacatgtatggaggtattggaagccttgtatgatggtagcctaggagactgtaaagaagctgctgaaatttatagagcaaattgtcataagcttttcccttatgctttggctttcatgcctcctggatatgaagaggatatgaagatcacagttaatggagatagttctgcagaagctgaagaactggccaatgaaatttgaacatcactaaacaagcaaatggaatgactttggaccatatctagtatataatatttttgtcacgcacctgctgcattgctctaacttacacagaatgagaggagtaaatgttcttgccttcaaatagtgttttacgttttttatcctgctgaaaaagtatatataaaatatctaacattacaggatagaggttcagtttcttaaaaaattaaagctgctaaaattgagtggttaaaaaagataccttatcctattcctccccacccacccatgtttttaaactaatttatataaaatctggaggctgttacagctaacaaagcaggtgtgtggcagaaatattactttaaatttgtcttgtgagattttactatatctcagacagcataaatgctgttttagcactggattctttcactgagcacaaagagttgttggggctttagcatctgactgatttgttacggggttgattctgaccataggaagtatgcaatgtgaatcactatttacagagaaacctacaacagatgcttgatgttgtagaaactgggacatatagataccaagcaaaattataagaaacctataaggtgttcaatacgcttgtgtttccaaaattcactgtacatgatcagtttggtgttcttgtaccacagtttttaactgaaggaaccagttgtaacagtctcaattttaactaaaacttgaagaactaaaacaacaatgcaaacctttcagcattgtttggccaaacttgttaaaactgtaatgcaagaaccaaatgcactgtgatgtggcaccaactaattagcaagcatgaatttttcacccaagagtgaaaaaaggaaaatctaccatggcttgaagttaaagagcagaactcctgactaccattctatgactgatcaaaagactaatagttaaaaacctcagcaggccttgttcacgatatgcagaaaaaaaagtgctgcagtttagatacctctggaatttttccacagtgtcacaggtttgtaatacttgaagccctacatttctaagaatatatttcttgctcagttgtttcaggcaagcccaagactttgtaatttttaaagggcccaagattttttttttttttctacaaaacgacaggcttttctggggaaagagagatcccttgggtggacaattggccactgtgtccggtgtgcacacggtggaattccacggtggggcgttaacaggaaagggcagagaaagtatgaggaaacgaacggggaaaaaagcgatgaggggaaaaaaagagttgtttatcttgttatttaaatatataattgg

SEQ ID NO: 283637 - DNA, 5430 bp, Homo sapiens
atttttggctgcctctgtcggtctgttcagttaccacgtgaaccgccgacggagacccgtagtgggggaggcggcggcagcgttaagtgagaaaggaaaaaagacaacgaggaaaaaggaggtgtccgggtagggcaacgcggcgacacccgaggcctggtggtggcggcggatcgagatattcaaggctgaagcagctacggaacggcagcggcggcggtcggacaaactgactgaccgagccgggtggtggcgggagcagcgggagcagccggaacgatgccggccgtgagcctcccgcccaaggagaatgcgctcttcaagcggatcttgaggtgttatgaacataaacagtatagaaatggattgaaattctgtaaacaaatactttctaatcccaaatttgcagagcatggagaaaccttggctatgaaaggattaacattgaactgtttggggaaaaaggaagaagcttatgaattggttcgtagaggtttgagaaatgacttgaagagtcatgtgtgttggcacgtttatggccttcttcagaggtcagacaagaagtatgatgaagccattaagtgttacagaaatgcactaaaatgggataaagacaatcttcaaatcttaagggacctttccttactacagattcaaatgcgagatcttgagggttacagggaaacgaggtatcagttacttcagcttcgacctgcgcagagagcatcatggattggttatgctattgcttaccatttattagaagattatgaaatggcagcaaagattttagaagaatttaggaaaacacaacagacatcccctgacaaggtggattatgaatatagtgaactactcttatatcagaatcaagttcttcgggaagcaggtctctatagagaagctttggaacatctttgtacctatgaaaagcagatttgtgataaacttgctgtagaagaaaccaaaggggaacttctgttgcaactatgtcgtttggaagatgctgcagatgtttatagaggattgcaagagagaaatcctgaaaactgggcctattacaaaggcttggaaaaagcactcaagccagctaatatgttagaacggctaaaaatttatgaggaagcctggactaaatatcccaggggactggtgccaagaaggctgccgttaaactttttatctggtgagaagtttaaagaatgtttggataagttcctaaggatgaatttcagcaagggttgcccaccagtcttcaatactttaagatcattatacaaagacaaagaaaaggtggcaatcatagaagagttagtagtaggttatgaaacctctctaaaaagctgccggttatttaaccccaatgatgatggaaaggaggaaccaccaaccacattactttgggtccagtactacttggcacaacattatgacaaaattggtcagccatctattgctttggagtacataaatactgctattgaaagtacacctacattaatagaactctttctcgtgaaagctaaaatctataagcatgctggaaatattaaagaagctgcaaggtggatggatgaggcccaggccttggacacagcagacagatttatcaactccaaatgtgcaaaatacatgctaaaagccaacctgattaaagaagctgaagaaatgtgctcaaagtttacaagggaaggaacatcagcggtagagaatttgaatgaaatgcagtgcatgtggttccaaacagaatgtgcccaggcttataaagcaatgaataaatttggtgaagcacttaagaaatgtcatgagattgagagacattttatagaaatcactgatgaccagtttgactttcatacatactgtatgaggaagattacccttagatcatatgtggacttattaaaactagaagatgtacttcgacagcatccattttacttcaaggcagcaagaattgctatagagatctatttgaagcttcatgacaacccccttacagatgagaataaagaacacgaagctgatacagcaaacatgtctgacaaagagctaaagaagctacgtaataaacaaagaagagctcaaaagaaagcccagatagaagaagagaaaaaaaatgcagaaaaagaaaagcagcagagaaatcagaaaaagaagaaggatgatgatgatgaggagataggaggtccaaaagaagaacttattccagagaaactggccaaggttgaaactccattggaagaagctattaaatttttaacaccgttgaagaacttggtgaagaacaagatagagactcatctttttgcctttgagatttactttaggaaagaaaagtttcttttgatgctacaatcagtaaagagggcatttgctattgattctagtcatccctggcttcatgagtgtatgattcgtctctttaatactgcagtgtgtgaaagtaaagatttatctgatacagttagaacagtattaaaacaagaaatgaatcgtctttttggagcaacgaatccaaagaattttaatgaaacttttctgaaaaggaattctgattcattgccacacagattatcagctgccaaaatggtatattacttagatccttctagtcagaagcgagctatagagttggcaacaacacttgatgaatctctcactaacagaaacctccagacatgtatggaggtattggaagccttgtatgatggtagcctaggagactgtaaagaagctgctgaaatttatagagcaaattgtcataagcttttcccttatgctttggctttcatgcctcctggatatgaagaggatatgaagatcacagttaatggagatagttctgcagaagctgaagaactggccaatgaaatttgaacatcactaaacaagcaaatggaatgactttggaccatatctagtatataatatttttgtcacgcacctgctgcattgctctaacttacacagaatgagaggagtaaatgttcttgccttcaaatagtgttttacgttttttatcctgctgaaaaagtatatataaaatatctaacattacaggatagaggttcagtttcttaaaaaattaaagctgctaaaattgagtggttaaaaaagataccttatcctattcctccccacccacccatgtttttaaactaatttatataaaatctggaggctgttacagctaacaaagcaggtgtgtggcagaaatattactttaaatttgtcttgtgagattttactatatctcagacagcataaatgctgttttagcactggattctttcactgagcacaaagagttgttggggctttagcatctgactgatttgttacggggttgattctgaccataggaagtatgcaatgtgaatcactatttacagagaaacctacaacagatgcttgatgttgtagaaactgggacatatagataccaagcaaaattataagaaacctataaggtgttcaatacgcttgtgtttccaaaattcactgtacatgatcagtttggtgttcttgtaccacagtttttaactgaaggaaccagttgtaacagtctcaattttaactaaaacttgaagaactaaaacaacaatgcaaacctttcagcattgtttggccaaacttgttaaaactgtaatgcaagaaccaaatgcactgtgatgtggcaccaactaattagcaagcatgaatttttcacccaagagtgaaaaaaggaaaatctaccatggcttgaagttaaagagcagaactcctgactaccattctatgactgatcaaaagactaatagttaaaaacctcagcaggccttgttcacgatatgcagaaaaaaaagtgctgcagtttagatacctctggaatttttccacagtgtcacaggtttgtaatacttgaagccctacatttctaagaatatatttcttgctcagttgtttcaggcaagcccaagactttgtaatttttaaagggcccaagatttttttttttttttttttttcaaataacagaccagcttctttttcttgcagttacagatgtaatttcctttttgttgtcaaacataaggtaccaaatatgatgcaataaattgttttgaaaaacagttgtgtgaatatttcaactaatctgtgttgggcttctgtgaaatacacaggtggaaacagaggtgcaagccagaggcaatgtaatatgctgtaaggctagtgcagatgggagctttttagaaggggctaagtgctggtgtcagggaaattccataatgaagtagaatgctgctcctgcattaagatttcattgagggcaaggctggtggcaggtactatgaatgtaattcataatttaaaaggaaaactaaaaactattttgatttgggaaaatgagccttaatttgttaaacctatacactgagaactagcctcaggcttaatattctcattgcatttgcaagatctgagcaaataagattaagtaaaacaaatcaattgtatatataattgacctttttgtggaacatgtagtttatagaaagtatactctaaagggaatttgccgaagaccttttactgattgaacagttgtgctacaatcaacttttcatagtacatgacctgcattccacatctcagtctaacagtttagtagtgatgtaaagagaagtacaaaccgaactccagtgctttgttatgttttattaactggccctgtctcaggaacatcttaacagatggcaaaaaaacaaaaactttttttcaactcctatgagtggcaactgaagttcttattgttgggaaagaacactagtcctacctctgccactaatgaggtgtttggaggaggtaccagccatataatagggggtgtatgtgtgaattttgtttaaactctactgtatattgaaatgaaattcatttatttgtcttgacaatgttcaaatgatgtagattgtcttagaatgaatattcataagtactcagaactcttaagatgcagatgccacccgtgaggagctaaattcctaatgtgtattgtattccaacccaattttactggaactattgaataaatcttttattttctttcaggtttacttgatagtggatacattggtgtcagaggaccttgactgggttcattttatgtccagacatcacccctgaaacactgtactgtactatcttgctctgagtagtatcaactggatcgtctcatatttgcctcattcatcctattaatttcaaatgatactgtgggggaaaaacagggttagaaaaacaagtggaaaaaatggagtgatgttgtaatctaaacaagtgccttatgtttattgctaagaactggtgttaccaacccttttgagaagaaagggtctcttgacctgtattaacataggaaagtaaagttctttttgtttttcttta

SEQ ID NO: 283638 - DNA, 4230 bp, Homo sapiens
atttttggctgcctctgtcggtctgttcagttaccacgtgaaccgccgacggagacccgtagtgggggaggcggcggcagcgttaagtgagaaaggaaaaaagacaacgaggaaaaaggaggtgtccgggtagggcaacgcggcgacacccgaggcctggtggtggcggcggatcgagatattcaaggctgaagcagctacggaacggcagcggcggcggtcggacaaactgactgaccgagccgggtggtggcgggagcagcgggagcagccggaacgatgccggccgtgagcctcccgcccaaggagaatgcgctcttcaagcggatcttgaggtgttatgaacataaacagtatagaaatggattgaaattctgtaaacaaatactttctaatcccaaatttgcagagcatggagaaaccttggctatgaaaggattaacattgaactgtttggggaaaaaggaagaagcttatgaattggttcgtagaggtttgagaaatgacttgaagagtcatgtgtgttggcacgtttatggccttcttcagaggtcagacaagaagtatgatgaagccattaagtgttacagaaatgcactaaaatgggataaagacaatcttcaaatcttaagggacctttccttactacagattcaaatgcgagatcttgagggttacagggaaacgaggtatcagttacttcagcttcgacctgcgcagagagcatcatggattggttatgctattgcttaccatttattagaagattatgaaatggcagcaaagattttagaagaatttaggaaaacacaacagacatcccctgacaaggtggattatgaatatagtgaactactcttatatcagaatcaagttcttcgggaagcaggtctctatagagaagctttggaacatctttgtacctatgaaaagcagatttgtgataaacttgctgtagaagaaaccaaaggggaacttctgttgcaactatgtcgtttggaagatgctgcagatgtttatagaggattgcaagagagaaatcctgaaaactgggcctattacaaaggcttggaaaaagcactcaagccagctaatatgttagaacggctaaaaatttatgaggaagcctggactaaatatcccaggggactggtgccaagaaggctgccgttaaactttttatctggtgagaagtttaaagaatgtttggataagttcctaaggatgaatttcagcaagggttgcccaccagtcttcaatactttaagatcattatacaaagacaaagaaaaggtggcaatcatagaagagttagtagtaggttatgaaacctctctaaaaagctgccggttatttaaccccaatgatgatggaaaggaggaaccaccaaccacattactttgggtccagtactacttggcacaacattatgacaaaattggtcagccatctattgctttggagtacataaatactgctattgaaagtacacctacattaatagaactctttctcgtgaaagctaaaatctataagcatgctggaaatattaaagaagctgcaaggtggatggatgaggcccaggccttggacacagcagacagatttatcaactccaaatgtgcaaaatacatgctaaaagccaacctgattaaagaagctgaagaaatgtgctcaaagtttacaagggaaggaacatcagcggtagagaatttgaatgaaatgcagtgcatgtggttccaaacagaatgtgcccaggcttataaagcaatgaataaatttggtgaagcacttaagaaatgtcatgagattgagagacattttatagaaatcactgatgaccagtttgactttcatacatactgtatgaggaagattacccttagatcatatgtggacttattaaaactagaagatgtacttcgacagcatccattttacttcaaggcagcaagaattgctatagagatctatttgaagcttcatgacaacccccttacagatgagaataaagaacacgaagctgatacagcaaacatgtctgacaaagagctaaagaagctacgtaataaacaaagaagagctcaaaagaaagcccagatagaagaagagaaaaaaaatgcagaaaaagaaaagcagcagagaaatcagaaaaagaagaaggatgatgatgatgaggagataggaggtccaaaagaagaacttattccagagaaactggccaaggttgaaactccattggaagaagctattaaatttttaacaccgttgaagaacttggtgaagaacaagatagagactcatctttttgcctttgagatttactttaggaaagaaaagtttcttttgatgctacaatcagtaaagagggcatttgctattgattctagtcatccctggcttcatgagtgtatgattcgtctctttaatactgcagtgtgtgaaagtaaagatttatctgatacagttagaacagtattaaaacaagaaatgaatcgtctttttggagcaacgaatccaaagaattttaatgaaacttttctgaaaaggaattctgattcattgccacacagattatcagctgccaaaatggtatattacttagatccttctagtcagaagcgagctatagagttggcaacaacacttgatgaatctctcactaacagaaacctccagacatgtatggaggtattggaagccttgtatgatggtagcctaggagactgtaaagaagctgctgaaatttatagagcaaattgtcataagcttttcccttatgctttggctttcatgcctcctggatatgaagaggatatgaagatcacagttaatggagatagttctgcagaagctgaagaactggccaatgaaatttgaacatcactaaacaagcaaatggaatgactttggaccatatctagtatataatatttttgtcacgcacctgctgcattgctctaacttacacagaatgagaggagtaaatgttcttgccttcaaatagtgttttacgttttttatcctgctgaaaaagtatatataaaatatctaacattacaggatagaggttcagtttcttaaaaaattaaagctgctaaaattgagtggttaaaaaagataccttatcctattcctccccacccacccatgtttttaaactaatttatataaaatctggaggctgttacagctaacaaagcaggtgtgtggcagaaatattactttaaatttgtcttgtgagattttactatatctcagacagcataaatgctgttttagcactggattctttcactgagcacaaagagttgttggggctttagcatctgactgatttgttacggggttgattctgaccataggaagtatgcaatgtgaatcactatttacagagaaacctacaacagatgcttgatgttgtagaaactgggacatatagataccaagcaaaattataagaaacctataaggtgttcaatacgcttgtgtttccaaaattcactgtacatgatcagtttggtgttcttgtaccacagtttttaactgaaggaaccagttgtaacagtctcaattttaactaaaacttgaagaactaaaacaacaatgcaaacctttcagcattgtttggccaaacttgttaaaactgtaatgcaagaaccaaatgcactgtgatgtggcaccaactaattagcaagcatgaatttttcacccaagagtgaaaaaaggaaaatctaccatggcttgaagttaaagagcagaactcctgactaccattctatgactgatcaaaagactaatagttaaaaacctcagcaggccttgttcacgatatgcagaaaaaaaagtgctgcagtttagatacctctggaatttttccacagtgtcacaggtgtttacttgatagtggatacattggtgtcagaggaccttgactgggttcattttatgtccagacatcacccctgaaacactgtactgtactatcttgctctgagtagtatcaactggatcgtctcatatttgcctcattcatcctattaatttcaaatgatactgtgggggaaaaacagggttagaaaaacaagtggaaaaaatggagtgatgttgtaatctaaacaagtgccttatgtttattgctaagaactggtgttaccaacccttttgagaagaaagggtctcttgacctgtattaacataggaaagtaaagttctttttgtttttcttta

SEQ ID NO: 283639 - DNA, 683 bp, Homo sapiens
tttattgtgtgtaaggacttatggattattattttattcaacctgttatatcctaatattgtcattatttactcagttgctctgtagatacttaagaattttttaaaaattagttttatcaaccggatgttatcctttgacttcttacatgtttttgagtattgtgaacaattttctgatatgaaaataaaattcttactgtcagtattccttatatccatatacagacatcccctgacaaggtggattatgaatatagtgaactactcttatatcagaatcaagttcttcgggaagcaggtctctatagagaagctttggaacatctttgtacctatgaaaagcagatttgtgataaacttgctgtagaagaaaccaaaggtatttttaaaagaattgtcatttattctaatattgaaatatgacagagcaaggctgaaaaatctagttgctgctgacagtttcatataattcagctttttgatgataggaaatctatttcttactcgtgtacttttaatagtttatgatgtgggaaaatgtacatttaaacaatattgtagatagaggagaaagttgattgtgaacaatgaaaagtagttgaatgaaatgactcataacattctttaaataaagtatctttgtattaaaaatattatggaatttgatcaaaacacaagaga

SEQ ID NO: 283640 - DNA, 384 bp, Homo sapiens
aaggaggcctcttatccaatgatcaaaatatatcttactttctctttttatagaaaagtttcttttgatgctacaatcagtaaagagggcatttgctattgattctagtcatccctggcttcatgagtgtatgattcgtctctttaatactggtatgtttttgttttccattacttaagtatttgatacagtggttgatggtgacggtataagtggtctgtacaagtttatcataaaccaaatgattttaaagctgtcacatactaaattagctaagggaaaagcagggcttttttctttatgatgaaggtttttattttaaggatacaagtattacctgattttgacatagaattattcagtccagatatttgagaatcatct

SEQ ID NO: 283641 - DNA, 6172 bp, Homo sapiens
atttttggctgcctctgtcggtctgttcagttaccacgtgaaccgccgacggagacccgtagtgggggaggcggcggcagcgttaagtgagaaaggaaaaaagacaacgaggaaaaaggaggtgtccgggtagggcaacgcggcgacacccgaggcctggtggtggcggcggatcgagatattcaaggctgaagcagctacggaacggcagcggcggcggtcggacaaactgactgaccgagccgggtggtggcgggagcagcgggagcagccggaacgatgccggccgtgagcctcccgcccaaggagaatgcgctcttcaagcggatcttgaggtgttatgaacataaacagtatagaaatggattgaaattctgtaaacaaatactttctaatcccaaatttgcagagcatggagaaaccttggctatgaaaggattaacattgaactgtttggggaaaaaggaagaagcttatgaattggttcgtagaggtttgagaaatgacttgaagagtcatgtgtgttggcacgtttatggccttcttcagaggtcagacaagaagtatgatgaagccattaagtgttacagaaatgcactaaaatgggataaagacaatcttcaaatcttaagggacctttccttactacagattcaaatgcgagatcttgagggttacagggaaacgaggtatcagttacttcagcttcgacctgcgcagagagcatcatggattggttatgctattgcttaccatttattagaagattatgaaatggcagcaaagattttagaagaatttaggaaaacacaacagacatcccctgacaaggtggattatgaatatagtgaactactcttatatcagaatcaagttcttcgggaagcaggtctctatagagaagctttggaacatctttgtacctatgaaaagcagatttgtgataaacttgctgtagaagaaaccaaaggggaacttctgttgcaactatgtcgtttggaagatgctgcagatgtttatagaggattgcaagagagaaatcctgaaaactgggcctattacaaaggcttggaaaaagcactcaagccagctaatatgttagaacggctaaaaatttatgaggaagcctggactaaatatcccaggggactggtgccaagaaggctgccgttaaactttttatctggtgagaagtttaaagaatgtttggataagttcctaaggatgaatttcagcaagggttgcccaccagtcttcaatactttaagatcattatacaaagacaaagaaaaggtggcaatcatagaagagttagtagtaggttatgaaacctctctaaaaagctgccggttatttaaccccaatgatgatggaaaggaggaaccaccaaccacattactttgggtccagtactacttggcacaacattatgacaaaattggtcagccatctattgctttggagtacataaatactgctattgaaagtacacctacattaatagaactctttctcgtgaaagctaaaatctataagcatgctggaaatattaaagaagctgcaaggtggatggatgaggcccaggccttggacacagcagacagatttatcaactccaaatgtgcaaaatacatgctaaaagccaacctgattaaagaagctgaagaaatgtgctcaaagtttacaagggaaggaacatcagcggtagagaatttgaatgaaatgcagtgcatgtggttccaaacagaatgtgcccaggcttataaagcaatgaataaatttggtgaagcacttaagaaatgtcatgagattgagagacattttatagaaatcactgatgaccagtttgactttcatacatactgtatgaggaagattacccttagatcatatgtggacttattaaaactagaagatgtacttcgacagcatccattttacttcaaggcagcaagaattgctatagagatctatttgaagcttcatgacaacccccttacagatgagaataaagaacacgaagctgatacagcaaacatgtctgacaaagagctaaagaagctacgtaataaacaaagaagagctcaaaagaaagcccagatagaagaagagaaaaaaaatgcagaaaaagaaaagcagcagagaaatcagaaaaagaagaaggatgatgatgatgaggagataggaggtccaaaagaagaacttattccagagaaactggccaaggttgaaactccattggaagaagctattaaatttttaacaccgttgaagaacttggtgaagaacaagatagagactcatctttttgcctttgagatttactttaggaaagaaaagtttcttttgatgctacaatcagtaaagagggcatttgctattgattctagtcatccctggcttcatgagtgtatgattcgtctctttaatactgcagtgtgtgaaagtaaagatttatctgatacagttagaacagtattaaaacaagaaatgaatcgtctttttggagcaacgaatccaaagaattttaatgaaacttttctgaaaaggaattctgattcattgccacacagattatcagctgccaaaatggtatattacttagatccttctagtcagaagcgagctatagagttggcaacaacacttgatgaatctctcactaacagaaacctccagacatgtatggaggtattggaagccttgtatgatggtagcctaggagactgtaaagaagctgctgaaatttatagagcaaattgtcataagcttttcccttatgctttggctttcatgcctcctggatatgaagaggatatgaagatcacagttaatggagatagttctgcagaagctgaagaactggccaatgaaatttgaacatcactaaacaagcaaatggaatgactttggaccatatctagtatataatatttttgtcacgcacctgctgcattgctctaacttacacagaatgagaggagtaaatgttcttgccttcaaatagtgttttacgttttttatcctgctgaaaaagtatatataaaatatctaacattacaggatagaggttcagtttcttaaaaaattaaagctgctaaaattgagtggttaaaaaagataccttatcctattcctccccacccacccatgtttttaaactaatttatataaaatctggaggctgttacagctaacaaagcaggtgtgtggcagaaatattactttaaatttgtcttgtgagattttactatatctcagacagcataaatgctgttttagcactggattctttcactgagcacaaagagttgttggggctttagcatctgactgatttgttacggggttgattctgaccataggaagtatgcaatgtgaatcactatttacagagaaacctacaacagatgcttgatgttgtagaaactgggacatatagataccaagcaaaattataagaaacctataaggtgttcaatacgcttgtgtttccaaaattcactgtacatgatcagtttggtgttcttgtaccacagtttttaactgaaggaaccagttgtaacagtctcaattttaactaaaacttgaagaactaaaacaacaatgcaaacctttcagcattgtttggccaaacttgttaaaactgtaatgcaagaaccaaatgcactgtgatgtggcaccaactaattagcaagcatgaatttttcacccaagagtgaaaaaaggaaaatctaccatggcttgaagttaaagagcagaactcctgactaccattctatgactgatcaaaagactaatagttaaaaacctcagcaggccttgttcacgatatgcagaaaaaaaagtgctgcagtttagatacctctggaatttttccacagtgtcacaggtttgtaatacttgaagccctacatttctaagaatatatttcttgctcagttgtttcaggcaagcccaagactttgtaatttttaaagggcccaagatttttttttttttttttttttcaaataacagaccagcttctttttcttgcagttacagatgtaatttcctttttgttgtcaaacataaggtaccaaatatgatgcaataaattgttttgaaaaacagttgtgtgaatatttcaactaatctgtgttgggcttctgtgaaatacacaggtggaaacagaggtgcaagccagaggcaatgtaatatgctgtaaggctagtgcagatgggagctttttagaaggggctaagtgctggtgtcagggaaattccataatgaagtagaatgctgctcctgcattaagatttcattgagggcaaggctggtggcaggtactatgaatgtaattcataatttaaaaggaaaactaaaaactattttgatttgggaaaatgagccttaatttgttaaacctatacactgagaactagcctcaggcttaatattctcattgcatttgcaagatctgagcaaataagattaagtaaaacaaatcaattgtatatataattgacctttttgtggaacatgtagtttatagaaagtatactctaaagggaatttgccgaagaccttttactgattgaacagttgtgctacaatcaacttttcatagtacatgacctgcattccacatctcagtctaacagtttagtagtgatgtaaagagaagtacaaaccgaactccagtgctttgttatgttttattaactggccctgtctcaggaacatcttaacagatggcaaaaaaacaaaaactttttttcaactcctatgagtggcaactgaagttcttattgttgggaaagaacactagtcctacctctgccactaatgaggtgtttggaggaggtaccagccatataatagggggtgtatgtgtgaattttgtttaaactctactgtatattgaaatgaaattcatttatttgtcttgacaatgttcaaatgatgtagattgtcttagaatgaatattcataagtactcagaactcttaagatgcagatgccacccgtgaggagctaaattcctaatgtgtattgtattccaacccaattttactggaactattgaataaatcttttattttctttcaggtttacttgatagtggatacattggtgtcagaggaccttgactgggttcattttatgtccagacatcacccctgaaacactgtactgtactatcttgctctgagtagtatcaactggatcgtctcatatttgcctcattcatcctattaatttcaaatgatactgtgggggaaaaacagggttagaaaaacaagtggaaaaaatggagtgatgttgtaatctaaacaagtgccttatgtttattgctaagaactggtgttaccaacccttttgagaagaaagggtctcttgacctgtattaacataggaaagtaaagttctttttgtttttctttatattcagctactcttgtcatttctcgttgaaaaactaaaatctgactaggttagtttactcagctttaattagatagttgagtcatatattttcaacatttttctgtatcgtatttattatgcacaaaaataaagtgtgatctctaatagcatggctaaaggtaatgccaatattagtgaatagctttgctgtgggctttatcaggcccttgtttttcacagtgttgtttgtactccatggtgtattgctattagagctgtgaaatgaaagctgtgactttatgaagagatcaaaaaaagtgtggtccagattcaggtaggttgtggtaagttcagggaagtcttgtatgatttctaagaatatttcagttaccatgtatagtatttgggaaaagctgtaatgtaaaatattggactttgttgcaagataggtatatacttgtgtcagataattaaagccttaaattttgaaatgaatctttgagatttcaaagaaagactgacctttcaaatagaaggcggtctttctattctagctaatgccccacttctttaagttataaacaaagtttcatgataccattctgctatcatctaaactttgctgaactctactgccaacctacattaaaaacaaagtcccacgaaatggctgtgttacaccatagtgagcagaaacttaaattttgttctaattttgatggttgaaaaatttcaacctgtagcaataaaacatttttgg

SEQ ID NO: 283642 - DNA, 6116 bp, Homo sapiens
atttttggctgcctctgtcggtctgttcagttaccacgtgaaccgccgacggagacccgtagtgggggaggcggcggcagcgttaagtgagaaaggaaaaaagacaacgaggaaaaaggaggtgtccgggtagggcaacgcggcgacacccgaggcctggtggtggcggcggatcgagatattcaaggctgaagcagctacggaacggcagcggcggcggtcggacaaactgactgaccgagccgggtggtggcgggagcagcgggagcagccggaacgatgccggccgtgagcctcccgcccaaggagaatgcgctcttcaagcggatcttgaggtgttatgaacataaacagtatagaaatggattgaaattctgtaaacaaatactttctaatcccaaatttgcagagcatggagaaaccttggctatgaaaggattaacattgaactgtttggggaaaaaggaagaagcttatgaattggttcgtagaggtttgagaaatgacttgaagagtcatgtgtgttggcacgtttatggccttcttcagaggtcagacaagaagtatgatgaagccattaagtgttacagaaatgcactaaaatgggataaagacaatcttcaaatcttaagggacctttccttactacagattcaaatgcgagatcttgagggttacagggaaacgaggtatcagttacttcagcttcgacctgcgcagagagcatcatggattggttatgctattgcttaccatttattagaagattatgaaatggcagcaaagattttagaagaatttaggaaaacacaacagacatcccctgacaaggtggattatgaatatagtgaactactcttatatcagaatcaagttcttcgggaagcaggtctctatagagaagctttggaacatctttgtacctatgaaaagcagatttgtgataaacttgctgtagaagaaaccaaaggggaacttctgttgcaactatgtcgtttggaagatgctgcagatgtttatagaggattgcaagagagaaatcctgaaaactgggcctattacaaaggcttggaaaaagcactcaagccagctaatatgttagaacggctaaaaatttatgaggaagcctggactaaatatcccaggggactggtgccaagaaggctgccgttaaactttttatctggtgagaagtttaaagaatgtttggataagttcctaaggatgaatttcagcaagggttgcccaccagtcttcaatactttaagatcattatacaaagacaaagaaaaggtggcaatcatagaagagttagtagtaggttatgaaacctctctaaaaagctgccggttatttaaccccaatgatgatggaaaggaggaaccaccaaccacattactttgggtccagtactacttggcacaacattatgacaaaattggtcagccatctattgctttggagtacataaatactgctattgaaagtacacctacattaatagaactctttctcgtgaaagctaaaatctataagcatgctggaaatattaaagaagctgcaaggtggatggatgaggcccaggccttggacacagcagacagatttatcaactccaaatgtgcaaaatacatgctaaaagccaacctgattaaagaagctgaagaaatgtgctcaaagtttacaagggaaggaacatcagcggtagagaatttgaatgaaatgcagtgcatgtggttccaaacagaatgtgcccaggcttataaagcaatgaataaatttggtgaagcacttaagaaatgtcatgagattgagagacattttatagaaatcactgatgaccagtttgactttcatacatactgtatgaggaagattacccttagatcatatgtggacttattaaaactagaagatgtacttcgacagcatccattttacttcaaggcagcaagaattgctatagagatctatttgaagcttcatgacaacccccttacagatgagaataaagaacacgaagctgatacagcaaacatgtctgacaaagagctaaagaagctacgtaataaacaaagaagagctcaaaagaaagcccagatagaagaagagaaaaaaaatgcagaaaaagaaaagcagcagagaaatcagaaaaagaagaaggatgatgatgatgaggagataggaggtccaaaagaagaacttattccagagaaactggccaaggttgaaactccattggaagaagctattaaatttttaacaccgttgaagaacttggtgaagaacaagatagagactcatctttttgcctttgagatttactttaggaaagaaaagtttcttttgatgctacaatcagtaaagagggcatttgctattgattctagtcatccctggcttcatgagtgtatgattcgtctctttaatactgcagtgtgtgaaagtaaagatttatctgatacagttagaacagtattaaaacaagaaatgaatcgtctttttggagcaacgaatccaaagaattttaatgaaacttttctgaaaaggaattctgattcattgccacacagattatcagctgccaaaatggtatattacttagatccttctagtcagaagcgagctatagagttggcaacaacacttgatgaatctctcactaacagaaacctccagacatgtatggaggtattggaagccttgtatgatggtagcctaggagactgtaaagaagctgctgaaatttatagagcaaattgtcataagcttttcccttatgctttggctttcatgcctcctggatatgaagaggatatgaagatcacagttaatggagatagttctgcagaagctgaagaactggccaatgaaatttgaacatcactaaacaagcaaatggaatgactttggaccatatctagtatataatatttttgtcacgcacctgctgcattgctctaacttacacagaatgagaggagtaaatgttcttgccttcaaatagtgttttacgttttttatcctgctgaaaaagtatatataaaatatctaacattacaggatagaggttcagtttcttaaaaaattaaagctgctaaaattgagtggttaaaaaagataccttatcctattcctccccacccacccatgtttttaaactaatttatataaaatctggaggctgttacagctaacaaagcaggtgtgtggcagaaatattactttaaatttgtcttgtgagattttactatatctcagacagcataaatgctgttttagcactggattctttcactgagcacaaagagttgttggggctttagcatctgactgatttgttacggggttgattctgaccataggaagtatgcaatgtgaatcactatttacagagaaacctacaacagatgcttgatgttgtagaaactgggacatatagataccaagcaaaattataagaaacctataaggtgttcaatacgcttgtgtttccaaaattcactgtacatgatcagtttggtgttcttgtaccacagtttttaactgaaggaaccagttgtaacagtctcaattttaactaaaacttgaagaactaaaacaacaatgcaaacctttcagcattgtttggccaaacttgttaaaactgtaatgcaagaaccaaatgcactgtgatgtggcaccaactaattagcaagcatgaatttttcacccaagagtgaaaaaaggaaaatctaccatggcttgaagttaaagagcagaactcctgactaccattctatgactgatcaaaagactaatagttaaaaacctcagcaggccttgttcacgatatgcattgtaatacttgaagccctacatttctaagaatatatttcttgctcagttgtttcaggcaagcccaagactttgtaatttttaaagggcccaagatttttttttttttttttttttcaaataacagaccagcttctttttcttgcagttacagatgtaatttcctttttgttgtcaaacataaggtaccaaatatgatgcaataaattgttttgaaaaacagttgtgtgaatatttcaactaatctgtgttgggcttctgtgaaatacacaggtggaaacagaggtgcaagccagaggcaatgtaatatgctgtaaggctagtgcagatgggagctttttagaaggggctaagtgctggtgtcagggaaattccataatgaagtagaatgctgctcctgcattaagatttcattgagggcaaggctggtggcaggtactatgaatgtaattcataatttaaaaggaaaactaaaaactattttgatttgggaaaatgagccttaatttgttaaacctatacactgagaactagcctcaggcttaatattctcattgcatttgcaagatctgagcaaataagattaagtaaaacaaatcaattgtatatataattgacctttttgtggaacatgtagtttatagaaagtatactctaaagggaatttgccgaagaccttttactgattgaacagttgtgctacaatcaacttttcatagtacatgacctgcattccacatctcagtctaacagtttagtagtgatgtaaagagaagtacaaaccgaactccagtgctttgttatgttttattaactggccctgtctcaggaacatcttaacagatggcaaaaaaacaaaaactttttttcaactcctatgagtggcaactgaagttcttattgttgggaaagaacactagtcctacctctgccactaatgaggtgtttggaggaggtaccagccatataatagggggtgtatgtgtgaattttgtttaaactctactgtatattgaaatgaaattcatttatttgtcttgacaatgttcaaatgatgtagattgtcttagaatgaatattcataagtactcagaactcttaagatgcagatgccacccgtgaggagctaaattcctaatgtgtattgtattccaacccaattttactggaactattgaataaatcttttattttctttcaggtttacttgatagtggatacattggtgtcagaggaccttgactgggttcattttatgtccagacatcacccctgaaacactgtactgtactatcttgctctgagtagtatcaactggatcgtctcatatttgcctcattcatcctattaatttcaaatgatactgtgggggaaaaacagggttagaaaaacaagtggaaaaaatggagtgatgttgtaatctaaacaagtgccttatgtttattgctaagaactggtgttaccaacccttttgagaagaaagggtctcttgacctgtattaacataggaaagtaaagttctttttgtttttctttatattcagctactcttgtcatttctcgttgaaaaactaaaatctgactaggttagtttactcagctttaattagatagttgagtcatatattttcaacatttttctgtatcgtatttattatgcacaaaaataaagtgtgatctctaatagcatggctaaaggtaatgccaatattagtgaatagctttgctgtgggctttatcaggcccttgtttttcacagtgttgtttgtactccatggtgtattgctattagagctgtgaaatgaaagctgtgactttatgaagagatcaaaaaaagtgtggtccagattcaggtaggttgtggtaagttcagggaagtcttgtatgatttctaagaatatttcagttaccatgtatagtatttgggaaaagctgtaatgtaaaatattggactttgttgcaagataggtatatacttgtgtcagataattaaagccttaaattttgaaatgaatctttgagatttcaaagaaagactgacctttcaaatagaaggcggtctttctattctagctaatgccccacttctttaagttataaacaaagtttcatgataccattctgctatcatctaaactttgctgaactctactgccaacctacattaaaaacaaagtcccacgaaatggctgtgttacaccatagtgagcagaaacttaaattttgttctaattttgatggttgaaaaatttcaacctgtagcaataaaacatttttgg

SEQ ID NO: 283643 - DNA, 5525 bp, Homo sapiens
atttttggctgcctctgtcggtctgttcagttaccacgtgaaccgccgacggagacccgtagtgggggaggcggcggcagcgttaagtgagaaaggaaaaaagacaacgaggaaaaaggaggtgtccgggtagggcaacgcggcgacacccgaggcctggtggtggcggcggatcgagatattcaaggctgaagcagctacggaacggcagcggcggcggtcggacaaactgactgaccgagccgggtggtggcgggagcagcgggagcagccggaacgatgccggccgtgagcctcccgcccaaggagaatgcgctcttcaagcggatcttgaggtgttatgaacataaacagtatagaaatggattgaaattctgtaaacaaatactttctaatcccaaatttgcagagcatggagaaaccttggctatgaaaggattaacattgaactgtttggggaaaaaggaagaagcttatgaattggttcgtagaggtttgagaaatgacttgaagagtcatgtgtgttggcacgtttatggccttcttcagaggtcagacaagaagtatgatgaagccattaagtgttacagaaatgcactaaaatgggataaagacaatcttcaaatcttaagggacctttccttactacagattcaaatgcgagatcttgagggttacagggaaacgaggtatcagttacttcagcttcgacctgcgcagagagcatcatggattggttatgctattgcttaccatttattagaagattatgaaatggcagcaaagattttagaagaatttaggaaaacacaacagacatcccctgacaaggtggattatgaatatagtgaactactcttatatcagaatcaagttcttcgggaagcaggtctctatagagaagctttggaacatctttgtacctatgaaaagcagatttgtgataaacttgctgtagaagaaaccaaaggggaacttctgttgcaactatgtcgtttggaagatgctgcagatgtttatagaggattgcaagagagaaatcctgaaaactgggcctattacaaaggcttggaaaaagcactcaagccagctaatatgttagaacggctaaaaatttatgaggaagcctggactaaatatcccaggggactggtgccaagaaggctgccgttaaactttttatctggtgagaagtttaaagaatgtttggataagttcctaaggatgaatttcagcaagggttgcccaccagtcttcaatactttaagatcattatacaaagacaaagaaaaggtggcaatcatagaagagttagtagtaggttatgaaacctctctaaaaagctgccggttatttaaccccaatgcattttcctacatattttacaaatgtggaagaggttcaatgacttgcccaagaatatgcagcacttttgttgcagatctgtcagatggggagttgatgatggaaaggaggaaccaccaaccacattactttgggtccagtactacttggcacaacattatgacaaaattggtcagccatctattgctttggagtacataaatactgctattgaaagtacacctacattaatagaactctttctcgtgaaagctaaaatctataagcatgctggaaatattaaagaagctgcaaggtggatggatgaggcccaggccttggacacagcagacagatttatcaactccaaatgtgcaaaatacatgctaaaagccaacctgattaaagaagctgaagaaatgtgctcaaagtttacaagggaaggaacatcagcggtagagaatttgaatgaaatgcagtgcatgtggttccaaacagaatgtgcccaggcttataaagcaatgaataaatttggtgaagcacttaagaaatgtcatgagattgagagacattttatagaaatcactgatgaccagtttgactttcatacatactgtatgaggaagattacccttagatcatatgtggacttattaaaactagaagatgtacttcgacagcatccattttacttcaaggcagcaagaattgctatagagatctatttgaagcttcatgacaacccccttacagatgagaataaagaacacgaagctgatacagcaaacatgtctgacaaagagctaaagaagctacgtaataaacaaagaagagctcaaaagaaagcccagatagaagaagagaaaaaaaatgcagaaaaagaaaagcagcagagaaatcagaaaaagaagaaggatgatgatgatgaggagataggaggtccaaaagaagaacttattccagagaaactggccaaggttgaaactccattggaagaagctattaaatttttaacaccgttgaagaacttggtgaagaacaagatagagactcatctttttgcctttgagatttactttaggaaagaaaagtttcttttgatgctacaatcagtaaagagggcatttgctattgattctagtcatccctggcttcatgagtgtatgattcgtctctttaatactgcagtgtgtgaaagtaaagatttatctgatacagttagaacagtattaaaacaagaaatgaatcgtctttttggagcaacgaatccaaagaattttaatgaaacttttctgaaaaggaattctgattcattgccacacagattatcagctgccaaaatggtatattacttagatccttctagtcagaagcgagctatagagttggcaacaacacttgatgaatctctcactaacagaaacctccagacatgtatggaggtattggaagccttgtatgatggtagcctaggagactgtaaagaagctgctgaaatttatagagcaaattgtcataagcttttcccttatgctttggctttcatgcctcctggatatgaagaggatatgaagatcacagttaatggagatagttctgcagaagctgaagaactggccaatgaaatttgaacatcactaaacaagcaaatggaatgactttggaccatatctagtatataatatttttgtcacgcacctgctgcattgctctaacttacacagaatgagaggagtaaatgttcttgccttcaaatagtgttttacgttttttatcctgctgaaaaagtatatataaaatatctaacattacaggatagaggttcagtttcttaaaaaattaaagctgctaaaattgagtggttaaaaaagataccttatcctattcctccccacccacccatgtttttaaactaatttatataaaatctggaggctgttacagctaacaaagcaggtgtgtggcagaaatattactttaaatttgtcttgtgagattttactatatctcagacagcataaatgctgttttagcactggattctttcactgagcacaaagagttgttggggctttagcatctgactgatttgttacggggttgattctgaccataggaagtatgcaatgtgaatcactatttacagagaaacctacaacagatgcttgatgttgtagaaactgggacatatagataccaagcaaaattataagaaacctataaggtgttcaatacgcttgtgtttccaaaattcactgtacatgatcagtttggtgttcttgtaccacagtttttaactgaaggaaccagttgtaacagtctcaattttaactaaaacttgaagaactaaaacaacaatgcaaacctttcagcattgtttggccaaacttgttaaaactgtaatgcaagaaccaaatgcactgtgatgtggcaccaactaattagcaagcatgaatttttcacccaagagtgaaaaaaggaaaatctaccatggcttgaagttaaagagcagaactcctgactaccattctatgactgatcaaaagactaatagttaaaaacctcagcaggccttgttcacgatatgcagaaaaaaaagtgctgcagtttagatacctctggaatttttccacagtgtcacaggtttgtaatacttgaagccctacatttctaagaatatatttcttgctcagttgtttcaggcaagcccaagactttgtaatttttaaagggcccaagatttttttttttttttttttttcaaataacagaccagcttctttttcttgcagttacagatgtaatttcctttttgttgtcaaacataaggtaccaaatatgatgcaataaattgttttgaaaaacagttgtgtgaatatttcaactaatctgtgttgggcttctgtgaaatacacaggtggaaacagaggtgcaagccagaggcaatgtaatatgctgtaaggctagtgcagatgggagctttttagaaggggctaagtgctggtgtcagggaaattccataatgaagtagaatgctgctcctgcattaagatttcattgagggcaaggctggtggcaggtactatgaatgtaattcataatttaaaaggaaaactaaaaactattttgatttgggaaaatgagccttaatttgttaaacctatacactgagaactagcctcaggcttaatattctcattgcatttgcaagatctgagcaaataagattaagtaaaacaaatcaattgtatatataattgacctttttgtggaacatgtagtttatagaaagtatactctaaagggaatttgccgaagaccttttactgattgaacagttgtgctacaatcaacttttcatagtacatgacctgcattccacatctcagtctaacagtttagtagtgatgtaaagagaagtacaaaccgaactccagtgctttgttatgttttattaactggccctgtctcaggaacatcttaacagatggcaaaaaaacaaaaactttttttcaactcctatgagtggcaactgaagttcttattgttgggaaagaacactagtcctacctctgccactaatgaggtgtttggaggaggtaccagccatataatagggggtgtatgtgtgaattttgtttaaactctactgtatattgaaatgaaattcatttatttgtcttgacaatgttcaaatgatgtagattgtcttagaatgaatattcataagtactcagaactcttaagatgcagatgccacccgtgaggagctaaattcctaatgtgtattgtattccaacccaattttactggaactattgaataaatcttttattttctttcaggtttacttgatagtggatacattggtgtcagaggaccttgactgggttcattttatgtccagacatcacccctgaaacactgtactgtactatcttgctctgagtagtatcaactggatcgtctcatatttgcctcattcatcctattaatttcaaatgatactgtgggggaaaaacagggttagaaaaacaagtggaaaaaatggagtgatgttgtaatctaaacaagtgccttatgtttattgctaagaactggtgttaccaacccttttgagaagaaagggtctcttgacctgtattaacataggaaagtaaagttctttttgtttttcttta

SEQ ID NO: 283644 - DNA, 355 bp, Homo sapiens
ctgggaaactataaactacctttgctacattgcttattctttattattaatcgggttacattttaatcataaaagatatcacaagagataggatttggcttccattttttaaaaattgccatcagggaaaaaatatgaatttttgtggtttttttttttttcatataatttccacctcttccacctcctgccaattgcaagtctgacactatcctttctttctgtctcgatggatctacttttgaacttcctagacttattttggattccttctgggtgaataagtattatgagttctataatattttaataacaataactagcattgcatacttacatttattatataagaccc

SEQ ID NO: 283645 - DNA, 445 bp, Homo sapiens
ggttttttttttttttttttaaacaaacaaacttttacagctctttgccggcccactgtttgaattctgtgaagcagaaaatggttaaattcttagcacagtcgacctacagcagagaagcaagttcagtgcccacggctggctcaggttttcgtgttttcaggacagaattttgtgcgttctttcggttcgcggtcctgattcattagcggtggggggtgggggaaacaacaaacaaaaacaaacaaacaaacaaacacgaccaacaacgaactacagagtctggcctgctcgggcatttccctcaaatccccctcctagtcataaaaagaagagagagagagtgagagagagagagagagagagagagggaaaaaaaatatttctcaaatggcaatagacctcactacaaattattcatgaagacagttctcgattcaacagg

SEQ ID NO: 283646 - DNA, 535 bp, Homo sapiens
atgtaagggcatgtggctccccggttctctggtctttttttccccttcctgtgtggggatactgatttctggtcacaggagtaatgcccactttcccacccttgcctccccatccccatgagcacagtcaggcctgaatgcaaagcctgatgttgccaccgctagtgctatgaccttgggaacattactcacatttcctgagcctcaaggccttggtctataacacgagcataataaaatgtgagcggttgttatgagatttaaataagattaaggaagtgttacggttgtgttcagcatgttgcctggcagatactaaagattcaacaaatggtagctaatcttgtcagtcctggcttttaaaaacatctttcccagccatttcttaggctgtctagtttcttatcataaatacacagccagttgagaattgagttacatcttaagaggaaatttgggacagtaagtaatcttgccaatagtgcctctctgctatcttaaatctgtgtctcttcctcaatgcccttatcctccc

SEQ ID NO: 283647 - DNA, 1010 bp, Homo sapiens
ttcttctgctggtgaggcattgttttcatggttctctttccaaagaggatagtccagaatatcaggatgccttaaatttatagtagtagactgtaaaagattcattttggggtgatatctgtatatataacttgtttttttaaaagatgccgtttaaaagcatgattgggaaaatgtatgttttttaagagtagattgattcaccctacccacaggacattcaccaagccactgataccattttatatttcatcaattgcatgagtatttgctaatgttgattgaacctccctttccccataatgtgggcagatttggctcagctccttcatgagatcaggtcagtggtattgtttctgtcaagagtgttttttctgtcatttctactttttgtataaaggaaataaaacaatgttaacagccacctataagcttggggcacctactttctaacaaatctgtgatgttctgatttctaagggactttgcaagtattttgattgctgatatttgatttcaggaacaaactgctcagtttagcagttttcccataggcgtcaaataaaacattctatatttcattaagtactaaaggatcagacaagtatataaagtaagtcagttccttctgccttctcaaatctcagtgttgacatgggaaaatattaaggagaactaaggatttagccccttcttgggtcacttttttctgcctctgacacattatgagacctgtctaatccctttaggagacagtgtggagcccgagttcataacagccccattgttgatgcaactccttcactccatgtaagcggtaagttccagaaggcttcctcctatcatgtaaaaatatatttctgttgaaacttcaagagttttattttcaaagtgttggcatggcctataagaggcctgtcaagttttagtttaaaagtagaatgtattcttaccagtaggagggaacactgtatgctattatagttagtagcaatgttactgcagccaaa

SEQ ID NO: 283648 - DNA, 3581 bp, Homo sapiens
gcggccgcccaggctgcccccgcccgcgcgcgcccgttggggggcccggggagcggcgcccgcggccgggccgcattgtgacgtagcggggccgcggcagcgcctccaccgcccgcctacttcggctgaggctgttctgctcctgccgctgcggtccgtcggtcggtcagtcagtcccttcgcgctcctgagccgccggcgcgccgggcgccccgggaatttataagtatttgaccgtactcaaaatgtgcaaggaagaataatggaagcccctgaataccttgatttggatgaaattgactttagtgatgacatatcttattcagtcacatcactcaagacgatcccagaactgtgccgaagatgtgatacgcaaaacgaagacagatcagtttctagctctagctggaattgtggcatctcaactcttattacaaacacgcaaaagcccacaggaatcgctgatgtgtacagtaagttccgcccagtgaagcgggtttcgccactgaaacatcagccagagactctggagaacaatgaaagtgatgaccaaaagaaccagaaagtggttgagtaccagaaagggggtgagtctgacctgggcccccagcctcaggagcttggccctggagatggagtgggcggcccaccaggtaagagctctgagcccagcacatcgctgggtgaactggagcactacgacctcgacatggatgagattctggatgtgccttatattaaatccagtcagcagcttgcctcttttaccaaggtgacttcagaaaaaagaattttgggcttatgcacaaccatcaatggcctttctggcaaagcctgctctacaggaagttctgagagctcatcatccaacatggcaccattttgtgttctttctcccgtgaaaagccctcacttgagaaaagcatcagctgtcatccacgaccagcacaagctgtccactgaagaaaccgagatctcacctcctctggttaaatgtggctctgcatatgagcctgaaaaccagagtaaagacttcctaaacaagacatttagtgatcctcatggtcgaaaagttgagaagacaacaccagactgccagctcagggccttccacctacaatcctcagcagcagaatccaaaccagaagagcaggtcagtggcctaaaccggaccagctcccaaggcccagaagaaaggagtgagtatctgaaaaaagtgaaaagcatcttgaacattgttaaagaaggacagatctctctcctgccacacctagctgcagacaatctagacaaaattcacgacgaaaatggaaacaatctattacatattgcggcgtcacagggacacgcagagtgtctacagcacctcacttctttgatgggagaagactgcctcaatgagcgcaacactgagaagttgactccagcaggcctggccattaagaatggtcagttggagtgcgtacgctggatggtgagcgaaacagaagccattgcagaactgagttgttctaaggattttccaagccttattcattacgcaggttgctatggccaggaaaagattcttctgtggcttcttcagtttatgcaagaacagggcatctcgttggatgaagtagaccaggatggcaacagtgccgttcacgtagcctcacagcatggctaccttggatgcatacagaccttggttgaatatggagcaaatgtcaccatgcagaaccacgctggggaaaagccctcccagagcgccgagcggcaggggcacaccctgtgctccaggtacctggtggtggtggagacctgcatgtcgctggcctctcaagtggtgaagttaaccaagcagctaaaggaacaaacagtagaacgtgtcacgctgcagaaccaactccaacaatttctagaagcccagaaatcagagggcaagtcactcccttcttcacccagttcaccatcctcacctgcctccagaaagtcccagtggaaatctccagatgcagatgatgattctgtagccaaaagcaagccaggagtccaagaggggattcaggttcttggaagcctgtcagcctccagccgggctagacccaaagcaaaagatgaagattctgataaaatcttacgccagttattgggaaaggaaatctcagaaaatgtctgcacccaggaaaaactgtccttggaattccaggatgctcaggcttcctctagaaattctaaaaagatcccactggagaagagggaactgaagttagccaggctgagacagctgatgcagaggtcactgagtgagtctgacacagactccaacaactctgaggaccccaagactaccccagtgaggaaggctgaccgaccaaggccgcagcccattgtagaaagcgtagagagtatggacagcgcagaaagcctgcacctgatgattaagaaacacaccttggcatcagggggacgcaggtttcctttcagcatcaaggcctccaaatccctggatggccacagcccatctcccacctcagagagcagcgaaccagacttagaatcccagtatccaggctcagggagtattcctccaaaccagccctctggtgaccctcagcagcccagccctgacagtactgctgcccagaaagttgccacaagtcccaagagtgccctcaagtctccatcttccaagcgtaggacatctcagaacttaaaactgagagttacctttgaggagcctgtggtgcagatggagcagcctagccttgaactgaatggagaaaaagacaaagataagggcaggactctccagcggacctccacaagtaacgaatcgggggatcaactgaaaaggccttttggagcctttcgatctatcatggagacactaagtggcaaccaaaacaataataataactaccaggcagccaaccagctgaaaacctctacattgcccttgacctcacttgggaggaagacagatgccaagggaaaccctgccagctccgctagcaaaggaaagaataaggcagcataatgacatcaatagaaaaatgaagaaatcctacagcataaagcacattgctgagccagagtcaaaagaactcttcttgtaaatcactttttaaattttctctcactgatgccctttggaaattattggaaatttctggactatcctctttggaaagagaaccatgaaaacaatgcctcaccagcagaagaacagaatatcaggatgccttaaatttatagtagtagactgtaaaagattcattttggggtgatatctgtatatataacttgtttttttaaaagatgccgtttaaaagcatgattgggaaaatgtatgttttttaagagtagattgattcaccctacccacaggacattcaccaagccactgataccattttatatttcatcaattgcatgagtatttgctaatgttgattgaacctccctttccccataatgtgggcagatttggctcagctccttcatgagatcaggtcagtggtattgtttctgtcaagagtgttttttctgtcatttctactttttgtataaaggaaataaaacaatgttaacagcca

SEQ ID NO: 283649 - DNA, 2367 bp, Homo sapiens
  misc_feature (358)..(358): n is a, c, g, or t
tattcctgatcaggttggcgcagcaacaaataaacaggtgttatttcaaaaccaattaccagagaccaaatccagttactagagcccaagcaaatgagaacaggtaagattccagtctccccctcttacaggcatctctgactatgagtgattctcttggagcccaaccatgacaagagacagaactccccaccacaaagactgcactgcatatctcataaaggagagcacactatggacagcctcctcctctccttcccagccccctccttatgtgggctgcagatgagcattgatagtagtaggactggctctgctacatcatcatagactctgaagggaggtgtgtgatattgantgctgaaaggtccctagaggctctcttcatactattcaacattctgttacagtcattaaaaaataatgtgtacagagatgtcctgatacacatgtccttcattttctgacagaccttggttgaatatggagcaaatgtcaccatgcagaaccacgctggggaaaagccctcccagagcgccgagcggcaggggcacaccctgtgctccaggtacctggtggtggtggagacctgcatgtcgctggcctctcaagtggtgaagttaaccaagcagctaaaggaacaaacagtagaacgtgtcacgctgcagaaccaactccaacaatttctagaagcccagaaatcagagggcaagtcactcccttcttcacccagttcaccatcctcacctgcctccagaaagtcccagtggaaatctccagatgcagatgatgattctgtagccaaaagcaagccaggagtccaagaggggattcaggttcttggaagcctgtcagcctccagccgggctagacccaaagcaaaagatgaagattctgataaaatcttacgccagttattgggaaaggaaatctcagaaaatgtctgcacccaggaaaaactgtccttggaattccaggatgctcaggcttcctctagaaattctaaaaagatcccactggagaagagggaactgaagttagccaggctgagacagctgatgcagaggtcactgagtgagtctgacacagactccaacaactctgaggaccccaagactaccccagtgaggaaggctgaccgaccaaggccgcagcccattgtagaaagcgtagagagtatggacagcgcagaaagcctgcacctgatgattaagaaacacaccttggcatcagggggacgcaggtttcctttcagcatcaaggcctccaaatccctggatggccacagcccatctcccacctcagagagcagcgaaccagacttagaatcccagtatccaggctcagggagtattcctccaaaccagccctctggtgaccctcagcagcccagccctgacagtactgctgcccagaaagttgccacaagtcccaagagtgccctcaagtctccatcttccaagcgtaggacatctcagaacttaaaactgagagttacctttgaggagcctgtggtgcagatggagcagcctagccttgaactgaatggagaaaaagacaaagataagggcaggactctccagcggacctccacaagtaacgaatcgggggatcaactgaaaaggccttttggagcctttcgatctatcatggagacactaagtggcaaccaaaacaataataataactaccaggcagccaaccagctgaaaacctctacattgcccttgacctcacttgggaggaagacagatgccaagggaaaccctgccagctccgctagcaaaggaaagaataaggcagcataatgacatcaatagaaaaatgaagaaatcctacagcataaagcacattgctgagccagagtcaaaagaactcttcttgtaaatcactttttaaattttctctcactgatgccctttggaaattattggaaatttctggactatcctctttggaaagagaaccatgaaaacaatgcctcaccagcagaagaacagaatatcaggatgccttaaatttatagtagtagactgtaaaagattcattttggggtgatatctgtatatataacttgtttttttaaaagatgccgtttaaaagcatgattgggaaaatgtatgttttttaagagtagattgattcaccctacccacaggacattcaccaagccactgataccattttatatttcatcaattgcatgagtatttgctaatgttgattgaacctccctttccccataatgtgggcagatttggctcagctccttcatgagatcaggtcagtggtattgtttctgtcaagagtgttttttctgtcatttctactttttgtataaaggaaataaaacaatgttaacagcca

SEQ ID NO: 283650 - DNA, 2529 bp, Homo sapiens
gcggccgcccaggctgcccccgcccgcgcgcgcccgttggggggcccggggagcggcgcccgcggccgggccgcattgtgacgtagcggggccgcggcagcgcctccaccgcccgcctacttcggctgaggctgttctgctcctgccgctgcggtccgtcggtcggtcagtcagtcccttcgcgctcctgagccgccggcgcgccgggcgccccgggaatttataagtatttgaccgtactcaaaatgtgcaaggaagaataatggaagcccctgaataccttgatttggatgaaattgactttagtgatgacatatcttattcagtcacatcactcaagacgatcccagaactgtgccgaagatgtgatacgcaaaacgaagacagatcagaatggtcagttggagtgcgtacgctggatggtgagcgaaacagaagccattgcagaactgagttgttctaaggattttccaagccttattcattacgcaggttgctatggccaggaaaagattcttctgtggcttcttcagtttatgcaagaacagggcatctcgttggatgaagtagaccaggatggcaacagtgccgttcacgtagcctcacagcatggctaccttggatgcatacagaccttggttgaatatggagcaaatgtcaccatgcagaaccacgctggggaaaagccctcccagagcgccgagcggcaggggcacaccctgtgctccaggtacctggtggtggtggagacctgcatgtcgctggcctctcaagtggtgaagttaaccaagcagctaaaggaacaaacagtagaacgtgtcacgctgcagaaccaactccaacaatttctagaagcccagaaatcagagggcaagtcactcccttcttcacccagttcaccatcctcacctgcctccagaaagtcccagtggaaatctccagatgcagatgatgattctgtagccaaaagcaagccaggagtccaagaggggattcaggttcttggaagcctgtcagcctccagccgggctagacccaaagcaaaagatgaagattctgataaaatcttacgccagttattgggaaaggaaatctcagaaaatgtctgcacccaggaaaaactgtccttggaattccaggatgctcaggcttcctctagaaattctaaaaagatcccactggagaagagggaactgaagttagccaggctgagacagctgatgcagaggtcactgagtgagtctgacacagactccaacaactctgaggaccccaagactaccccagtgaggaaggctgaccgaccaaggccgcagcccattgtagaaagcgtagagagtatggacagcgcagaaagcctgcacctgatgattaagaaacacaccttggcatcagggggacgcaggtttcctttcagcatcaaggcctccaaatccctggatggccacagcccatctcccacctcagagagcagcgaaccagacttagaatcccagtatccaggctcagggagtattcctccaaaccagccctctggtgaccctcagcagcccagccctgacagtactgctgcccagaaagttgccacaagtcccaagagtgccctcaagtctccatcttccaagcgtaggacatctcagaacttaaaactgagagttacctttgaggagcctgtggtgcagatggagcagcctagccttgaactgaatggagaaaaagacaaagataagggcaggactctccagcggacctccacaagtaacgaatcgggggatcaactgaaaaggccttttggagcctttcgatctatcatggagacactaagtggcaaccaaaacaataataataactaccaggcagccaaccagctgaaaacctctacattgcccttgacctcacttgggaggaagacagatgccaagggaaaccctgccagctccgctagcaaaggaaagaataaggcagcataatgacatcaatagaaaaatgaagaaatcctacagcataaagcacattgctgagccagagtcaaaagaactcttcttgtaaatcactttttaaattttctctcactgatgccctttggaaattattggaaatttctggactatcctctttggaaagagaaccatgaaaacaatgcctcaccagcagaagaacagaatatcaggatgccttaaatttatagtagtagactgtaaaagattcattttggggtgatatctgtatatataacttgtttttttaaaagatgccgtttaaaagcatgattgggaaaatgtatgttttttaagagtagattgattcaccctacccacaggacattcaccaagccactgataccattttatatttcatcaattgcatgagtatttgctaatgttgattgaacctccctttccccataatgtgggcagatttggctcagctccttcatgagatcaggtcagtggtattgtttctgtcaagagtgttttttctgtcatttctactttttgtataaaggaaataaaacaatgttaacagcca

SEQ ID NO: 283651 - DNA, 4238 bp, Homo sapiens
gcggccgcccaggctgcccccgcccgcgcgcgcccgttggggggcccggggagcggcgcccgcggccgggccgcattgtgacgtagcggggccgcggcagcgcctccaccgcccgcctacttcggctgaggctgttctgctcctgccgctgcggtccgtcggtcggtcagtcagtcccttcgcgctcctgagccgccggcgcgccgggcgccccgggaatttataagtatttgaccgtactcaaaatgtgcaaggaagaataatggaagcccctgaataccttgatttggatgaaattgactttagtgatgacatatcttattcagtcacatcactcaagacgatcccagaactgtgccgaagatgtgatacgcaaaacgaagacagatcagtttctagctctagctggaattgtggcatctcaactcttattacaaacacgcaaaagcccacaggaatcgctgatgtgtacagtaagttccgcccagtgaagcgggtttcgccactgaaacatcagccagagactctggagaacaatgaaagtgatgaccaaaagaaccagaaagtggttgagtaccagaaagggggtgagtctgacctgggcccccagcctcaggagcttggccctggagatggagtgggcggcccaccaggtaagagctctgagcccagcacatcgctgggtgaactggagcactacgacctcgacatggatgagattctggatgtgccttatattaaatccagtcagcagcttgcctcttttaccaaggtgacttcagaaaaaagaattttgggcttatgcacaaccatcaatggcctttctggcaaagcctgctctacaggaagttctgagagctcatcatccaacatggcaccattttgtgttctttctcccgtgaaaagccctcacttgagaaaagcatcagctgtcatccacgaccagcacaagctgtccactgaagaaaccgagatctcacctcctctggttaaatgtggctctgcatatgagcctgaaaaccagagtaaagacttcctaaacaagacatttagtgatcctcatggtcgaaaagttgagaagacaacaccagactgccagctcagggccttccacctacaatcctcagcagcagaatccaaaccagaagagcaggtcagtggcctaaaccggaccagctcccaaggcccagaagaaaggagtgagtatctgaaaaaagtgaaaagcatcttgaacattgttaaagaaggacagatctctctcctgccacacctagctgcagacaatctagacaaaattcacgacgaaaatggaaacaatctattacatattgcggcgtcacagggacacgcagagtgtctacagcacctcacttctttgatgggagaagactgcctcaatgagcgcaacactgagaagttgactccagcaggcctggccattaagaatggtcagttggagtgcgtacgctggatggtgagcgaaacagaagccattgcagaactgagttgttctaaggattttccaagccttattcattacgcaggttgctatggccaggaaaagattcttctgtggcttcttcagtttatgcaagaacagggcatctcgttggatgaagtagaccaggatggcaacagtgccgttcacgtagcctcacagcatggctaccttggatgcatacagaccttggttgaatatggagcaaatgtcaccatgcagaaccacgctggggaaaagccctcccagagcgccgagcggcaggggcacaccctgtgctccaggtacctggtggtggtggagacctgcatgtcgctggcctctcaagtggtgaagttaaccaagcagctaaaggaacaaacagtagaacgtgtcacgctgcagaaccaactccaacaatttctagaagcccagaaatcagagggcaagtcactcccttcttcacccagttcaccatcctcacctgcctccagaaagtcccagtggaaatctccagatgcagatgatgattctgtagccaaaagcaagccaggagtccaagaggggattcaggttcttggaagcctgtcagcctccagccgggctagacccaaagcaaaagatgaagattctgataaaatcttacgccagttattgggaaaggaaatctcagaaaatgtctgcacccaggaaaaactgtccttggaattccaggatgctcaggcttcctctagaaattctaaaaagatcccactggagaagagggaactgaagttagccaggctgagacagctgatgcagaggtcactgagtgagtctgacacagactccaacaactctgaggaccccaagactaccccagtgaggaaggctgaccgaccaaggccgcagcccattgtagaaagcgtagagagtatggacagcgcagaaagcctgcacctgatgattaagaaacacaccttggcatcagggggacgcaggtttcctttcagcatcaaggcctccaaatccctggatggccacagcccatctcccacctcagagagcagcgaaccagacttagaatcccagtatccaggctcagggagtattcctccaaaccagccctctggtgaccctcagcagcccagccctgacagtactgctgcccagaaagttgccacaagtcccaagagtgccctcaagtctccatcttccaagcgtaggacatctcagaacttaaaactgagagttacctttgaggagcctgtggtgcagatggagcagcctagccttgaactgaatggagaaaaagacaaagataagggcaggactctccagcggacctccacaagtaacgaatcgggggatcaactgaaaaggccttttggagcctttcgatctatcatggagacactaagtggcaaccaaaacaataataataactaccaggcagccaaccagctgaaaacctctacattgcccttgacctcacttgggaggaagacagatgccaagggaaaccctgccagctccgctagcaaaggaaagaataaggcagaaatgtacagcagctgcatcaatctttcctctaacatgctgattgaagagcatctgtgtaacgacacacggcataatgacatcaatagaaaaatgaagaaatcctacagcataaagcacattgctgagccagagtcaaaagaactcttcttgtaaatcactttttaaattttctctcactgatgccctttggaaattattggaaatttctggactatcctctttggaaagagaaccatgaaaacaatgcctcaccagcagaagaacagaatatcaggatgccttaaatttatagtagtagactgtaaaagattcattttggggtgatatctgtatatataacttgtttttttaaaagatgccgtttaaaagcatgattgggaaaatgtatgttttttaagagtagattgattcaccctacccacaggacattcaccaagccactgataccattttatatttcatcaattgcatgagtatttgctaatgttgattgaacctccctttccccataatgtgggcagatttggctcagctccttcatgagatcaggtcagtggtattgtttctgtcaagagtgttttttctgtcatttctactttttgtataaaggaaataaaacaatgttaacagccacctataagcttggggcacctactttctaacaaatctgtgatgttctgatttctaagggactttgcaagtattttgattgctgatatttgatttcaggaacaaactgctcagtttagcagttttcccataggcgtcaaataaaacattctatatttcattaagtactaaaggatcagacaagtatataaagtaagtcagttccttctgccttctcaaatctcagtgttgacatgggaaaatattaaggagaactaaggatttagccccttcttgggtcacttttttctgcctctgacacattatgagacctgtctaatccctttaggagacagtgtggagcccgagttcataacagccccattgttgatgcaactccttcactccatgtaagcggtaagttccagaaggcttcctcctatcatgtaaaaatatatttctgttgaaacttcaagagttttattttcaaagtgttggcatggcctataagaggcctgtcaagttttagtttaaaagtagaatgtattcttaccagtaggagggaacactgtatgctattatagttagtagcaatgttactgcagccaaa

SEQ ID NO: 283652 - DNA, 3238 bp, Homo sapiens
gcggccgcccaggctgcccccgcccgcgcgcgcccgttggggggcccggggagcggcgcccgcggccgggccgcattgtgacgtagcggggccgcggcagcgcctccaccgcccgcctacttcggctgaggctgttctgctcctgccgctgcggtccgtcggtcggtcagtcagtcccttcgcgctcctgagccgccggcgcgccgggcgccccgggaatttataagtatttgaccgtactcaaaatgtgcaaggaagaataatggaagcccctgaataccttgatttggatgaaattgactttagtgatgacatatcttattcagtcacatcactcaagacgatcccagaactgtgccgaagatgtgatacgcaaaacgaagacagatcagtttctagctctagctggaattgtggcatctcaactcttattacaaacacgcaaaagcccacaggaatcgctgatgtgtacagtaagttccgcccagtgaagcgggtttcgccactgaaacatcagccagagactctggagaacaatgaaagtgatgaccaaaagaaccagaaagtggttgagtaccagaaagggggtgagtctgacctgggcccccagcctcaggagcttggccctggagatggagtgggcggcccaccaggtaagagctctgagcccagcacatcgctgggtgaactggagcactacgacctcgacatggatgagattctggatgtgccttatattaaatccagtcagcagcttgcctcttttaccaaggtgacttcagaaaaaagaattttgggcttatgcacaaccatcaatggcctttctggcaaagcctgctctacaggaagttctgagagctcatcatccaacatggcaccattttgtgttctttctcccgtgaaaagccctcacttgagaaaagcatcagctgtcatccacgaccagcacaagctgtccactgaagaaaccgagatctcacctcctctggttaaatgtggctctgcatatgagcctgaaaaccagagtaaagacttcctaaacaagacatttagtgatcctcatggtcgaaaagttgagaagacaacaccagactgccagctcagggccttccacctacaatcctcagcagcagaatccaaaccagaagagcaggtcagtggcctaaaccggaccagctcccaaggcccagaagaaaggagtgagtatctgaaaaaagtgaaaagcatcttgaacattgttaaagaaggacagatctctctcctgccacacctagctgcagacaatctagacaaaattcacgacgaaaatggaaacaatctattacatattgcggcgtcacagggacacgcagagtgtctacagcacctcacttctttgatgggagaagactgcctcaatgagcgcaacactgagaagttgactccagcaggcctggccattaagaatggtcagttggagtgcgtacgctggatggtgagcgaaacagaagccattgcagaactgagttgttctaaggattttccaagccttattcattacgcaggttgctatggccaggaaaagattcttctgtggcttcttcagtttatgcaagaacagggcatctcgttggatgaagtagaccaggatggcaacagtgccgttcacgtagcctcacagcatggctaccttggatgcatacagaccttggttgaatatggagcaaatgtcaccatgcagaaccacgctggggaaaagccctcccagagcgccgagcggcaggggcacaccctgtgctccaggtacctggtggtggtggagacctgcatgtcgctggcctctcaagtggtgaagttaaccaagcagctaaaggaacaaacagtagaacgtgtcacgctgcagaaccaactccaacaatttctagaagcccagaaatcagagggcaagtcactcccttcttcacccagttcaccatcctcacctgcctccagaaagtcccagtggaaatctccagatgcagatgatgattctgtagccaaaagcaagccaggagtccaagaggggattcaggttcttggaagcctgtcagcctccagccgggctagacccaaagcaaaagatgaagattctgataaaatcttacgccagttattgggaaaggaaatctcagaaaatgtctgcacccaggaaaaactgtccttggaattccaggatgctcaggcttcctctagaaattctaaaaagatcccactggagaagagggaactgaagttagccaggctgagacagctgatgcagaggtcactgagtgagtctgacacagactccaacaactctgaggaccccaagactaccccagtgaggaaggctgaccgaccaaggccgcagcccattgtagaaagcgtagagagtatggacagcgcagaaagcctgcacctgatgattaagaaacacaccttggcatcagggggacgcaggtttcctttcagcatcaaggcctccaaatccctggatggccacagcccatctcccacctcagagagcagcgaaccagacttagaatcccagtatccaggctcagggagtattcctccaaaccagccctctggtgaccctcagcagcccagccctgacagtactgctgcccagaaagttgccacaagtcccaagagtgccctcaagtctccatcttccaagcgtaggacatctcagaacttaaaactgagagttacctttgaggagcctgtggtgcagatggagcagcctagccttgaactgaatggagaaaaagacaaagataagggcaggactctccagcggacctccacaagtaacgaatcgggggatcaactgaaaaggccttttggagcctttcgatctatcatggagacactaagtggcaaccaaaacaataataataactaccaggcagccaaccagctgaaaacctctacattgcccttgacctcacttgggaggaagacagatgccaagggaaaccctgccagctccgctagcaaaggaaagaataaggcagtaagtgctatttggagaatattcttttttttccttcaaatggattatgttgttcctaatatcacagattgtgggcccacactaccttgagggaatccccaggaaaaaaaaaaatccaaagggatgcatggaaagccaacttcatgtgtctaatgagacatgtcatgttagatacataccccttgctcttcttttggaaaatactctaagagagaaaggtta

SEQ ID NO: 283653 - DNA, 2195 bp, Homo sapiens
  misc_feature (25)..(26): n is a, c, g, or t
tgcgcgctgctcttccccgcggagnncgcgcagtccgcgcagccctcatcgcaactgggcccgcgcgcagatccaccaaagagaaagcagccctgtgccagttgctctgccagcctttcacaggagaagtgtcactagaatactacagcccccacaggctctgctccacagaaacttaaggctgaaagagtgtccgccatcagggacatcctctgtcactacggtgggaaaagaacatggccttacataggaagtccttctaaagagctgcctgccagctgcccttccccagatcccgaatatcctcctggccaggtggagcagagaacagttcctcagctggtcatgctgagctcataccctgatggctgctccatgaggtcaagactgggtctcctccctcctcccccttcaccaatgcctggtctcacggggctagttttgacccccacgctatggcatcatcgacctccctcccagctcctggctctcggcctaagaagcctctaggcaagatggctgactggttcaggcagaccctgctgaagaagcccaagaagaggcccaactccccagaaagcacctccagcgatgcttcacagcctacctcacaggacagcccactacccccaagcctcagctcagtcacgtctcccagcctgccacccacacatgcgagtgacagtggcagtagtcgctggagcaaagactatgacgtctgcgtgtgccacagtgaggaagacctggtggccgcccaggacctggtctcctacttggaaggcagcactgccagcctgcgctgcttcctgcaactccgggatgcaaccccaggcggcgctatagtgtccgagctgtgccaggcactgagcagtagtcactgccgggtgctgctcatcacgccgggcttccttcaggacccctggtgcaagtaccagatgctgcaggccctgaccgaggctccaggggccgagggctgcaccatccccctgctgtcgggcctcagcagagctgcctacccacctgagctccgattcatgtactacgtcgatggcaggggccctgatggtggctttcgtcaagtcaaagaagctgtcatgcgttatctgcagacactcagttgacacttgttatatcatgggaccccggaaattggagtgaagctagaaacagaaaacccatgcagggctggggactccccaagaaggccatgaggaagccagaaattggaggtggtaggaagtggtactgatcaatgatggccagcaggactcatctcctgcctaactggacaggaagcctggcacccacttctgtcttcccctggaactgggcactggcgtacactggtatccctcctaaagaagtgactcacctgactgatcagcaagaagcctagattgcaggcctcaccatggatggtcttcctagttgcctggggaaaccctggaatgggcatcaggagaaagcaacaagaatccagtccttcacactcacactactctgttcctcttcccagagacatcgattcaccccaaagtgctgggattacaggcgtgaagcaccacgcccagcctgaaataatattttaccttttactttgtgctttttgtgttttactcaggaagtcctcccctacatctgttttcttctgtatttcttttcatatttaggtctttaatccacctggattttttgtttgggtttttgttgttctttagtcaaagatccaattcttttttctatttaaataaccatcattgactgactagtccatccttaccccacccctactgattatgatgtcactgctgtcacatattgtcatacgtggggggctgttactgggttctccagtctcctccctttatctgtttgtgtatccctgtgctggtgccacactgcctcgttcactgatgtttttaataagcctgcaccatttgtatgtcaattcttcctgctcttcttatccatcaaaaatcactttaacttttcttgttcctttactcttccatataaattgtttattcaaccatcaggttccaggaaaaagcctgttagtattttcattggacttacatggaatttgtagattttgaaaaaacagatatttttatgagtcttcctattcataaaaatagtatgtctccatttacttatgtctttaagtgtatttcagtaaagctttctatcttttc

SEQ ID NO: 283654 - DNA, 768 bp, Homo sapiens
cataaaattgatgaaaaggaagaagtttgatgaatcccattgtgcctggccacattctttaaattttgaaaccttttattttagtgtgtctaataatacttgcttccatgagttctcaggtttgttttgatctcacagatccaccaaagagaaagcagccctgtgccagttgctctgccagcctttcacaggagaagtgtcactagaatactacagcccccacaggctctgctccacagaaacttaaggctgaaagagtgtccgccatcagggacatcctctgtcactacggtgggaaaagaacatgaacatggcaggttgcctttctaagggattcttgggcctttgtatttccatataaatttagaagcagtctgacaacctccccaccaaaaaacctaaaaaacaaaaatcttctagactttggaacagcactgaattaatgatcagtttgggaaacgttaacattacaagtttaataaaccatgaacataatatacccctccaatatctagattattttatatacatagtagcccacattttctaagcatttattacatgccaggcaccattaggactttacataaatgatttcatttaatcttcacaataatgctgagaaggaggctctagtacttccatttcacggatggagaaacgagtttagcaaggtggccaaaggtcacggttaaccagagatgagaatcaggcactctacctgcagtctgcagtctgtaccactttttgacatgaccttcctgagct

SEQ ID NO: 283655 - DNA, 408 bp, Homo sapiens
tttcctttacatcagtttctgcacataatattggaaaagcattctagaaagcactaaaggtattgtgctacttcttttctgaagaaattctttactaattttcttttctttatttttttgagatcgagtctcgctctgtcacccaggctggagcacagtggtgcaatctcggctcactgcaacctctgcctcccaggttcaagggattatccagcctcagccacccaagtagctaggattacaggtgtgcgacaccatgcctggctaatttttgtatttttagtagagacagggtttcgacctgtcggccaggctggtcttgaactcctgagctcacatgatctgcccacctcggcctcccaaagtgctgggattacaggggagcaccagcacacccggctaaatttt

SEQ ID NO: 283656 - DNA, 452 bp, Homo sapiens
tttcctttacatcagtttctgcacataatattggaaaagcattctagaaagcactaaaggtattgtgctacttcttttctgaagaaattctttactaattttcttttctttatttttttgagatcgagtctcgctctgtcacccaggctggagcacatgaagagatgggaatccagggctcagggttcaacgccttcacctgagatcacaagcccatggatgctgtgacatctgggagcttcatcagtggtctggctaaagctgatactttcacagtcaccatcttcacctttggactgggaagaatcaccatttttcttctggcagatgactgtattccttataggacaggcaaggtttcattcatctgttctcagtaagtttgttgttgaactgaaatgaatttcattatttcctccaatgtgtacttttgtgcccccctctcacttctc

SEQ ID NO: 283657 - DNA, 224 bp, Homo sapiens
tttttggtatgattctactttatgaattgttttcaaagcacaaagaaagcgactgcgtattagaccacacagcaaatcagagaataggcagagctagtgagtagagcttccagttggagatttgggttcattaccttacctacttgtcaaccacatctcaagatatgatgacagttaccaggtcttggaaagatgcgtgttataagatcctctagagtaccttg

SEQ ID NO: 283658 - DNA, 2384 bp, Homo sapiens
  misc_feature (25)..(26): n is a, c, g, or t
tgcgcgctgctcttccccgcggagnncgcgcagtccgcgcagccctcatcgcaactgggcccgcgcgcagatccaccaaagagaaagcagccctgtgccagttgctctgccagcctttcacaggagaagtgtcactagaatactacagcccccacaggctctgctccacagaaacttaaggctgaaagagtgtccgccatcagggacatcctctgtcactacggtgggaaaagaacatggccttacataggaagtccttctaaagagctgcctgccagctgcccttccccagatcccgaatatcctcctggccaggtggagcagagaacagttcctcagctggtcatgctgagctcataccctgatggctgctccatgaggtcaagactgggtctcctccctcctcccccttcaccaatgcctggtctcacggggctagttttgacccccacgctatggcatcatcgacctccctcccagctcctggctctcggcctaagaagcctctaggcaagatggctgactggttcaggcagaccctgctgaagaagcccaagaagaggcccaactccccagaaagcacctccagcgatgcttcacagcctacctcacaggacagcccactacccccaagcctcagctcagtcacgtctcccagcctgccacccacacatgcgagtgacagtggcagtagtcgctggagcaaagactatgacgtctgcgtgtgccacagtgaggaagacctggtggccgcccaggacctggtctcctacttggaaggcagcactgccagcctgcgctgcttcctgcaactccgggatgcaaccccaggcggcgctatagtgtccgagctgtgccaggcactgagcagtagtcactgccgggtgctgctcatcacgccgggcttccttcaggacccctggtgcaagtaccagatgctgcaggccctgaccgaggctccaggggccgagggctgcaccatccccctgctgtcgggcctcagcagagctgcctacccacctgagctccgattcatgtactacgtcgatggcaggggccctgatggtggctttcgtcaagtcaaagaagctgtcatgcgttatctgcagacactcagttgacacttgttatatcatgggaccccggaaattggagtgaagctagaaacagaaaacccatgcagggcctcggattcccacaaatgtgacaagaggtatagggagtgagtcgcagcgctttgctcgtgaccctgggatcagagcacccatcaggcttccattactgtgggctccctaagaagaccatggagagcttggggactcccccaggaaggccgtgaagctggggattccccctaggaaagccatgaggaagctggggactccccaagaaggccatgaggaagccagaaattggaggtggtaggaagtggtactgatcaatgatggccagcaggactcatctcctgcctaactggacaggaagcctggcacccacttctgtcttcccctggaactgggcactggcgtacactggtatccctcctaaagaagtgactcacctgactgatcagcaagaagcctagattgcaggcctcaccatggatggtcttcctagttgcctggggaaaccctggaatgggcatcaggagaaagcaacaagaatccagtccttcacactcacactactctgttcctcttcccagagacatcgattcaccccaaagtgctgggattacaggcgtgaagcaccacgcccagcctgaaataatattttaccttttactttgtgctttttgtgttttactcaggaagtcctcccctacatctgttttcttctgtatttcttttcatatttaggtctttaatccacctggattttttgtttgggtttttgttgttctttagtcaaagatccaattcttttttctatttaaataaccatcattgactgactagtccatccttaccccacccctactgattatgatgtcactgctgtcacatattgtcatacgtggggggctgttactgggttctccagtctcctccctttatctgtttgtgtatccctgtgctggtgccacactgcctcgttcactgatgtttttaataagcctgcaccatttgtatgtcaattcttcctgctcttcttatccatcaaaaatcactttaacttttcttgttcctttactcttccatataaattgtttattcaaccatcaggttccaggaaaaagcctgttagtattttcattggacttacatggaatttgtagattttgaaaaaacagatatttttatgagtcttcctattcataaaaatagtatgtctccatttacttatgtctttaagtgtatttcagtaaagctttctatcttttc

SEQ ID NO: 283659 - DNA, 2515 bp, Homo sapiens
  misc_feature (25)..(26): n is a, c, g, or t
tgcgcgctgctcttccccgcggagnncgcgcagtccgcgcagccctcatcgcaactgggcccgcgcgcagttccacagctccagctacaaaagaactgaaaaggaacagggaaggtgcatggcgtcttggattccaggaagtaggcagtgtgtatggttactggaatttacctgccatcttgctcaattatcctgtcaaagatccaccaaagagaaagcagccctgtgccagttgctctgccagcctttcacaggagaagtgtcactagaatactacagcccccacaggctctgctccacagaaacttaaggctgaaagagtgtccgccatcagggacatcctctgtcactacggtgggaaaagaacatggccttacataggaagtccttctaaagagctgcctgccagctgcccttccccagatcccgaatatcctcctggccaggtggagcagagaacagttcctcagctggtcatgctgagctcataccctgatggctgctccatgaggtcaagactgggtctcctccctcctcccccttcaccaatgcctggtctcacggggctagttttgacccccacgctatggcatcatcgacctccctcccagctcctggctctcggcctaagaagcctctaggcaagatggctgactggttcaggcagaccctgctgaagaagcccaagaagaggcccaactccccagaaagcacctccagcgatgcttcacagcctacctcacaggacagcccactacccccaagcctcagctcagtcacgtctcccagcctgccacccacacatgcgagtgacagtggcagtagtcgctggagcaaagactatgacgtctgcgtgtgccacagtgaggaagacctggtggccgcccaggacctggtctcctacttggaaggcagcactgccagcctgcgctgcttcctgcaactccgggatgcaaccccaggcggcgctatagtgtccgagctgtgccaggcactgagcagtagtcactgccgggtgctgctcatcacgccgggcttccttcaggacccctggtgcaagtaccagatgctgcaggccctgaccgaggctccaggggccgagggctgcaccatccccctgctgtcgggcctcagcagagctgcctacccacctgagctccgattcatgtactacgtcgatggcaggggccctgatggtggctttcgtcaagtcaaagaagctgtcatgcgttatctgcagacactcagttgacacttgttatatcatgggaccccggaaattggagtgaagctagaaacagaaaacccatgcagggcctcggattcccacaaatgtgacaagaggtatagggagtgagtcgcagcgctttgctcgtgaccctgggatcagagcacccatcaggcttccattactgtgggctccctaagaagaccatggagagcttggggactcccccaggaaggccgtgaagctggggattccccctaggaaagccatgaggaagctggggactccccaagaaggccatgaggaagccagaaattggaggtggtaggaagtggtactgatcaatgatggccagcaggactcatctcctgcctaactggacaggaagcctggcacccacttctgtcttcccctggaactgggcactggcgtacactggtatccctcctaaagaagtgactcacctgactgatcagcaagaagcctagattgcaggcctcaccatggatggtcttcctagttgcctggggaaaccctggaatgggcatcaggagaaagcaacaagaatccagtccttcacactcacactactctgttcctcttcccagagacatcgattcaccccaaagtgctgggattacaggcgtgaagcaccacgcccagcctgaaataatattttaccttttactttgtgctttttgtgttttactcaggaagtcctcccctacatctgttttcttctgtatttcttttcatatttaggtctttaatccacctggattttttgtttgggtttttgttgttctttagtcaaagatccaattcttttttctatttaaataaccatcattgactgactagtccatccttaccccacccctactgattatgatgtcactgctgtcacatattgtcatacgtggggggctgttactgggttctccagtctcctccctttatctgtttgtgtatccctgtgctggtgccacactgcctcgttcactgatgtttttaataagcctgcaccatttgtatgtcaattcttcctgctcttcttatccatcaaaaatcactttaacttttcttgttcctttactcttccatataaattgtttattcaaccatcaggttccaggaaaaagcctgttagtattttcattggacttacatggaatttgtagattttgaaaaaacagatatttttatgagtcttcctattcataaaaatagtatgtctccatttacttatgtctttaagtgtatttcagtaaagctttctatcttttc

SEQ ID NO: 283660 - DNA, 2432 bp, Homo sapiens
  misc_feature (25)..(26): n is a, c, g, or t
tgcgcgctgctcttccccgcggagnncgcgcagtccgcgcagccctcatcgcaactgggcccgcgcgcagatccaccaaagagaaagcagccctgtgccagttgctctgccagcctttcacaggagaagtgtcactagaatactacagcccccacaggctctgctccacagaaacttaaggctgaaagagtgtccgccatcagggacatcctctgtcactacggtgggaaaagaacatggccttacataggaagtccttctaaagagctgcctgccagctgcccttccccagatcccgaatatcctcctggccaggtggagcagagaacagttcctcagctggtcatgctgagctcataccctgatggctgctccatgaggtcaagactgggtctcctccctcctcccccttcaccaatgcctggtctcacggggctagttttgacccccacgctatggcatcatcgacctccctcccagctcctggctctcggcctaagaagcctctaggcaagatggctgactggttcaggcagaccctgctgaagaagcccaagaagaggcccaactccccagaaagcacctccagcgatgcttcacagcctacctcacaggacagcccactacccccaagcctcagctcagtcacgtctcccagcctgccacccacacatgcgagtgacagtggcagtagtcgctggagcaaagactatgacgtctgcgtgtgccacagtgaggaagacctggtggccgcccaggacctggtctcctacttggaaggcagcactgccagcctgcgctgcttcctgcaactccgggatgcaaccccaggcggcgctatagtgtccgagctgtgccaggcactgagcagtagtcactgccgggtgctgctcatcacgccgggcttccttcaggacccctggtgcaagtaccagatgctgcaggccctgaccgaggctccaggggccgagggctgcaccatccccctgctgtcgggcctcagcagagctgcctacccacctgagctccgattcatgtactacgtcgatggcaggggccctgatggtggctttcgtcaagtcaaagaagctgtcatgcgttatctgcagacactcagttgacacttgttatatcatgggaccccggaaattggagtgaagctagaaacagaaaacccatgcagggcctcggattcccacaaatgtgacaagaggtatagggagtgagtcgcagcgctttgctcgtgaccctgggatcagagcacccatcaggcttccattactgtgggctccctaagaagaccatggagagcttggggactcccccaggaaggccgtgaagctggggattccccctaggaaagccatgaggaagctggggactccccaagaaggccatgaggaagccagaaattggaggtggtaggaagtggtactgatcaatgatggccagcaggactcatctcctgcctaactggacaggaagcctggcacccacttctgtcttcccctggaactgggcactggcgtacactggtatccctcctaaagaagtgactcacctgactgatcagcaagaagcctagattgcaggcctcaccatggatggtcttcctagttgcctggggaaaccctggaatgggcatcaggagaaagcaacaagaatccagtccttcacactcacactactctgttcctcttcccagagacatcgattcaccccaaagtgctgggattacaggcgtgaagcaccacgcccagcctgaaataatattttaccttttactttgtgctttttgtgttttactcaggaagtcctcccctacatctgttttcttctgtatttcttttcatatttaggtctttaatccacctggattttttgtttgggtttttgttgttctttagtcaaagatccaattcttttttctatttaaataaccatcattgactgactagtccatccttaccccacccctactgattatgatgtcactgctgtcacatattgtcatacgtggggggctgttactgggttctccagtctcctccctttatctgtttgtgtatccctgtgctggtgccacactgcctcgttcactgatgtttttaataagcctgcaccatttgtatgtcaattcttcctgctcttcttatccatcaaaaatcactttaacttttcttgttcctttactcttccatataaattgtttattcaaccatcaggttccaggaaaaagcctgttagtattttcattggacttacatggaatttgtagattttgaaaaaacagatatttttatgagtcttcctattcataaaaatagtatgtctccatttacttatgtctttaagtgtatttcagtaaagctttctatcttttcacaaaataaaaaaaaaaactttagggggggcccggaccaaattcccct

SEQ ID NO: 283661 - DNA, 429 bp, Homo sapiens
actgctgtcacatattgtcatacgtggggggctgttactgggttctccagtctcctccctttatctgtttgtgtatccctgtgctggtgccacactgcctcgttcactgatgtttttaataagcctgcaccatttgtatgtcaattcttcctgctcttcttatccatcaaaaatcactttaacttttcttgttcctttactcttccatataaattgtttattcaaccatcaggttccaggaaaaagcctgttagtattttcattggacttacatggaatttgtagattttgaaaaaacagatatttttatgagtcttcctattcataaaaatagtatgtctccatttacttatgtctttaagtgtatttcagtaaagctttctatcttttccacattggtcagctcctctttttattagaattattccc

SEQ ID NO: 283662 - DNA, 891 bp, Homo sapiens
cataatattggaaaagcattctagaaagcactaaaggtattgtgctacttcttttctgaagaaattctttactaattttcttttctttatttttttgagatcgagtctcgctctgtcacccaggctggagcacagtggtgcaatctcggctcactgcaacctctgcctcccaggttcaagggattatccagcctcagccacccaagtagctaggattacaggtgtgcgacaccatgcctggctaatttttgtatttttagtagagacagggtttcgacctgtcggccaggctggtcttgaactcctgagctcacatgatctgcccacctcggcctcccaaagtgctgggattacaggggagcaccagcacacccggctaaattttgtatttttagtagagaaggggttttgacaggctggtctggaactcctgagctcacatgatctgcccacctcggcctcccaaagtgctgggattacaggcatgagccactgagcccgttccctttactaattttctatcaagtcatagttcttacaaagtgggtatttttggtatgattctactttatgaattgttttcaaagcacaaagaaagcgactgcgtattagaccacacagcaaatcagagaataggcagagctagtgagtagagcttccagttggagatttgggttcattaccttacctacttgtcaaccacatctcaagatatgatgacagttaccaggtcttggaaagattaacacgtgtttgaatatgtgacagttccacagctccagctacaaaagaactgaaaaggaacagggaaggtgcatggcgtcttggattccaggaagtaggcagtgtgtatggttactggaatttacctgccatcttgctcaattatcc

SEQ ID NO: 283663 - DNA, 1287 bp, Homo sapiens
  misc_feature (25)..(26): n is a, c, g, or t
tgcgcgctgctcttccccgcggagnncgcgcagtccgcgcagccctcatcgcaactgggcccgcgcgcagatccaccaaagagaaagcagccctgtgccagttgctctgccagcctttcacaggagaagtgtcactagaatactacagcccccacaggctctgctccacagaaacttaaggctgaaagagtgtccgccatcagggacatcctctgtcactacggtgggaaaagaacatggccttacataggaagtccttctaaagagctgcctgccagctgcccttccccagatcccgaatatcctcctggccaggtggagcagagaacagttcctcagctggtcatgctgagctcataccctgatggctgctccatgaggtcaagactgggtctcctccctcctcccccttcaccaatgcctggtctcacggggctagttttgacccccacgctatggcatcatcgacctccctcccagctcctggctctcggcctaagaagcctctaggcaagatggctgactggttcaggcagaccctgctgaagaagcccaagaagaggcccaactccccagaaagcacctccagcgatgcttcacagcctacctcacaggacagcccactacccccaagcctcagctcagtcacgtctcccagcctgccacccacacatgcgagtgacagtggcagtagtcgctggagcaaagactatgacgtctgcgtgtgccacagtgaggaagacctggtggccgcccaggacctggtctcctacttggaaggcagcactgccagcctgcgctgcttcctgcaactccgggatgcaaccccaggcggcgctatagtgtccgagctgtgccaggcactgagcagtagtcactgccgggtgctgctcatcacgccgggcttccttcaggacccctggtgcaagtaccagatgctgcaggccctgaccgaggctccaggggccgagggctgcaccatccccctgctgtcgggcctcagcagagctgcctacccacctgagctccgattcatgtactacgtcgatggcaggggccctgatggtggctttcgtcaagtcaaagaagctgtcatgcgttgtaagctactacaggagggagaaggggaacgggattcagctacagtatctgatctactttgacttttaggagacagccctgtagcctagtagttcaaagcgcagcttctggaaaaggctgtcggggtttgtatcctggctcctgcacttattaacccataaaaagtaacttggtcaagttactcac

SEQ ID NO: 283664 - DNA, 2168 bp, Homo sapiens
  misc_feature (25)..(26): n is a, c, g, or t
tgcgcgctgctcttccccgcggagnncgcgcagtccgcgcagccctcatcgcaactgggcccgcgcgcagatccaccaaagagaaagcagccctgtgccagttgctctgccagcctttcacaggagaagtgtcactagaatactacagcccccacaggctctgctccacagaaacttaaggctgaaagagtgtccgccatcagggacatcctctgtcactacggtgggaaaagaacatggccttacataggaagtccttctaaagagctgcctgccagctgcccttccccagatcccgaatatcctcctggccaggtggagcagagaacagttcctcagctggtcatgctgagctcataccctgatggctgctccatgaggtcaagactgggtctcctccctcctcccccttcaccaatgcctggtctcacggggctagttttgacccccacgctatggcatcatcgacctccctcccagctcctggctctcggcctaagaagcctctaggcaagatggctgactggttcaggcagaccctgctgaagaagcccaagaagaggcccaactccccagaaagcacctccagcgatgcttcacagcctacctcacaggacagcccactacccccaagcctcagctcagtcacgtctcccagcctgccacccacacatgcgagtgacagtggcagtagtcgctggagcaaagactatgacgtctgcgtgtgccacagtgaggaagacctggtggccgcccaggacctggtctcctacttggaaggcagcactgccagcctgcgctgcttcctgcaactccgggatgcaaccccaggcggcgctatagtgtccgagctgtgccaggcactgagcagtagtcactgccgggtgctgctcatcacgccgggcttccttcaggacccctggtgcaagtaccagatgctgcaggccctgaccgaggctccaggggccgagggctgcaccatccccctgctgtcgggcctcagcagagctgcctacccacctgagctccgattcatgtactacgtcgatggcaggggccctgatggtggctttcgtcaagtcaaagaagctgtcatgcgttatctgcagacactcagttgacacttgttatatcatgggaccccggaaattggagtgaagctagaaacagaaaacccatgcagggcctcggattcccacaaatgtgacaagaggtatagggagtgagtcgcagcgctttgctcgtgaccctgggatcagagcacccatcaggcttccattactgtgggctccctaagaagaccatggagagcttggggactcccccaggaaggccgtgaagctggggattccccctaggaaagccatgaggaagctggggactccccaagaaggccatgaggaagccagaaattggaggtggtaggaagtggtactgatcaatgatggccagcaggactcatctcctgcctaactggacaggaagcctggcacccacttctgtcttcccctggaactgggcactggcgtacactggtatccctcctaaagaagtgactcacctgactgatcagcaagaagcctagattgcaggcctcaccatggatggtcttcctagttgcctggggaaaccctggaatgggcatcaggagaaagcaacaagaatccagtccttcacactcacactactctgttcctcttcccagagacatcgattcaccccaaagtgctgggattacaggcgtgaagcaccacgcccagcctgaaataatattttaccttttactttgtgctttttgtgttttactcaggaagtcctcccctacatctgttttcttctgtatttcttttcatatttaggtctttaatccacctggattttttgtttgggtttttgttgttctttagtcaaagatccaattcttttttctatttaaataaccatcattgactgactagtccatccttaccccacccctactgattatgatgtcactgctgtcacatattgtcatacgtggggggctgttactgggttctccagtctcctccctttatctgtttgtgtatccctgtgctggtgccacactgcctcgttcactgatgtttttaataagcctgcaccttactacacaatcaagacgcctcggttattctcttcctctctct

SEQ ID NO: 283665 - DNA, 1082 bp, Homo sapiens
  misc_feature (1082)..(1082): n is a, c, g, or t
tgcgggcctgcctgccagctagccggagccgcgggtgagcgcggcgagcggcgaccctggtgaggagcgcggcgcgggaggcacgttccttagctccgccgcggccgtcctccgcggctcgaggactccgcttccttccctcccctcccctgcgctccggcctggggtcttggcgcggggagcggagggaagggacgaaggaggagtaggtgaaagcggggtgaggggcggaagggtcccggcgcggggtgaggcgagggctgcctcttgttctcccgccgctgccgccgtctcctggtcgggtgccgcggccagaggcgcgcggggctgccgaggcacccgcactatgcaggcagactgccggccgccgcgatggcgagccgggcggtggtgagagccaggcgctgcccgcagtgtccccaagtccgggccgcggccgccgcccccgcctgggccgcgctccccctctcccgctccctccctccctgctccaactcctcctccttctccatgcctctgttcctcctgctcttacttgtcctgctcctgctgctcgaggacgctggagcccagcaagttatggaggctagaattctgacagcagggtgtgcagagggccatgctctttcctaagactctaaggtgatggatgtggacacactgtactaggccctgagagtggaacccttacatccataaactacccacagacctatcccaacagcactgtttgtgaatgggagatccgtgtaaagatgggagagagagttcgcatcaaatttggtgactttgacattgaagattctgattcttgtcactttaattacttgagaatttataatggaattggagtcagcagaactgaaataggcaaatactgtggtctggggttgcaaatgaaccattcaattgaatcaaaaggcaatgaaatcacattgctgttcatgagtggaatccatgtttctggacgcggatttttggcctcatactctgttatagataaacaaggtaattttcaccttttgcaatggttcctacagtttgtaatttctaacaacaaaaataaaatgctttttttaagn

SEQ ID NO: 283666 - DNA, 2311 bp, Homo sapiens
tgcgggcctgcctgccagctagccggagccgcgggtgagcgcggcgagcggcgaccctggtgaggagcgcggcgcgggaggcacgttccttagctccgccgcggccgtcctccgcggctcgaggactccgcttccttccctcccctcccctgcgctccggcctggggtcttggcgcggggagcggagggaagggacgaaggaggagtaggtgaaagcggggtgaggggcggaagggtcccggcgcggggtgaggcgagggctgcctcttgttctcccgccgctgccgccgtctcctggtcgggtgccgcggccagaggcgcgcggggctgccgaggcacccgcactatgcaggcagactgccggccgccgcgatggcgagccgggcggtggtgagagccaggcgctgcccgcagtgtccccaagtccgggccgcggccgccgcccccgcctgggccgcgctccccctctcccgctccctccctccctgctccaactcctcctccttctccatgcctctgttcctcctgctcttacttgtcctgctcctgctgctcgaggacgctggagcccagcaaggtgatggatgtggacacactgtactaggccctgagagtggaacccttacatccataaactacccacagacctatcccaacagcactgtttgtgaatgggagatccgtgtaaagatgggagagagagttcgcatcaaatttggtgactttgacattgaagattctgattcttgtcactttaattacttgagaatttataatggaattggagtcagcagaactgaaataggcaaatactgtggtctggggttgcaaatgaaccattcaattgaatcaaaaggcaatgaaatcacattgctgttcatgagtggaatccatgtttctggacgcggatttttggcctcatactctgttatagataaacaagatctaattacttgtttggacactgcatccaattttttggaacctgagttcagtaagtactgcccagctggttgtctgcttccttttgctgagatatctggaacaattcctcatggatatagagattcctcgccattgtgcatggctggtgtgcatgcaggagtagtgtcaaacacgttgggcggccaaatcagtgttgtaattagtaaaggtattccctattatgaaagttctttggctaacaacgtcacatctgtggtgggacacttatctacaagtctttttacatttaagacaagtggatgttatggaacactggggatggagtctggtgtgatcgcggatcctcaaataacagcatcatctgtgctggagtggactgaccacacagggcaagagaacagttggaaacccaaaaaagccaggctgaaaaaacctggaccgccttgggctgcttttgccactgatgaataccagtggttacaaatagatttgaataaggaaaagaaaataacaggcattataaccactggatccaccatggtggagcacaattactatgtgtctgcctacagaatcctgtacagtgatgatgggcagaaatggactgtgtacagagagcctggtgtggagcaagataagatatttcaaggaaacaaagattatcaccaggatgtgcgtaataactttttgccaccaattattgcacgttttattagagtgaatcctacccaatggcagcagaaaattgccatgaaaatggagctgctcggatgtcagtttattcctaaaggtcgtcctccaaaacttactcaacctccacctcctcggaacagcaatgacctcaaaaacactacagcccctccaaaaatagccaaaggtcgtgccccaaaatttacgcaaccactacaacctcgcagtagcaatgaatttcctgcacagacagaacaaacaactgccagtcctgatatcagaaatactaccgtaactccaaatgtaaccaaagatgtagcgctggctgcagttcttgtccctgtgctggtcatggtcctcactactctcattctcatattagtgtgtgcttggcactggagaaacagaaagaaaaaaactgaaggcacctatgacttaccttactgggaccgggcaggtaactcacgtggtctttgcatctcatttctatcagagggatgtcgctcccctacagggggcagtagtgaaaaaagagtcattctctggcccaggtgaactccccgacactgttagaacaatggcattactcttcagttctcaccatttttacccttctgcaaagtctcttgtaattcctaagtaatgaaatgaaaagtacaaatttcttaaaacaagc

SEQ ID NO: 283667 - DNA, 2964 bp, Homo sapiens
agcgagagctggtcagcgagggcatggtgggtcagacaccgtcatgcccctggtgcgcggcgtccgtagcccgcgtgcgatgacgggattcgtgcacgcacggcctcgaccggggtctaagagcggaaagccgagattcctggagcgcggcgccggcccgagaatgtgccggcgtggtcgaacatggtgcggcgatgtcccgcgaatgcggcgcagagtgcgcggctgagtgtcccggggggggcagctgccagtcgtggatcaggcgctcgaggagcgccccagtgacccgggcgtgctcgtcccccgggcccagccgctcgtccgaggcccgcgaggagctgcgccgccacctcgtgggcctcatcgagcgcagccgggtggtgatcttcagcaagagctactgtccccatagtactcgggtgaaagaactcttttcttctttgggagtcgaatgtaatgtcttggaacttgatcaagttgatgatggggccagggttcaagaagtgctgtcagaaatcactaatcagaaaactgtgcccaatattttcgtgaataaagtgcatgtaggtggatgtgaccaaactttccaggcatatcagagtggtttgttacagaagctccttcaggaagatttggcatatgattatgatctcatcatcatcggtggtggttctggaggcctttcatgtgcgaaggaagctgccattttgggaaagaaagttatggtgctagactttgttgtcccgtcacctcagggcacatcctggggtcttggtggcacttgtgtaaatgtaggttgtattcctaagaaattgatgcatcaggctgcccttttggggcaggcattatgtgactcaaggaaatttggctgggaatataatcaacaagtgaggcacaactgggagacaatgacaaaagcgattcagaaccacatcagctctctaaactggggctacaggttgtctctgagggaaaaggctgtggcctatgtcaattcctatggagaatttgttgaacatcataaaataaaggcaaccaataaaaaaggacaggagacttattatactgctgcacagtttgtcatagcaacgggtgaaaggccacggtatttaggaatccaaggagataaagaatactgtattactagtgatgaccttttttctctgccttattgccctggcaaaacattagtggtgggtgcctcttatgttgccctggagtgtgcagggtttctggctggctttggcctagatgtcacagttatggtacgctcaatccttctccgtggcttcgaccaagaaatggcagaaaaagtgggttcctacatggagcagcatggtgtgaagttcctacggaaattcatacctgtgatggttcaacagttggagaaaggttcacctggaaagctgaaagtgttggctaaatccactgaaggaacagaaacaattgaaggagtctataacacagttttgttagctattggtcgtgactcctgtacaaggaaaataggcttggagaagattggtgtcaaaattaatgagaagagtggaaaaatacctgtaaatgatgtggaacagaccaatgtgccatatgtctatgctgttggtgatattttggaggataagccagagctcactcctgtcgccatacagtcaggcaagctgctagctcagagactttttggggcctctttagaaaagtgtgattatattaatgttccgactacagtgtttactcctctggagtatggttgctgtggattatctgaagagaaagctattgaagtatataaaaaagagaatctagaaatatatcatactttgttctggcctcttgaatggacagtagctggcagagagaacaacacttgttacgcaaagataatctgcaataaattcgaccatgatcgggtgataggatttcatattcttggaccaaacgccggtgaggttacccaaggatttgcagctgcaatgaaatgtgggctcacaaaacagctacttgatgacaccattggaattcaccccacatgtggggaggtgttcacgactttggaaatcacaaagtcgtcaggactagacatcactcagaaaggctgctgaggctaggcctgctgctgtttagttctccttgtcatattctcatttctctcaaagataagaatgctctcggataaaatgagcctgtgctcatgacagctgctctgttactcagggaccagtgcagggctgtcttacgacacttagatgagaaagtagacaaggaaagaggacagcagtgggcatctgccttgtggtcttgctgacagcgagaagcagtgggactgcttccttgacgccttagcttggagccccgttatgaggtgagccaaggctgactctcgcaagccaggactgagcttccctcggaaagacctttgagtggcaccattcacctaagttagcttttctggtcgctattgtttttatcccctttgctttgttgtttctgtgaaaatatattttcagttaagaaatgctaaaaagtagtggttttctagtgcgtgggcctagaattcacacatgctcactggtgaacagtgtctgtgggctgctgtgggctgcatttggatagctgtctgcattagcaggaagctgtacacactgtgtagggttagtcatctcttttcttttttgaggcacatttaacctactgtcaaaacgctgactcatgcttcaccctcacactcactacttggtggtgataaccttgaagctattctcccctaattaatatctcgagactgagcaaaatatctcatgtaagataaaagtacttgaattgctttttcatgttcatcttaatagtattatttccaaaagtttttaatactgtattatgtgaaatctaactaatttatctgtgaaataattccatcacagtctgtttaatgatgataaagttccataaatgaatacaggt

SEQ ID NO: 283668 - DNA, 2678 bp, Homo sapiens
tgcgggcctgcctgccagctagccggagccgcgggtgagcgcggcgagcggcgaccctggtgaggagcgcggcgcgggaggcacgttccttagctccgccgcggccgtcctccgcggctcgaggactccgcttccttccctcccctcccctgcgctccggcctggggtcttggcgcggggagcggagggaagggacgaaggaggagtaggtgaaagcggggtgaggggcggaagggtcccggcgcggggtgaggcgagggctgcctcttgttctcccgccgctgccgccgtctcctggtcgggtgccgcggccagaggcgcgcggggctgccgaggcacccgcactatgcaggcagactgccggccgccgcgatggcgagccgggcggtggtgagagccaggcgctgcccgcagtgtccccaagtccgggccgcggccgccgcccccgcctgggccgcgctccccctctcccgctccctccctccctgctccaactcctcctccttctccatgcctctgttcctcctgctcttacttgtcctgctcctgctgctcgaggacgctggagcccagcaaggtgaaagaactcttttcttctttgggagtcgaatgtaatgtcttggaacttgatcaagttgatgatggggccagggttcaagaagtgctgtcagaaatcactaatcagaaaactgtgcccaatattttcgtgaataaagtgcatgtaggtggatgtgaccaaactttccaggcatatcagagtggtttgttacagaagctccttcaggaagatttggcatatgattatgatctcatcatcatcggtggtggttctggaggcctttcatgtgcgaaggaagctgccattttgggaaagaaagttatggtgctagactttgttgtcccgtcacctcagggcacatcctggggtcttggtggcacttgtgtaaatgtaggttgtattcctaagaaattgatgcatcaggctgcccttttggggcaggcattatgtgactcaaggaaatttggctgggaatataatcaacaagtgaggcacaactgggagacaatgacaaaagcgattcagaaccacatcagctctctaaactggggctacaggttgtctctgagggaaaaggctgtggcctatgtcaattcctatggagaatttgttgaacatcataaaataaaggcaaccaataaaaaaggacaggagacttattatactgctgcacagtttgtcatagcaacgggtgaaaggccacggtatttaggaatccaaggagataaagaatactgtattactagtgatgaccttttttctctgccttattgccctggcaaaacattagtggtgggtgcctcttatgttgccctggagtgtgcagggtttctggctggctttggcctagatgtcacagttatggtacgctcaatccttctccgtggcttcgaccaagaaatggcagaaaaagtgggttcctacatggagcagcatggtgtgaagttcctacggaaattcatacctgtgatggttcaacagttggagaaaggttcacctggaaagctgaaagtgttggctaaatccactgaaggaacagaaacaattgaaggagtctataacacagttttgttagctattggtcgtgactcctgtacaaggaaaataggcttggagaagattggtgtcaaaattaatgagaagagtggaaaaatacctgtaaatgatgtggaacagaccaatgtgccatatgtctatgctgttggtgatattttggaggataagccagagctcactcctgtcgccatacagtcaggcaagctgctagctcagagactttttggggcctctttagaaaagtgtgattatattaatgttccgactacagtgtttactcctctggagtatggttgctgtggattatctgaagagaaagctattgaagtatataaaaaagagaatctagaaatatatcatactttgttctggcctcttgaatggacagtagctggcagagagaacaacacttgttacgcaaagataatctgcaataaattcgaccatgatcgggtgataggatttcatattcttggaccaaacgccggtgaggttacccaaggatttgcagctgcaatgaaatgtgggctcacaaaacagctacttgatgacaccattggaattcaccccacatgtggggaggtgttcacgactttggaaatcacaaagtcgtcaggactagacatcactcagaaaggctgctgaggctaggcctgctgctgtttagttctccttgtcatattctcatttctctcaaagataagaatgctctcggataaaatgagcctgtgctcatgacagctgctctgttactcagggaccagtgcagggctgtcttacgacacttagatgagaaagtagacaaggaaagaggacagcagtgggcatctgccttgtggtcttgctgacagcgagaagcagtgggactgcttccttgacgccttagcttggagccccgttatgaggtgagccaaggctgactctcgcaagccaggactgagcttccctcggaaagacctttgagtggcaccattcacctaagttagcttttctggtcgctattgtttttatcccctttgctttgttgtttctgtgaaaatatattttcagttaagaaatgcta

SEQ ID NO: 283669 - DNA, 1531 bp, Homo sapiens
  misc_feature (25)..(25): n is a, c, g, or t
  misc_feature (31)..(31): n is a, c, g, or t
  misc_feature (41)..(41): n is a, c, g, or t
  misc_feature (43)..(43): n is a, c, g, or t
  misc_feature (54)..(55): n is a, c, g, or t
  misc_feature (60)..(60): n is a, c, g, or t
tagctttttccatgatgtaaaaccnggcaancttgacggtntntaattggaaannccctnccgattgaatcaaaaggcaatgaaatcacattgctgttcatgagtggaatccatgtttctggacgcggatttttggcctcatactctgttatagataaacaagatctaattacttgtttggacactgcatccaattttttggaacctgagttcagtaagtactgcccagctggttgtctgcttccttttgctgagatatctggaacaattcctcatggatatagagattcctcgccattgtgcatggctggtgtgcatgcaggagtagtgtcaaacacgttgggcggccaaatcagtgttgtaattagtaaaggtattccctattatgaaagttctttggctaacaacgtcacatctgtggtgggacacttatctacaagtctttttacatttaagacaagtggatgttatggaacactggggatggagtctggtgtgatcgcggatcctcaaataacagcatcatctgtgctggagtggactgaccacacagggcaagagaacagttggaaacccaaaaaagccaggctgaaaaaacctggaccgccttgggctgcttttgccactgatgaataccagtggttacaaatagatttgaataaggaaaagaaaataacaggcattataaccactggatccaccatggtggagcacaattactatgtgtctgcctacagaatcctgtacagtgatgatgggcagaaatggactgtgtacagagagcctggtgtggagcaagataagatatttcaaggaaacaaagattatcaccaggatgtgcgtaataactttttgccaccaattattgcacgttttattagagtgaatcctacccaatggcagcagaaaattgccatgaaaatggagctgctcggatgtcagtttattcctaaaggtcgtcctccaaaacttactcaacctccacctcctcggaacagcaatgacctcaaaaacactacagcccctccaaaaatagccaaaggtcgtgccccaaaatttacgcaaccactacaacctcgcagtagcaatgaatttcctgcacagacagaacaaacaactgccagtcctgatatcagaaatactaccgtaactccaaatgtaaccaaagatgtagcgctggctgcagttcttgtccctgtgctggtcatggtcctcactactctcattctcatattagtgtgtgcttggcactggagaaacagaaagaaaaaaactgaaggcacctatgacttaccttactgggaccgggcaggtaactcacgtggtctttgcatctcatttctatcagagggatgtcgctcccctacagggggcagtagtgaaaaaagagtcattctctggcccaggtgaactccccgacactgttagaacaatggcattactcttcagttctcaccatttttacccttctgcaaagtctcttgtaattcctaagtaatgaaatgaaaagtacaaatttcttaaaacaagc

SEQ ID NO: 283670 - DNA, 167 bp, Homo sapiens
ggagcagcatggtgtgaagttcctacggaaattcatacctgtgatggtaaggctgcatggcatttgcaattttttttctctaacttttcactttatctcaccttacttcatttcattacataaattagtctgtattcaaataatgttaaaacagtgtttccactccc

SEQ ID NO: 283671 - DNA, 339 bp, Homo sapiens
atgatgcatttgctaattgccctgatctgatcactatacatcatatgtatcagaacatcactgtgaaccccatgagtatgtacaattatttgtccattaaaaaaaataaaatagaaagtatgggtggtataaaatatttgatgtcgtgcatatttttaaatcttcacaaaaaaatcattatagaggaagtaaaatatgtgagaataatttatcattcttttcactttttttaaaggtgatggatgtggacacactgtactaggccctgagagtggaacccttacatccataaactacccacagacctatcccaacagcactgtttgtgaatgggagatc

SEQ ID NO: 283672 - DNA, 2912 bp, Homo sapiens
cgcgcgggtggtgagagtggccagcgagggcagcgttcgccgcccctcaggccccgtcccggcgccgcagccgcctgcgtttcggtttgtgagcaggcccggccgggccaggagcgagagcgagactctggagcggtcgccgccgcagtcgcccgggccgggaaaggcgggcgatgcccccaaccgccgctcgggccatgtccgaggggcgcgcgtgttgtcgccgccggggcgccgtgcccgcctgtcgtcccccgggcccagccgctcgtccgaggcccgcgaggagctgcgccgccacctcgtgggcctcatcgagcgcagccgggtggtgatcttcagcaagagctactgtccccatagtactcgggtgaaagaactcttttcttctttgggagtcgaatgtaatgtcttggaacttgatcaagttgatgatggggccagggttcaagaagtgctgtcagaaatcactaatcagaaaactgtgcccaatattttcgtgaataaagtgcatgtaggtggatgtgaccaaactttccaggcatatcagagtggtttgttacagaagctccttcaggaagatttggcatatgattatgatctcatcatcatcggtggtggttctggaggcctttcatgtgcgaaggaagctgccattttgggaaagaaagttatggtgctagactttgttgtcccgtcacctcagggcacatcctggggtcttggtggcacttgtgtaaatgtaggttgtattcctaagaaattgatgcatcaggctgcccttttggggcaggcattatgtgactcaaggaaatttggctgggaatataatcaacaagtgaggcacaactgggagacaatgacaaaagcgattcagaaccacatcagctctctaaactggggctacaggttgtctctgagggaaaaggctgtggcctatgtcaattcctatggagaatttgttgaacatcataaaataaaggcaaccaataaaaaaggacaggagacttattatactgctgcacagtttgtcatagcaacgggtgaaaggccacggtatttaggaatccaaggagataaagaatactgtattactagtgatgaccttttttctctgccttattgccctggcaaaacattagtggtgggtgcctcttatgttgccctggagtgtgcagggtttctggctggctttggcctagatgtcacagttatggtacgctcaatccttctccgtggcttcgaccaagaaatggcagaaaaagtgggttcctacatggagcagcatggtgtgaagttcctacggaaattcatacctgtgatggttcaacagttggagaaaggttcacctggaaagctgaaagtgttggctaaatccactgaaggaacagaaacaattgaaggagtctataacacagttttgttagctattggtcgtgactcctgtacaaggaaaataggcttggagaagattggtgtcaaaattaatgagaagagtggaaaaatacctgtaaatgatgtggaacagaccaatgtgccatatgtctatgctgttggtgatattttggaggataagccagagctcactcctgtcgccatacagtcaggcaagctgctagctcagagactttttggggcctctttagaaaagtgtgattatattaatgttccgactacagtgtttactcctctggagtatggttgctgtggattatctgaagagaaagctattgaagtatataaaaaagagaatctagaaatatatcatactttgttctggcctcttgaatggacagtagctggcagagagaacaacacttgttacgcaaagataatctgcaataaattcgaccatgatcgggtgataggatttcatattcttggaccaaacgccggtgaggttacccaaggatttgcagctgcaatgaaatgtgggctcacaaaacagctacttgatgacaccattggaattcaccccacatgtggggaggtgttcacgactttggaaatcacaaagtcgtcaggactagacatcactcagaaaggctgctgaggctaggcctgctgctgtttagttctccttgtcatattctcatttctctcaaagataagaatgctctcggataaaatgagcctgtgctcatgacagctgctctgttactcagggaccagtgcagggctgtcttacgacacttagatgagaaagtagacaaggaaagaggacagcagtgggcatctgccttgtggtcttgctgacagcgagaagcagtgggactgcttccttgacgccttagcttggagccccgttatgaggtgagccaaggctgactctcgcaagccaggactgagcttccctcggaaagacctttgagtggcaccattcacctaagttagcttttctggtcgctattgtttttatcccctttgctttgttgtttctgtgaaaatatattttcagttaagaaatgctaaaaagtagtggttttctagtgcgtgggcctagaattcacacatgctcactggtgaacagtgtctgtgggctgctgtgggctgcatttggatagctgtctgcattagcaggaagctgtacacactgtgtagggttagtcatctcttttcttttttgaggcacatttaacctactgtcaaaacgctgactcatgcttcaccctcacactcactacttggtggtgataaccttgaagctattctcccctaattaatatctcgagactgagcaaaatatctcatgtaagataaaagtacttgaattgctttttcatgttcatcttaatagtattatttccaaaagtttttaatactgtattatgtgaaatctaactaatttatctgtgaaataattccatcacagtctgtttaatgatgataaagttccataaatgaatacaggt

SEQ ID NO: 283673 - DNA, 2471 bp, Homo sapiens
cgcgcgggtggtgagagtggccagcgagggcagcgttcgccgcccctcaggccccgtcccggcgccgcagccgcctgcgtttcggtttgtgagcaggcccggccgggccaggagcgagagcgagactctggagcggtcgccgccgcagtcgcccgggccgggaaaggcgggcgatgcccccaaccgccgctcgggccatgtccgaggggcgcgcgtgttgtcgccgccggggcgccgtgcccgcctgtcgtcccccgggcccagccgctcgtccgaggcccgcgaggagctgcgccgccacctcgtgggcctcatcgagcgcagccgggtggtgatcttcagcaagagctactgtccccatagtactcgggtgaaagaactcttttcttctttgggagtcgaatgtaatgtcttggaacttgatcaagttgatgatggggccagggttcaagaagtgctgtcagaaatcactaatcagaaaactgtgcccaatattttcgtgaataaagtgcatgtaggtggatgtgaccaaactttccaggcatatcagagtggtttgttacagaagctccttcaggaagatttggcatatgattatgatctcatcatcatcggtggtggttctggaggcctttcatgtgcgaaggaagctgccattttgggaaagaaagttatggtgctagactttgttgtcccgtcacctcagggcacatcctggggtcttggtggcacttgtgtaaatgtaggttgtattcctaagaaattgatgcatcaggctgcccttttggggcaggcattatgtgactcaaggaaatttggctgggaatataatcaacaagtgaggcacaactgggagacaatgacaaaagcgattcagaaccacatcagctctctaaactggggctacaggttgtctctgagggaaaaggctgtggcctatgtcaattcctatggagaatttgttgaacatcataaaataaaggcaaccaataaaaaaggacaggagacttattatactgctgcacagtttgtcatagcaacgggtgaaaggccacggtatttaggaatccaaggagataaagaatactgtattactagtgatgaccttttttctctgccttattgccctggcaaaacattagtggtgggtgcctcttatgttgccctggagtgtgcagggtttctggctggctttggcctagatgtcacagttatggtacgctcaatccttctccgtggcttcgaccaagaaatggcagaaaaagtgggttcctacatggagcagcatggtgtgaagttcctacggaaattcatacctgtgatggttcaacagttggagaaaggttcacctggaaagctgaaagtgttggctaaatccactgaaggaacagaaacaattgaaggagtctataacacagttttgttagctattggtcgtgactcctgtacaaggaaaataggcttggagaagattggtgtcaaaattaatgagaagagtggaaaaatacctgtaaatgatgtggaacagaccaatgtgccatatgtctatgctgttggtgatattttggaggataagccagagctcactcctgtcgccatacagtcaggcaagctgctagctcagagactttttggggcctctttagaaaagtgtgattatattaatgttccgactacagtgtttactcctctggagtatggttgctgtggattatctgaagagaaagctattgaagtatataaaaaagagaatctagaaatatatcatactttgttctggcctcttgaatggacagtagctggcagagagaacaacacttgttacgcaaagataatctgcaataaattcgaccatgatcgggtgataggatttcatattcttggaccaaacgccggtgaggttacccaaggatttgcagctgcaatgaaatgtgggctcacaaaacagctacttgatgacaccattggaattcaccccacatgtggggaggtgttcacgactttggaaatcacaaagtcgtcaggactagacatcactcagaaaggctgctgaggctaggcctgctgctgtttagttctccttgtcatattctcatttctctcaaagataagaatgctctcggataaaatgagcctgtgctcatgacagctgctctgttactcagggaccagtgcagggctgtcttacgacacttagatgagaaagtagacaaggaaagaggacagcagtgggcatctgccttgtggtcttgctgacagcgagaagcagtgggactgcttccttgacgccttagcttggagccccgttatgaggtgagccaaggctgactctcgcaagccaggactgagcttccctcggaaagacctttgagtggcaccattcacctaagttagcttttctggtcgctattgtttttatcccctttgctttgttgtttctgtgaaaatatattttcagttaagaaatgcta

SEQ ID NO: 283674 - DNA, 2298 bp, Homo sapiens
tgcgggcctgcctgccagctagccggagccgcgggtgagcgcggcgagcggcgaccctggtgaggagcgcggcgcgggaggcacgttccttagctccgccgcggccgtcctccgcggctcgaggactccgcttccttccctcccctcccctgcgctccggcctggggtcttggcgcggggagcggagggaagggacgaaggaggagtaggtgaaagcggggtgaggggcggaagggtcccggcgcggggtgaggcgagggctgcctcttgttctcccgccgctgccgccgtctcctggtcgggtgccgcggccagaggcgcgcggggctgccgaggcacccgcactatgcaggcagactgccggccgccgcgatggcgagccgggcggtggtgagagccaggcgctgcccgcagtgtccccaagtccgggccgcggccgccgcccccgcctgggccgcgctccccctctcccgctccctccctccctgctccaactcctcctccttctccatgcctctgttcctcctgctcttacttgtcctgctcctgctgctcgaggacgctggagcccagcaaggtgatggatgtggacacactgtactaggccctgagagtggaacccttacatccataaactacccacagacctatcccaacagcactgtttgtgaatgggagatccgtgtaaagatgggagagagagttcgcatcaaatttggtgactttgacattgaagattctgattcttgtcactttaattacttgagaatttataatggaattggagtcagcagaactgaaataggcaaatactgtggtctggggttgcaaatgaaccattcaattgaatcaaaaggcaatgaaatcacattgctgttcatgagtggaatccatgtttctggacgcggatttttggcctcatactctgttatagataaacaagatctaattacttgtttggacactgcatccaattttttggaacctgagttcagtaagtactgcccagctggttgtctgcttccttttgctgagatatctggaacaattcctcatggatatagagattcctcgccattgtgcatggctggtgtgcatgcaggagtagtgtcaaacacgttgggcggccaaatcagtgttgtaattagtaaaggtattccctattatgaaagttctttggctaacaacgtcacatctgtggtgggacacttatctacaagtctttttacatttaagacaagtggatgttatggaacactggggatggagtctggtgtgatcgcggatcctcaaataacagcatcatctgtgctggagtggactgaccacacagggcaagagaacagttggaaacccaaaaaagccaggctgaaaaaacctggaccgccttgggctgcttttgccactgatgaataccagtggttacaaatagatttgaataaggaaaagaaaataacaggcattataaccactggatccaccatggtggagcacaattactatgtgtctgcctacagaatcctgtacagtgatgatgggcagaaatggactgtgtacagagagcctggtgtggagcaagataagatatttcaaggaaacaaagattatcaccaggatgtgcgtaataactttttgccaccaattattgcacgttttattagagtgaatcctacccaatggcagcagaaaattgccatgaaaatggagctgctcggatgtcagtttattcctaaaggtcgtcctccaaaacttactcaacctccacctcctcggaacagcaatgacctcaaaaacactacagcccctccaaaaatagccaaaggtcgtgccccaaaatttacgcaaccactacaacctcgcagtagcaatgaatttcctgcacagacagaacaaacaactgccagtcctgatatcagaaatactaccgtaactccaaatgtaaccaaagatgtagcgctggctgcagttcttgtccctgtgctggtcatggtcctcactactctcattctcatattagtgtgtgcttggcactggagaaacagaaagaaaaaaactgaaggcacctatgacttaccttactgggaccgggcaggttggtggaaaggaatgaagcagtttcttcctgcaaaagcagtggaccatgaggaaaccccagttcgctatagcagcagcgaagttaatcacctgagtccaagagaagtcaccacagtgctgcaggctgactctgcagagtatgctcagccactggtaggaggaattgttggtacacttcatcaaagatctacctttaaaccagaa

SEQ ID NO: 283675 - DNA, 1912 bp, Homo sapiens
tgcgggcctgcctgccagctagccggagccgcgggtgagcgcggcgagcggcgaccctggtgaggagcgcggcgcgggaggcacgttccttagctccgccgcggccgtcctccgcggctcgaggactccgcttccttccctcccctcccctgcgctccggcctggggtcttggcgcggggagcggagggaagggacgaaggaggagtaggtgaaagcggggtgaggggcggaagggtcccggcgcggggtgaggcgagggctgcctcttgttctcccgccgctgccgccgtctcctggtcgggtgccgcggccagaggcgcgcggggctgccgaggcacccgcactatgcaggcagactgccggccgccgcgatggcgagccgggcggtggtgagagccaggcgctgcccgcagtgtccccaagtccgggccgcggccgccgcccccgcctgggccgcgctccccctctcccgctccctccctccctgctccaactcctcctccttctccatgcctctgttcctcctgctcttacttgtcctgctcctgctgctcgaggacgctggagcccagcaaggtgatggatgtggacacactgtactaggccctgagagtggaacccttacatccataaactacccacagacctatcccaacagcactgtttgtgaatgggagatccgtgtaaagatgggagagagagttcgcatcaaatttggtgactttgacattgaagattctgattcttgtcactttaattacttgagaatttataatggaattggagtcagcagaactgaaataggcaaatactgtggtctggggttgcaaatgaaccattcaattgaatcaaaaggcaatgaaatcacattgctgttcatgagtggaatccatgtttctggacgcggatttttggcctcatactctgttatagataaacaagatctaattacttgtttggacactgcatccaattttttggaacctgagttcagtaagtactgcccagctggttgtctgcttccttttgctgagatatctggaacaattcctcatggatatagagattcctcgccattgtgcatggctggtgtgcatgcaggagtagtgtcaaacacgttgggcggccaaatcagtgttgtaattagtaaaggtattccctattatgaaagttctttggctaacaacgtcacatctgtggtgggacacttatctacaagtctttttacatttaagacaagtggatgttatggaacactggggatggagtctggtgtgatcgcggatcctcaaataacagcatcatctgtgctggagtggactgaccacacagggcaagagaacagttggaaacccaaaaaagccaggctgaaaaaacctggaccgccttgggctgcttttgccactgatgaataccagtggttacaaatagatttgaataaggaaaagaaaataacaggcattcctaaacaagtcgtaaaactggaagctttgcaagaactcaatgttgctttcaattctttaactgaccttcctggatgtgacagctttagcagcctttctgtattgatcattgatcacaattcagtttcccacccatcggctgatttcttccagagctgccagaagatgaggtcaataaaagcaggggacaatccattccaatgtacctgtgagctaggagaatttgtcaaaaatatagaccaagtatcaagtgaagtgttagagggctggcctgattcttataagtgtgactacccggaaagttatagaggaaccctactaaaggactttcacatgtctgaattatcctgcaacataactctgctgatcgtcaccatcgttgccaccatgctggtgttggctgtgactgtgacctccctctgcagctacttggatctgccctggtatc

SEQ ID NO: 283676 - DNA, 4520 bp, Homo sapiens
tgagtagaagtattcttagttggggctttttgtgtggtgtgaatcaaggttattgaaatgtgttatttttcaagttatcttttgtattgcagtcaaaagtagctagcgtaagaggaagattttgcgaggttccccccactttttttgttcttaaaaagaacaaaatgcatcctccagaaaccaccaccaagatggcttcagttcggttcatggtgacaccgacaaagatcgatgacattccaggtttgtcagacaccagtccggacctcagctctcgatctagttcccgagtaagatttagctcccgggaaagcgtgcctgaaacaagccggagtgagcctatgagtgagatgtctggggccaccacttcgctggcaactgttgcactggatccacccagtgaccggacttctcacccccaggatgtcatcgaggacctgagtcagaactccatcacaggggaacacagccaactgttagacgacggacataagaaagctcgaaatgcttatctcaataattccaattatgaagaaggagatgaatattttgataaaaatttggcactctttgaggaagaaatggacaccagaccgaaggtgtcttccctcctcaaccgcatggccaattacactaatctgactcaaggagcaaaggaacatgaagaggcagaaaacatcactgaagggaaaaagaagcccaccaagaccccccaaatgggtaccttcatgggtgtctacctcccatgtctacaaaatatttttggagtgatcctttttttacgccttacatgggtggtgggcacagctggagttcttcaggcttttgcaattgtccttatctgctgctgctgtacaatgttgactgctatctccatgagtgccattgccactaatggagtggtgccagctgggggctcatactttatgatttcccgggcactgggcccagagtttggtggggctgttggcctctgcttttatcttggtaccacatttgcagcagccatgtacatccttggtgccattgaaatctttctggtctatatcgtcccccgagctgccatctttcacagtgatgacgcactcaaggaatcagcagccatgctaaataacatgcgtgtctacggcacagctttcttggtccttatggtattagtggtatttatcggcgtacgctatgtgaacaagtttgcctcacttttcctggcctgtgtcattgtgtccatcttggccatctatgctggagccatcaagtcttcttttgctcctccacacttcccggtctgcatgctgggtaaccgcaccctttcatcaagacacattgacgtttgctctaagaccaaggaaattaacaacatgacagtcccatcaaagttatggggattcttctgtaactcgagtcaatttttcaatgccacctgtgatgaatactttgttcacaataacgtcacttcaatccagggcattcctggattggctagtggtataattacagagaatctttggagtaattacctacccaagggagagatcatcgaaaagccttcagccaaatcttctgatgtcttaggcagcttaaaccatgaatatgttcttgttgacatcaccacctccttcacgcttctggtgggaatcttctttccctctgttacaggtatcatggctggatcaaacagatctggagatctgaaagatgctcagaagtctattccgattggtactatccttgccatcctgaccacctcctttgtttatttaagcaatgttgtcctttttggtgcatgtattgaaggggttgttctcagagacaagttcggtgatgctgtgaaaggtaatttggtggtaggcaccttatcttggccatccccatgggtgattgttattggctccttcttttcaacatgtggggctggacttcagagcctcacaggtgcaccgaggctgctacaagctattgccaaggataacatcataccgtttctgagggtttttggccacagcaaagccaatggggaacctacctgggctttacttctaactgctgccattgcagagcttggaatactcattgcctccctggatcttgtggccccaattctttccatgttttttctcatgtgttacctctttgtaaacttggcatgtgccttgcaaacattacttcgaacacccaactggagaccccgattccgctactaccattgggccctttctttcatgggaatgagtatctgtctggctctgatgttcatttcttcctggtattatgccattgtagccatggtaatagctggtatgatctacaagtacattgaataccaaggagctgagaaagaatggggtgatggtatccgtgggctgtccctcagtgcagcccggtttgctttgcttcgattggaggaaggacctccacacactaaaaactggaggcctcagttgcttgtattactgaaactagatgaagacttacatgtcaagcatcctcgcctcctcacctttgcctcacagctcaaagcaggaaaaggtctcactattgtgggctctgtcatcgtggggaacttcctagagaactacggtgaagctttagctgctgagcagaccataaagcacctaatggaggcagagaaggtaaaaggattctgccagctggtggtggccgccaagctgagagagggcatttcccacctcatccagtcatgtggccttgggggcatgaagcacaacacggtggtgatgggctggcctaatggctggcgtcaaagcgaagatgcccgcgcttggaagacttttattggcacagttcgagtgacaactgctgcccatcttgcactgctggtggctaaaaacatctccttctttcccagcaatgtggagcaattttctgagggcaacattgatgtgtggtggattgtgcatgatggggggatgcttatgctactaccattcctactgaaacagcacaaggtgtggcgaaagtgcagcatacggatcttcacagtagcccaattagaagacaacagtatccaaatgaagaaggacctagccaccttcctatatcacttacgcattgaggcggaggtagaagtggtggagatgcatgacagtgatatatcagcatatacttacgagcgcactttgatgatggaacaaaggtcccagatgcttcggcacatgcggctatccaaaacagagcgagacagagaggcacaattggtgaaagaccgaaactcaatgctacgattgaccagcattggctctgatgaggacgaagagacagaaacctatcaggagaaggtgcacatgacttggacaaaagacaagtacatggcatcccggggacaaaaagcgaagtcaatggaaggattccaggacctgcttaacatgcgtccggaccagtccaatgtgaggcggatgcatacagcagtgaaactcaacgaggttatagttaacaagtcccatgaagcaaagctggttttattgaatatgccagggccaccccgaaaccctgagggtgatgaaaactacatggagttcctagaggtgcttaccgagggactagagcgagtcctacttgtccggggtggtggcagtgaagtgatcaccatttattcataacctactctgaatgaccgtgcttgacctgttttcttaaaaggcctacgtcctccatggaagtgccagctcattactaccactcccactcaactagaagcctgtgttctgtacacatcatactgaactcttgatgagctgagcctcaagtacctgtgtaaaagagctcccatctgatctgcagtcattacagaaaaagcaaatattccctcaacatcagaacaatgctcaagtctttcaagccacgtctgagcagtcaaaggcaaattagaattaacaagctgagccaataaatgaattggtaaaagggatgctagaaattcaactgaagaaaaaaagcaagtcaagtacgtattcagcattaaagatgaatctcagaagtcatggttcaatgttgacactgtgaggataacaactagagacagcttcatcttactaaagaatttatggtcaagtatatttggacctattatcctcggcaagccaagatgcaaacattttttagctatatttctttagtatacccactgctgtaattttatattaggatactaacttgaaacatggctgcagcctctacttcttcaaaaacatccccccaaaataccagatttaaatatccaaatactgtgtcagtgtatacttcaactgttttgtttctcttaactcaaaacccattctgtcattgtaacacaggcagtgttaccatggaaattgtttttggtaaggtaaaaattatttctttcaggttcctttcaaatggccgaactaagagaactccaaaaggaagctattaacatttactgaaatagtctgtggttctctatacaacatggacaaaacatacaagctgttgtctaagaaatgcaggtcatggtgcacattaatcaacaggttcttctcccc

SEQ ID NO: 283677 - DNA, 5163 bp, Homo sapiens
gcgcgctggactcggtcaccgcgggctgcggcggctgggcggggctttcgggcgcccgcgggacggttccgccctctcactgcacccccgggcttctcttcgcaaggttcacctcgaatgaggaacaagcggggagggaagggaagggctgcggcggcgcgggcgcaccccgtcgggcccggggctgggggaggccaggtcacgtaactgctgctctggcgtcgggccggggagggggcgccagccccggcagcgcgaaccctgcgcgcgccgcggctctgaaacagttaccggctagtaaacaacagctgcgcgcgcacccgcatcagctggcgccgggatactgcacctgcgacctccttctccctcaccctgctgcccagtcaggccagcctgcgtggccgtctcctcctctactgggaccctgaggaagaacgacgagggggtgacctgcgccggggcgggggtaggggagaacgcgcctccggcaaagggggtggctcgtcctgtcacacgcaggagaaacctagcgagcggaccgtggctcagtggactagctacgacttgccacgactctgagctgcagtccgaggtgtcttgatccgctaacctcctcccagaccccgaggacctttctgctaggagaagagcgggcgcgccacccccaccgacctctcggagacaggaatccgctctgcccctgcatcctcctctgctcacccttctctcagtagttcaaaagtagctagcgtaagaggaagattttgcgaggttccccccactttttttgttcttaaaaagaacaaaatgcatcctccagaaaccaccaccaagatggcttcagttcggttcatggtgacaccgacaaagatcgatgacattccaggtttgtcagacaccagtccggacctcagctctcgatctagttcccgagtaagatttagctcccgggaaagcgtgcctgaaacaagccggagtgagcctatgagtgagatgtctggggccaccacttcgctggcaactgttgcactggatccacccagtgaccggacttctcacccccaggatgtcatcgaggacctgagtcagaactccatcacaggggaacacagccaactgttagacgacggacataagaaagctcgaaatgcttatctcaataattccaattatgaagaaggagatgaatattttgataaaaatttggcactctttgaggaagaaatggacaccagaccgaaggtgtcttccctcctcaaccgcatggccaattacactaatctgactcaaggagcaaaggaacatgaagaggcagaaaacatcactgaagggaaaaagaagcccaccaagaccccccaaatgggtaccttcatgggtgtctacctcccatgtctacaaaatatttttggagtgatcctttttttacgccttacatgggtggtgggcacagctggagttcttcaggcttttgcaattgtccttatctgctgctgctgtacaatgttgactgctatctccatgagtgccattgccactaatggagtggtgccagctgggggctcatactttatgatttcccgggcactgggcccagagtttggtggggctgttggcctctgcttttatcttggtaccacatttgcagcagccatgtacatccttggtgccattgaaatctttctggtctatatcgtcccccgagctgccatctttcacagtgatgacgcactcaaggaatcagcagccatgctaaataacatgcgtgtctacggcacagctttcttggtccttatggtattagtggtatttatcggcgtacgctatgtgaacaagtttgcctcacttttcctggcctgtgtcattgtgtccatcttggccatctatgctggagccatcaagtcttcttttgctcctccacacttcccggtctgcatgctgggtaaccgcaccctttcatcaagacacattgacgtttgctctaagaccaaggaaattaacaacatgacagtcccatcaaagttatggggattcttctgtaactcgagtcaatttttcaatgccacctgtgatgaatactttgttcacaataacgtcacttcaatccagggcattcctggattggctagtggtataattacagagaatctttggagtaattacctacccaagggagagatcatcgaaaagccttcagccaaatcttctgatgtcttaggcagcttaaaccatgaatatgttcttgttgacatcaccacctccttcacgcttctggtgggaatcttctttccctctgttacaggtatcatggctggatcaaacagatctggagatctgaaagatgctcagaagtctattccgattggtactatccttgccatcctgaccacctcctttgtttatttaagcaatgttgtcctttttggtgcatgtattgaaggggttgttctcagagacaagttcggtgatgctgtgaaaggtaatttggtggtaggcaccttatcttggccatccccatgggtgattgttattggctccttcttttcaacatgtggggctggacttcagagcctcacaggtgcaccgaggctgctacaagctattgccaaggataacatcataccgtttctgagggtttttggccacagcaaagccaatggggaacctacctgggctttacttctaactgctgccattgcagagcttggaatactcattgcctccctggatcttgtggccccaattctttccatgttttttctcatgtgttacctctttgtaaacttggcatgtgccttgcaaacattacttcgaacacccaactggagaccccgattccgctactaccattgggccctttctttcatgggaatgagtatctgtctggctctgatgttcatttcttcctggtattatgccattgtagccatggtaatagctggtatgatctacaagtacattgaataccaaggagctgagaaagaatggggtgatggtatccgtgggctgtccctcagtgcagcccggtttgctttgcttcgattggaggaaggacctccacacactaaaaactggaggcctcagttgcttgtattactgaaactagatgaagacttacatgtcaagcatcctcgcctcctcacctttgcctcacagctcaaagcaggaaaaggtctcactattgtgggctctgtcatcgtggggaacttcctagagaactacggtgaagctttagctgctgagcagaccataaagcacctaatggaggcagagaaggtaaaaggattctgccagctggtggtggccgccaagctgagagagggcatttcccacctcatccagtcatgtggccttgggggcatgaagcacaacacggtggtgatgggctggcctaatggctggcgtcaaagcgaagatgcccgcgcttggaagacttttattggcacagttcgagtgacaactgctgcccatcttgcactgctggtggctaaaaacatctccttctttcccagcaatgtggagcaattttctgagggcaacattgatgtgtggtggattgtgcatgatggggggatgcttatgctactaccattcctactgaaacagcacaaggtgtggcgaaagtgcagcatacggatcttcacagtagcccaattagaagacaacagtatccaaatgaagaaggacctagccaccttcctatatcacttacgcattgaggcggaggtagaagtggtggagatgcatgacagtgatatatcagcatatacttacgagcgcactttgatgatggaacaaaggtcccagatgcttcggcacatgcggctatccaaaacagagcgagacagagaggcacaattggtgaaagaccgaaactcaatgctacgattgaccagcattggctctgatgaggacgaagagacagaaacctatcaggagaaggtgcacatgacttggacaaaagacaagtacatggcatcccggggacaaaaagcgaagtcaatggaaggattccaggacctgcttaacatgcgtccggaccagtccaatgtgaggcggatgcatacagcagtgaaactcaacgaggttatagttaacaagtcccatgaagcaaagctggttttattgaatatgccagggccaccccgaaaccctgagggtgatgaaaactacatggagttcctagaggtgcttaccgagggactagagcgagtcctacttgtccggggtggtggcagtgaagtgatcaccatttattcataacctactctgaatgaccgtgcttgacctgttttcttaaaaggcctacgtcctccatggaagtgccagctcattactaccactcccactcaactagaagcctgtgttctgtacacatcatactgaactcttgatgagctgagcctcaagtacctgtgtaaaagagctcccatctgatctgcagtcattacagaaaaagcaaatattccctcaacatcagaacaatgctcaagtctttcaagccacgtctgagcagtcaaaggcaaattagaattaacaagctgagccaataaatgaattggtaaaagggatgctagaaattcaactgaagaaaaaaagcaagtcaagtacgtattcagcattaaagatgaatctcagaagtcatggttcaatgttgacactgtgaggataacaactagagacagcttcatcttactaaagaatttatggtcaagtatatttggacctattatcctcggcaagccaagatgcaaacattttttagctatatttctttagtatacccactgctgtaattttatattaggatactaacttgaaacatggctgcagcctctacttcttcaaaaacatccccccaaaataccagatttaaatatccaaatactgtgtcagtgtatacttcaactgttttgtttctcttaactcaaaacccattctgtcattgtaacacaggcagtgttaccatggaaattgtttttggtaaggtaaaaattatttctttcaggttcctttcaaatggccgaactaagagaactccaaaaggaagctattaacatttactgaaatagtctgtggttctctatacaacatggacaaaacatacaagctgttgtctaagaaatgcaggtcatggtgcacattaatcaacaggttcttctcccc

SEQ ID NO: 283678 - DNA, 4383 bp, Homo sapiens
gcgcgctggactcggtcaccgcgggctgcggcggctgggcggggctttcgggcgcccgcgggacggttccgccctctcactgcacccccgggcttctcttcgcaaggtttgtcagacaccagtccggacctcagctctcgatctagttcccgagtaagatttagctcccgggaaagcgtgcctgaaacaagccggagtgagcctatgagtgagatgtctggggccaccacttcgctggcaactgttgcactggatccacccagtgaccggacttctcacccccaggatgtcatcgaggacctgagtcagaactccatcacaggggaacacagccaactgttagacgacggacataagaaagctcgaaatgcttatctcaataattccaattatgaagaaggagatgaatattttgataaaaatttggcactctttgaggaagaaatggacaccagaccgaaggtgtcttccctcctcaaccgcatggccaattacactaatctgactcaaggagcaaaggaacatgaagaggcagaaaacatcactgaagggaaaaagaagcccaccaagaccccccaaatgggtaccttcatgggtgtctacctcccatgtctacaaaatatttttggagtgatcctttttttacgccttacatgggtggtgggcacagctggagttcttcaggcttttgcaattgtccttatctgctgctgctgtacaatgttgactgctatctccatgagtgccattgccactaatggagtggtgccagctgggggctcatactttatgatttcccgggcactgggcccagagtttggtggggctgttggcctctgcttttatcttggtaccacatttgcagcagccatgtacatccttggtgccattgaaatctttctggtctatatcgtcccccgagctgccatctttcacagtgatgacgcactcaaggaatcagcagccatgctaaataacatgcgtgtctacggcacagctttcttggtccttatggtattagtggtatttatcggcgtacgctatgtgaacaagtttgcctcacttttcctggcctgtgtcattgtgtccatcttggccatctatgctggagccatcaagtcttcttttgctcctccacacttcccggtctgcatgctgggtaaccgcaccctttcatcaagacacattgacgtttgctctaagaccaaggaaattaacaacatgacagtcccatcaaagttatggggattcttctgtaactcgagtcaatttttcaatgccacctgtgatgaatactttgttcacaataacgtcacttcaatccagggcattcctggattggctagtggtataattacagagaatctttggagtaattacctacccaagggagagatcatcgaaaagccttcagccaaatcttctgatgtcttaggcagcttaaaccatgaatatgttcttgttgacatcaccacctccttcacgcttctggtgggaatcttctttccctctgttacaggtatcatggctggatcaaacagatctggagatctgaaagatgctcagaagtctattccgattggtactatccttgccatcctgaccacctcctttgtttatttaagcaatgttgtcctttttggtgcatgtattgaaggggttgttctcagagacaagttcggtgatgctgtgaaaggtaatttggtggtaggcaccttatcttggccatccccatgggtgattgttattggctccttcttttcaacatgtggggctggacttcagagcctcacaggtgcaccgaggctgctacaagctattgccaaggataacatcataccgtttctgagggtttttggccacagcaaagccaatggggaacctacctgggctttacttctaactgctgccattgcagagcttggaatactcattgcctccctggatcttgtggccccaattctttccatgttttttctcatgtgttacctctttgtaaacttggcatgtgccttgcaaacattacttcgaacacccaactggagaccccgattccgctactaccattgggccctttctttcatgggaatgagtatctgtctggctctgatgttcatttcttcctggtattatgccattgtagccatggtaatagctggtatgatctacaagtacattgaataccaaggagctgagaaagaatggggtgatggtatccgtgggctgtccctcagtgcagcccggtttgctttgcttcgattggaggaaggacctccacacactaaaaactggaggcctcagttgcttgtattactgaaactagatgaagacttacatgtcaagcatcctcgcctcctcacctttgcctcacagctcaaagcaggaaaaggtctcactattgtgggctctgtcatcgtggggaacttcctagagaactacggtgaagctttagctgctgagcagaccataaagcacctaatggaggcagagaaggtaaaaggattctgccagctggtggtggccgccaagctgagagagggcatttcccacctcatccagtcatgtggccttgggggcatgaagcacaacacggtggtgatgggctggcctaatggctggcgtcaaagcgaagatgcccgcgcttggaagacttttattggcacagttcgagtgacaactgctgcccatcttgcactgctggtggctaaaaacatctccttctttcccagcaatgtggagcaattttctgagggcaacattgatgtgtggtggattgtgcatgatggggggatgcttatgctactaccattcctactgaaacagcacaaggtgtggcgaaagtgcagcatacggatcttcacagtagcccaattagaagacaacagtatccaaatgaagaaggacctagccaccttcctatatcacttacgcattgaggcggaggtagaagtggtggagatgcatgacagtgatatatcagcatatacttacgagcgcactttgatgatggaacaaaggtcccagatgcttcggcacatgcggctatccaaaacagagcgagacagagaggcacaattggtgaaagaccgaaactcaatgctacgattgaccagcattggctctgatgaggacgaagagacagaaacctatcaggagaaggtgcacatgacttggacaaaagacaagtacatggcatcccggggacaaaaagcgaagtcaatggaaggattccaggacctgcttaacatgcgtccggaccagtccaatgtgaggcggatgcatacagcagtgaaactcaacgaggttatagttaacaagtcccatgaagcaaagctggttttattgaatatgccagggccaccccgaaaccctgagggtgatgaaaactacatggagttcctagaggtgcttaccgagggactagagcgagtcctacttgtccggggtggtggcagtgaagtgatcaccatttattcataacctactctgaatgaccgtgcttgacctgttttcttaaaaggcctacgtcctccatggaagtgccagctcattactaccactcccactcaactagaagcctgtgttctgtacacatcatactgaactcttgatgagctgagcctcaagtacctgtgtaaaagagctcccatctgatctgcagtcattacagaaaaagcaaatattccctcaacatcagaacaatgctcaagtctttcaagccacgtctgagcagtcaaaggcaaattagaattaacaagctgagccaataaatgaattggtaaaagggatgctagaaattcaactgaagaaaaaaagcaagtcaagtacgtattcagcattaaagatgaatctcagaagtcatggttcaatgttgacactgtgaggataacaactagagacagcttcatcttactaaagaatttatggtcaagtatatttggacctattatcctcggcaagccaagatgcaaacattttttagctatatttctttagtatacccactgctgtaattttatattaggatactaacttgaaacatggctgcagcctctacttcttcaaaaacatccccccaaaataccagatttaaatatccaaatactgtgtcagtgtatacttcaactgttttgtttctcttaactcaaaacccattctgtcattgtaacacaggcagtgttaccatggaaattgtttttggtaaggtaaaaattatttctttcaggttcctttcaaatggccgaactaagagaactccaaaaggaagctattaacatttactgaaatagtctgtggttctctatacaacatggacaaaacatacaagctgttgtctaagaaatgcaggtcatggtgcacattaatcaacaggttcttctcccc

SEQ ID NO: 283679 - DNA, 2487 bp, Homo sapiens
atctcagctctactatttcctagctttgtaaccttcagcaaagcacataaccatgtaaaatttaattttattcatttgtaaaatgggactaataaatctaaagtgcttatcgtagtgcctgatacatagtaaagctcagctctcaatgaactgttgctgctgctgctgttgtaggccctttctttcatgggaatgagtatctgtctggctctgatgttcatttcttcctggtattatgccattgtagccatggtaatagctggtatgatctacaagtacattgaataccaaggagctgagaaagaatggggtgatggtatccgtgggctgtccctcagtgcagcccggtttgctttgcttcgattggaggaaggacctccacacactaaaaactggaggcctcagttgcttgtattactgaaactagatgaagacttacatgtcaagcatcctcgcctcctcacctttgcctcacagctcaaagcaggaaaaggtctcactattgtgggctctgtcatcgtggggaacttcctagagaactacggtgaagctttagctgctgagcagaccataaagcacctaatggaggcagagaaggtaaaaggattctgccagctggtggtggccgccaagctgagagagggcatttcccacctcatccagtcatgtggccttgggggcatgaagcacaacacggtggtgatgggctggcctaatggctggcgtcaaagcgaagatgcccgcgcttggaagacttttattggcacagttcgagtgacaactgctgcccatcttgcactgctggtggctaaaaacatctccttctttcccagcaatgtggagcaattttctgagggcaacattgatgtgtggtggattgtgcatgatggggggatgcttatgctactaccattcctactgaaacagcacaaggtgtggcgaaagtgcagcatacggatcttcacagtagcccaattagaagacaacagtatccaaatgaagaaggacctagccaccttcctatatcacttacgcattgaggcggaggtagaagtggtggagatgcatgacagtgatatatcagcatatacttacgagcgcactttgatgatggaacaaaggtcccagatgcttcggcacatgcggctatccaaaacagagcgagacagagaggcacaattggtgaaagaccgaaactcaatgctacgattgaccagcattggctctgatgaggacgaagagacagaaacctatcaggagaaggtgcacatgacttggacaaaagacaagtacatggcatcccggggacaaaaagcgaagtcaatggaaggattccaggacctgcttaacatgcgtccggaccagtccaatgtgaggcggatgcatacagcagtgaaactcaacgaggttatagttaacaagtcccatgaagcaaagctggttttattgaatatgccagggccaccccgaaaccctgagggtgatgaaaactacatggagttcctagaggtgcttaccgagggactagagcgagtcctacttgtccggggtggtggcagtgaagtgatcaccatttattcataacctactctgaatgaccgtgcttgacctgttttcttaaaaggcctacgtcctccatggaagtgccagctcattactaccactcccactcaactagaagcctgtgttctgtacacatcatactgaactcttgatgagctgagcctcaagtacctgtgtaaaagagctcccatctgatctgcagtcattacagaaaaagcaaatattccctcaacatcagaacaatgctcaagtctttcaagccacgtctgagcagtcaaaggcaaattagaattaacaagctgagccaataaatgaattggtaaaagggatgctagaaattcaactgaagaaaaaaagcaagtcaagtacgtattcagcattaaagatgaatctcagaagtcatggttcaatgttgacactgtgaggataacaactagagacagcttcatcttactaaagaatttatggtcaagtatatttggacctattatcctcggcaagccaagatgcaaacattttttagctatatttctttagtatacccactgctgtaattttatattaggatactaacttgaaacatggctgcagcctctacttcttcaaaaacatccccccaaaataccagatttaaatatccaaatactgtgtcagtgtatacttcaactgttttgtttctcttaactcaaaacccattctgtcattgtaacacaggcagtgttaccatggaaattgtttttggtaaggtaaaaattatttctttcaggttcctttcaaatggccgaactaagagaactccaaaaggaagctattaacatttactgaaatagtctgtggttctctatacaacatggacaaaacatacaagctgttgtctaagaaatgcaggtcatggtgcacattaatcaacaggttcttctcccc

SEQ ID NO: 283680 - DNA, 3296 bp, Homo sapiens
gcgcgctggactcggtcaccgcgggctgcggcggctgggcggggctttcgggcgcccgcgggacggttccgccctctcactgcacccccgggcttctcttcgcaaggtttgtcagacaccagtccggacctcagctctcgatctagttcccgagtaagatttagctcccgggaaagcgtgcctgaaacaagccggagtgagcctatgagtgagatgtctggggccaccacttcgctggcaactgttgcactggatccacccagtgaccggacttctcacccccaggatgtcatcgaggacctgagtcagaactccatcacaggggaacacagccaactgttagacgacggacataagaaagctcgaaatgcttatctcaataattccaattatgaagaaggagatgaatattttgataaaaatttggcactctttgaggaagaaatggacaccagaccgaaggtgtcttccctcctcaaccgcatggccaattacactaatctgactcaaggagcaaaggaacatgaagaggcagaaaacatcactgaagggaaaaagaagcccaccaagaccccccaaatgggtaccttcatgggtgtctacctcccatgtctacaaaatatttttggagtgatcctttttttacgccttacatgggtggtgggcacagctggagttcttcaggcttttgcaattgtccttatctgctgctgctgtacaatgttgactgctatctccatgagtgccattgccactaatggagtggtgccagctgggggctcatactttatgatttcccgggcactgggcccagagtttggtggggctgttggcctctgcttttatcttggtaccacatttgcagcagccatgtacatccttggtgccattgaaatctttctggtctatatcgtcccccgagctgccatctttcacagtgatgacgcactcaaggaatcagcagccatgctaaataacatgcgtgtctacggcacagctttcttggtccttatggtattagtggtatttatcggcgtacgctatgtgaacaagtttgcctcacttttcctggcctgtgtcattgtgtccatcttggccatctatgctggagccatcaagtcttcttttgctcctccacacttcccggtctgcatgctgggtaaccgcaccctttcatcaagacacattgacgtttgctctaagaccaaggaaattaacaacatgacagtcccatcaaagttatggggattcttctgtaactcgagtcaatttttcaatgccacctgtgatgaatactttgttcacaataacgtcacttcaatccagggcattcctggattggctagtggtataattacagagaatctttggagtaattacctacccaagggagagatcatcgaaaagccttcagccaaatcttctgatgtcttaggcagcttaaaccatgaatatgttcttgttgacatcaccacctccttcacgcttctggtgggaatcttctttccctctgttacaggtatcatggctggatcaaacagatctggagatctgaaagatgctcagaagtctattccgattggtactatccttgccatcctgaccacctcctttgtttatttaagcaatgttgtcctttttggtgcatgtattgaaggggttgttctcagagacaagttcggtgatgctgtgaaaggtaatttggtggtaggcaccttatcttggccatccccatgggtgattgttattggctccttcttttcaacatgtggggctggacttcagagcctcacaggtgcaccgaggctgctacaagctattgccaaggataacatcataccgtttctgagggtttttggccacagcaaagccaatggggaacctacctgggctttacttctaactgctgccattgcagagcttggaatactcattgcctccctggatcttgtggccccaattctttccatgttttttctcatgtgttacctctttgtaaacttggcatgtgccttgcaaacattacttcgaacacccaactggagaccccgattccgctactaccattgggccctttctttcatgggaatgagtatctgtctggctctgatgttcatttcttcctggtattatgccattgtagccatggtaatagctggtatgatctacaagtacattgaataccaaggagctgagaaagaatggggtgatggtatccgtgggctgtccctcagtgcagcccggtttgctttgcttcgattggaggaaggacctccacacactaaaaactggaggcctcagttgcttgtattactgaaactagatgaagacttacatgtcaagcatcctcgcctcctcacctttgcctcacagctcaaagcaggaaaaggtctcactattgtgggctctgtcatcgtggggaacttcctagagaactacggtgaagctttagctgctgagcagaccataaagcacctaatggaggcagagaaggtaaaaggattctgccagctggtggtggccgccaagctgagagagggcatttcccacctcatccagtcatgtggccttgggggcatgaagcacaacacggtggtgatgggctggcctaatggctggcgtcaaagcgaagatgcccgcgcttggaagacttttattggcacagttcgagtgacaactgctgcccatcttgcactgctggtggctaaaaacatctccttctttcccagcaatgtggagcaattttctgagggcaacattgatgtgtggtggattgtgcatgatggggggatgcttatgctactaccattcctactgaaacagcacaaggtgtggcgaaagtgcagcatacggatcttcacagtagcccaattagaagacaacagtatccaaatgaagaaggacctagccaccttcctatatcacttacgcattgaggcggaggtagaagtggtggagatggtgagaaagctgagtttgagatacaagaggttcattcccccattcctctccctgtcttccttgaatcttttctggtttgggaaatttttcagatctaaatgtggattaatcccctagtgccaaaaaaaaaacaaaaaaaaaccctaatttgttgccctaagtagaatgtatatgtgatgcatgtttgatgttattttttggttttgctttcttgtttattacacagcccttatatttctgccagattctcatctgcttaatatagttttatgaaatttttattcatatattcagcttaaaatcacacatggcttttaaaaaaaacctaacagtat

SEQ ID NO: 283681 - DNA, 465 bp, Homo sapiens
aatggtttttgatacgtaatgagaaataacctactaagtaaataggaccccttgctcaaagaagtgtgaaaagagcatttccttgctttcctgacatgctaggaagcaaggcaagcctaaggattcttctctgcttattcttttttctccctaggcacagttcgagtgacaactgctgcccatcttgcactgctggtggctaaaaacatctccttctttcccagcaatgtggagcaattttctgagggcaacattgatgtgtggtggattgtgcatgatggggggatgcttatgctactaccattcctactgaaacagcacaaggtattttatacaactttttttttacaaaagtctttctcccttctgtcctggttcacaggacagacaaattcttcctctgattataatagtgttggggtttagaatcagaagagttggaagttattctaggctttcccatga

SEQ ID NO: 283682 - DNA, 4254 bp, Homo sapiens
ctggaaggaagtttaaatacagaaagagcaaagtattatctaactataacaatgccacattttactgtgactaaggtagaggacccagaggagggggcagcggcttcgatctctcaagagcctagtttagcagacataaaagcccggattcaggattcagatgaaccagacctgagtcagaactccatcacaggggaacacagccaactgttagacgacggacataagaaagctcgaaatgcttatctcaataattccaattatgaagaaggagatgaatattttgataaaaatttggcactctttgaggaagaaatggacaccagaccgaaggtgtcttccctcctcaaccgcatggccaattacactaatctgactcaaggagcaaaggaacatgaagaggcagaaaacatcactgaagggaaaaagaagcccaccaagaccccccaaatgggtaccttcatgggtgtctacctcccatgtctacaaaatatttttggagtgatcctttttttacgccttacatgggtggtgggcacagctggagttcttcaggcttttgcaattgtccttatctgctgctgctgtacaatgttgactgctatctccatgagtgccattgccactaatggagtggtgccagctgggggctcatactttatgatttcccgggcactgggcccagagtttggtggggctgttggcctctgcttttatcttggtaccacatttgcagcagccatgtacatccttggtgccattgaaatctttctggtctatatcgtcccccgagctgccatctttcacagtgatgacgcactcaaggaatcagcagccatgctaaataacatgcgtgtctacggcacagctttcttggtccttatggtattagtggtatttatcggcgtacgctatgtgaacaagtttgcctcacttttcctggcctgtgtcattgtgtccatcttggccatctatgctggagccatcaagtcttcttttgctcctccacacttcccggtctgcatgctgggtaaccgcaccctttcatcaagacacattgacgtttgctctaagaccaaggaaattaacaacatgacagtcccatcaaagttatggggattcttctgtaactcgagtcaatttttcaatgccacctgtgatgaatactttgttcacaataacgtcacttcaatccagggcattcctggattggctagtggtataattacagagaatctttggagtaattacctacccaagggagagatcatcgaaaagccttcagccaaatcttctgatgtcttaggcagcttaaaccatgaatatgttcttgttgacatcaccacctccttcacgcttctggtgggaatcttctttccctctgttacaggtatcatggctggatcaaacagatctggagatctgaaagatgctcagaagtctattccgattggtactatccttgccatcctgaccacctcctttgtttatttaagcaatgttgtcctttttggtgcatgtattgaaggggttgttctcagagacaagttcggtgatgctgtgaaaggtaatttggtggtaggcaccttatcttggccatccccatgggtgattgttattggctccttcttttcaacatgtggggctggacttcagagcctcacaggtgcaccgaggctgctacaagctattgccaaggataacatcataccgtttctgagggtttttggccacagcaaagccaatggggaacctacctgggctttacttctaactgctgccattgcagagcttggaatactcattgcctccctggatcttgtggccccaattctttccatgttttttctcatgtgttacctctttgtaaacttggcatgtgccttgcaaacattacttcgaacacccaactggagaccccgattccgctactaccattgggccctttctttcatgggaatgagtatctgtctggctctgatgttcatttcttcctggtattatgccattgtagccatggtaatagctggtatgatctacaagtacattgaataccaaggagctgagaaagaatggggtgatggtatccgtgggctgtccctcagtgcagcccggtttgctttgcttcgattggaggaaggacctccacacactaaaaactggaggcctcagttgcttgtattactgaaactagatgaagacttacatgtcaagcatcctcgcctcctcacctttgcctcacagctcaaagcaggaaaaggtctcactattgtgggctctgtcatcgtggggaacttcctagagaactacggtgaagctttagctgctgagcagaccataaagcacctaatggaggcagagaaggtaaaaggattctgccagctggtggtggccgccaagctgagagagggcatttcccacctcatccagtcatgtggccttgggggcatgaagcacaacacggtggtgatgggctggcctaatggctggcgtcaaagcgaagatgcccgcgcttggaagacttttattggcacagttcgagtgacaactgctgcccatcttgcactgctggtggctaaaaacatctccttctttcccagcaatgtggagcaattttctgagggcaacattgatgtgtggtggattgtgcatgatggggggatgcttatgctactaccattcctactgaaacagcacaaggtgtggcgaaagtgcagcatacggatcttcacagtagcccaattagaagacaacagtatccaaatgaagaaggacctagccaccttcctatatcacttacgcattgaggcggaggtagaagtggtggagatgcatgacagtgatatatcagcatatacttacgagcgcactttgatgatggaacaaaggtcccagatgcttcggcacatgcggctatccaaaacagagcgagacagagaggcacaattggtgaaagaccgaaactcaatgctacgattgaccagcattggctctgatgaggacgaagagacagaaacctatcaggagaaggtgcacatgacttggacaaaagacaagtacatggcatcccggggacaaaaagcgaagtcaatggaaggattccaggacctgcttaacatgcgtccggaccagtccaatgtgaggcggatgcatacagcagtgaaactcaacgaggttatagttaacaagtcccatgaagcaaagctggttttattgaatatgccagggccaccccgaaaccctgagggtgatgaaaactacatggagttcctagaggtgcttaccgagggactagagcgagtcctacttgtccggggtggtggcagtgaagtgatcaccatttattcataacctactctgaatgaccgtgcttgacctgttttcttaaaaggcctacgtcctccatggaagtgccagctcattactaccactcccactcaactagaagcctgtgttctgtacacatcatactgaactcttgatgagctgagcctcaagtacctgtgtaaaagagctcccatctgatctgcagtcattacagaaaaagcaaatattccctcaacatcagaacaatgctcaagtctttcaagccacgtctgagcagtcaaaggcaaattagaattaacaagctgagccaataaatgaattggtaaaagggatgctagaaattcaactgaagaaaaaaagcaagtcaagtacgtattcagcattaaagatgaatctcagaagtcatggttcaatgttgacactgtgaggataacaactagagacagcttcatcttactaaagaatttatggtcaagtatatttggacctattatcctcggcaagccaagatgcaaacattttttagctatatttctttagtatacccactgctgtaattttatattaggatactaacttgaaacatggctgcagcctctacttcttcaaaaacatccccccaaaataccagatttaaatatccaaatactgtgtcagtgtatacttcaactgttttgtttctcttaactcaaaacccattctgtcattgtaacacaggcagtgttaccatggaaattgtttttggtaaggtaaaaattatttctttcaggttcctttcaaatggccgaactaagagaactccaaaaggaagctattaacatttactgaaatagtctgtggttctctatacaacatggacaaaacatacaagctgttgtctaagaaatgcaggtcatggtgcacattaatcaacaggttcttctcccc

SEQ ID NO: 283683 - DNA, 3898 bp, Homo sapiens
ctggaaggaagtttaaatacagaaagagcaaagtattatctaactataacaatgccacattttactgtgactaaggtagaggacccagaggagggggcagcggcttcgatctctcaagagcctagtttagcagacataaaagcccggattcaggattcagatgaaccagacctgagtcagaactccatcacaggggaacacagccaactgttagacgacggacataagaaagctcgaaatgcttatctcaataattccaattatgaagaaggagatgaatattttgataaaaatttggcactctttgaggaagaaatggacaccagaccgaaggtgtcttccctcctcaaccgcatggccaattacactaatctgactcaaggagcaaaggaacatgaagaggcagaaaacatcactgaagggaaaaagaagcccaccaagaccccccaaatgggtaccttcatgggtgtctacctcccatgtctacaaaatatttttggagtgatcctttttttacgccttacatgggtggtgggcacagctggagttcttcaggcttttgcaattgtccttatctgctgctgctgtacaatgttgactgctatctccatgagtgccattgccactaatggagtggtgccagctgggggctcatactttatgatttcccgggcactgggcccagagtttggtggggctgttggcctctgcttttatcttggtaccacatttgcagcagccatgtacatccttggtgccattgaaatctttctggtctatatcgtcccccgagctgccatctttcacagtgatgacgcactcaaggaatcagcagccatgctaaataacatgcgtgtctacggcacagctttcttggtccttatggtattagtggtatttatcggcgtacgctatgtgaacaagtttgcctcacttttcctggcctgtgtcattgtgtccatcttggccatctatgctggagccatcaagtcttcttttgctcctccacacttcccggtctgcatgctgggtaaccgcaccctttcatcaagacacattgacgtttgctctaagaccaaggaaattaacaacatgacagtcccatcaaagttatggggattcttctgtaactcgagtcaatttttcaatgccacctgtgatgaatactttgttcacaataacgtcacttcaatccagggcattcctggattggctagtggtataattacagagaatctttggagtaattacctacccaagggagagatcatcgaaaagccttcagccaaatcttctgatgtcttaggcagcttaaaccatgaatatgttcttgttgacatcaccacctccttcacgcttctggtgggaatcttctttccctctgttacaggtatcatggctggatcaaacagatctggagatctgaaagatgctcagaagtctattccgattggtactatccttgccatcctgaccacctcctttgtttatttaagcaatgttgtcctttttggtgcatgtattgaaggggttgttctcagagacaagttcggtgatgctgtgaaaggtaatttggtggtaggcaccttatcttggccatccccatgggtgattgttattggctccttcttttcaacatgtggggctggacttcagagcctcacaggtgcaccgaggctgctacaagctattgccaaggataacatcataccgtttctgagggtttttggccacagcaaagccaatggggaacctacctgggctttacttctaactgctgccattgcagagcttggaatactcattgcctccctggatcttgtggccccaattctttccatgttttttctcatgtgttacctctttgtaaacttggcatgtgccttgcaaacattacttcgaacacccaactggagaccccgattccgctactaccattgggccctttctttcatgggaatgagtatctgtctggctctgatgttcatttcttcctggtattatgccattgtagccatggtaatagctggtatgatctacaagtacattgaataccaaggagctgagaaagaatggggtgatggtatccgtgggctgtccctcagtgcagcccggtttgctttgcttcgattggaggaaggacctccacacactaaaaactggaggcctcagttgcttgtattactgaaactagatgaagacttacatgtcaagcatcctcgcctcctcacctttgcctcacagctcaaagcaggaaaaggtctcactattgtgggctctgtcatcgtggggaacttcctagagaactacggtgaagctttagctgctgagcagaccataaagcacctaatggaggcagagaaggtaaaaggattctgccagctggtggtggccgccaagctgagagagggcatttcccacctcatccagtcatgtggccttgggggcatgaagcacaacacggtggtgatgggctggcctaatggctggcgtcaaagcgaagatgcccgcgcttggaagacttttattggcacagttcgagtgacaactgctgcccatcttgcactgctggtggctaaaaacatctccttctttcccagcaatgtggagcaattttctgagggcaacattgatgtgtggtggattgtgcatgatggggggatgcttatgctactaccattcctactgaaacagcacaaggtgtggcgaaagtgcagcatacggatcttcacagtagcccaattagaagacaacagtatccaaatgaagaaggacctagccaccttcctatatcacttacgcattgaggcggaggtagaagtggtggagatgcatgacagtgatatatcagcatatacttacgagcgcactttgatgatggaacaaaggtcccagatgcttcggcacatgcggctatccaaaacagagcgagacagagaggcacaattggtgaaagaccgaaactcaatgctacgattgaccagcattggctctgatgaggacgaagagacagaaacctatcaggagaaggtgcacatgacttggacaaaagacaagtacatggcatcccggggacaaaaagcgaagtcaatggaaggattccaggacctgcttaacatgcgtccggaccagtccaatgtgaggcggatgcatacagcagtgaaactcaacgaggttatagttaacaagtcccatgaagcaaagctggttttattgaatatgccagggccaccccgaaaccctgagggtgatgaaaactacatggagttcctagaggtgcttaccgagggactagagcgagtcctacttgtccggggtggtggcagtgaagtgatcaccatttattcataacctactctgaatgaccgtgcttgacctgttttcttaaaaggcctacgtcctccatggaagtgccagctcattactaccactcccactcaactagaagcctgtgttctgtacacatcatactgaactcttgatgagctgagcctcaagtacctgtgtaaaagagctcccatctgatctgcagtcattacagaaaaagcaaatattccctcaacatcagaacaatgctcaagtctttcaagccacgtctgagcagtcaaaggcaaattagaattaacaagctgagccaataaatgaattggtaaaagggatgctagaaattcaactgaagaaaaaaagcaagtcaagtacgtattcagcattaaagatgaatctcagaagtcatggttcaatgttgacactgtgaggataacaactagagacagcttcatcttactaaagaatttatggtcaagtatatttggacctattatcctcggcaagccaagatgcaccattgcactccagcctgggcaacaagaggaaattctgtctcaaaaaaaaaagaaaa

SEQ ID NO: 283684 - DNA, 5012 bp, Homo sapiens
gcgcgctggactcggtcaccgcgggctgcggcggctgggcggggctttcgggcgcccgcgggacggttccgccctctcactgcacccccgggcttctcttcgcaaggttcacctcgaatgaggaacaagcggggagggaagggaagggctgcggcggcgcgggcgcaccccgtcgggcccggggctgggggaggccaggtcacgtaactgctgctctggcgtcgggccggggagggggcgccagccccggcagcgcgaaccctgcgcgcgccgcggctctgaaacagttaccggctagtaaacaacagctgcgcgcgcacccgcatcagctggcgccgggatactgcacctgcgacctccttctccctcaccctgctgcccagtcaggccagcctgcgtggccgtctcctcctctactgggaccctgaggaagaacgacgagggggtgacctgcgccggggcgggggtaggggagaacgcgcctccggcaaagggggtggctcgtcctgtcacacgcaggagaaacctagcgagcggaccgtggctcagtggactagctacgacttgccacgactctgagctgcagtccgaggtgtcttgatccgctaacctcctcccagaccccgaggacctttctgctaggagaagagcgggcgcgccacccccaccgacctctcggagacaggaatccgctctgcccctgcatcctcctctgctcacccttctctcagtagtgtttgtcagacaccagtccggacctcagctctcgatctagttcccgagtaagatttagctcccgggaaagcgtgcctgaaacaagccggagtgagcctatgagtgagatgtctggggccaccacttcgctggcaactgttgcactggatccacccagtgaccggacttctcacccccaggatgtcatcgaggacctgagtcagaactccatcacaggggaacacagccaactgttagacgacggacataagaaagctcgaaatgcttatctcaataattccaattatgaagaaggagatgaatattttgataaaaatttggcactctttgaggaagaaatggacaccagaccgaaggtgtcttccctcctcaaccgcatggccaattacactaatctgactcaaggagcaaaggaacatgaagaggcagaaaacatcactgaagggaaaaagaagcccaccaagaccccccaaatgggtaccttcatgggtgtctacctcccatgtctacaaaatatttttggagtgatcctttttttacgccttacatgggtggtgggcacagctggagttcttcaggcttttgcaattgtccttatctgctgctgctgtacaatgttgactgctatctccatgagtgccattgccactaatggagtggtgccagctgggggctcatactttatgatttcccgggcactgggcccagagtttggtggggctgttggcctctgcttttatcttggtaccacatttgcagcagccatgtacatccttggtgccattgaaatctttctggtctatatcgtcccccgagctgccatctttcacagtgatgacgcactcaaggaatcagcagccatgctaaataacatgcgtgtctacggcacagctttcttggtccttatggtattagtggtatttatcggcgtacgctatgtgaacaagtttgcctcacttttcctggcctgtgtcattgtgtccatcttggccatctatgctggagccatcaagtcttcttttgctcctccacacttcccggtctgcatgctgggtaaccgcaccctttcatcaagacacattgacgtttgctctaagaccaaggaaattaacaacatgacagtcccatcaaagttatggggattcttctgtaactcgagtcaatttttcaatgccacctgtgatgaatactttgttcacaataacgtcacttcaatccagggcattcctggattggctagtggtataattacagagaatctttggagtaattacctacccaagggagagatcatcgaaaagccttcagccaaatcttctgatgtcttaggcagcttaaaccatgaatatgttcttgttgacatcaccacctccttcacgcttctggtgggaatcttctttccctctgttacaggtatcatggctggatcaaacagatctggagatctgaaagatgctcagaagtctattccgattggtactatccttgccatcctgaccacctcctttgtttatttaagcaatgttgtcctttttggtgcatgtattgaaggggttgttctcagagacaagttcggtgatgctgtgaaaggtaatttggtggtaggcaccttatcttggccatccccatgggtgattgttattggctccttcttttcaacatgtggggctggacttcagagcctcacaggtgcaccgaggctgctacaagctattgccaaggataacatcataccgtttctgagggtttttggccacagcaaagccaatggggaacctacctgggctttacttctaactgctgccattgcagagcttggaatactcattgcctccctggatcttgtggccccaattctttccatgttttttctcatgtgttacctctttgtaaacttggcatgtgccttgcaaacattacttcgaacacccaactggagaccccgattccgctactaccattgggccctttctttcatgggaatgagtatctgtctggctctgatgttcatttcttcctggtattatgccattgtagccatggtaatagctggtatgatctacaagtacattgaataccaaggagctgagaaagaatggggtgatggtatccgtgggctgtccctcagtgcagcccggtttgctttgcttcgattggaggaaggacctccacacactaaaaactggaggcctcagttgcttgtattactgaaactagatgaagacttacatgtcaagcatcctcgcctcctcacctttgcctcacagctcaaagcaggaaaaggtctcactattgtgggctctgtcatcgtggggaacttcctagagaactacggtgaagctttagctgctgagcagaccataaagcacctaatggaggcagagaaggtaaaaggattctgccagctggtggtggccgccaagctgagagagggcatttcccacctcatccagtcatgtggccttgggggcatgaagcacaacacggtggtgatgggctggcctaatggctggcgtcaaagcgaagatgcccgcgcttggaagacttttattggcacagttcgagtgacaactgctgcccatcttgcactgctggtggctaaaaacatctccttctttcccagcaatgtggagcaattttctgagggcaacattgatgtgtggtggattgtgcatgatggggggatgcttatgctactaccattcctactgaaacagcacaaggtgtggcgaaagtgcagcatacggatcttcacagtagcccaattagaagacaacagtatccaaatgaagaaggacctagccaccttcctatatcacttacgcattgaggcggaggtagaagtggtggagatgcatgacagtgatatatcagcatatacttacgagcgcactttgatgatggaacaaaggtcccagatgcttcggcacatgcggctatccaaaacagagcgagacagagaggcacaattggtgaaagaccgaaactcaatgctacgattgaccagcattggctctgatgaggacgaagagacagaaacctatcaggagaaggtgcacatgacttggacaaaagacaagtacatggcatcccggggacaaaaagcgaagtcaatggaaggattccaggacctgcttaacatgcgtccggaccagtccaatgtgaggcggatgcatacagcagtgaaactcaacgaggttatagttaacaagtcccatgaagcaaagctggttttattgaatatgccagggccaccccgaaaccctgagggtgatgaaaactacatggagttcctagaggtgcttaccgagggactagagcgagtcctacttgtccggggtggtggcagtgaagtgatcaccatttattcataacctactctgaatgaccgtgcttgacctgttttcttaaaaggcctacgtcctccatggaagtgccagctcattactaccactcccactcaactagaagcctgtgttctgtacacatcatactgaactcttgatgagctgagcctcaagtacctgtgtaaaagagctcccatctgatctgcagtcattacagaaaaagcaaatattccctcaacatcagaacaatgctcaagtctttcaagccacgtctgagcagtcaaaggcaaattagaattaacaagctgagccaataaatgaattggtaaaagggatgctagaaattcaactgaagaaaaaaagcaagtcaagtacgtattcagcattaaagatgaatctcagaagtcatggttcaatgttgacactgtgaggataacaactagagacagcttcatcttactaaagaatttatggtcaagtatatttggacctattatcctcggcaagccaagatgcaaacattttttagctatatttctttagtatacccactgctgtaattttatattaggatactaacttgaaacatggctgcagcctctacttcttcaaaaacatccccccaaaataccagatttaaatatccaaatactgtgtcagtgtatacttcaactgttttgtttctcttaactcaaaacccattctgtcattgtaacacaggcagtgttaccatggaaattgtttttggtaaggtaaaaattatttctttcaggttcctttcaaatggccgaactaagagaactccaaaaggaagctattaacatttactgaaatagtctgtggttctctatacaacatggacaaaacatacaagctgttgtctaagaaatgcaggtcatggtgcacattaatcaacaggttcttctcccc

SEQ ID NO: 283685 - DNA, 413 bp, Homo sapiens
tttccttacttgatctttctccctatttcttttcacttagggtctgcatgctgggtaaccgcaccctttcatcaagacacattgacgtttgctctaagaccaaggaaattaacaacatgacagtcccatcaaagttatggggattcttctgtaactcgagtcaatttttcaatgccacctgtgatgaatactttgttcacaataacgtcacttcaatccagggcattcctggattggctagtggtataattacaggtaagttagggagttattggacaagttttttcctattttttggggaaaataggccttgtcatcttagattcctctactgtccataaagattcactgccatggtgctaattcccttcttaagcacaccacacagctcttaattcaccatatttctgctt

SEQ ID NO: 283686 - DNA, 544 bp, Homo sapiens
aaggctgcggccgcggcgtcggcggctgggcccggggggctggtggctggcaaggaggagaagaagaaggcgggcggcggcgtcctgaaccgcctgaaggcgcggcggcaggcgccccaccacgcggccgacgacggcgtcggggcagcggtcacggagcaggagctgctggcgctggacaccatccggcccgagcacgtcctgcgcctcagccgggtcaccgagaattatttatgtaaacccgaagacaacatctacagtattgatttcacccgcttcaaaattcgagatttggagacagggacagtactttttgagattgccaaaccttgcgtttcagaccaggaggaggatgaggaggagggaggtggagacgtggacatcagcgcaggacgttttgtccgctatcagttcacaccggcatttctccgcctccggacagtcggggctacggtggagttcacagtgggagacaaacctgtttcaaacttccggatgatcgaacggcactatttccgggaacacttgctgaaaaactttgact

SEQ ID NO: 283687 - DNA, 358 bp, Homo sapiens
gggcgccgctgacacgttggctctgctcctgctcatgcgcggcctggggcgcccttctctgacgcgattctaacgcgaccccggaagcgcgcagcgagcagaggaccctgcattcagatgcagcagatgacaccacccaaacggataatctggctcaaccatgtgtgtgatcccacccagggacagaagtcagccagaactcattttgaccccctatgatttaatcttcgacctgaccaatcagcactcaccactttctgagcccatacccgccaaattatccttaaaaacacggatccccgaatgcttggggagactgatttgagtgataataaaactctgctctcctgcacagcca

SEQ ID NO: 283688 - DNA, 323 bp, Homo sapiens
ccccaaattgcttctgggaataacatcactgttgcaaaacttaaggtcagtgcttgaaatattttgtagaccctgcattcagatgcagcagatgacaccacccaaacggataatctggctcaaccatgtgtgtgatcccacccagggacagaagtcagccagaactcattttgaccccctatgatttaatcttcgacctgaccaatcagcactcaccactttctgagcccatacccgccaaattatccttaaaaacacggatccccgaatgcttggggagactgatttgagtgataataaaactctgctctcctgcacagcca

SEQ ID NO: 283689 - DNA, 309 bp, Homo sapiens
  misc_feature (41)..(41): n is a, c, g, or t
gtgcggaagacgaggacgtcggcaccgctggacaggagganaacaaaaacttaggaccctgcattcagatgcagcagatgacaccacccaaacggataatctggctcaaccatgtgtgtgatcccacccagggacagaagtcagccagaactcattttgaccccctatgatttaatcttcgacctgaccaatcagcactcaccactttctgagcccatacccgccaaattatccttaaaaacacggatccccgaatgcttggggagactgatttgagtgataataaaactctgctctcctgcacagcca

SEQ ID NO: 283690 - DNA, 951 bp, Homo sapiens
gcggccgcgccaactccggcgtcgggaacactcaccgcaggacgctttgccctccttggaatcgcagtagccgcagtggtagccggccctgaggcccttgtattccaccaccgacgccatggccgccgcgagggtccgctcgggccgaccacgcctcttggcgcccggggccgacctcggcgaagcgctggggcccgcggcgggaggggtggagagcgaagcctggcgcggggacccgtgggcggggatggtggtcgtgtccccaagccctgcgtttgggccggtgcttcccacagctgtgcgttatcagccccatttcacagtttgctaaagcagaggcgtactactatcaatagcatcaagaaatgatgatggaagaagcatggaaatacaatatggttccaaaatgggaaactaaaatagaggaagaggaaaagagatcacaacgtgagaaaacagaagatactaaaaaatgggactatctagtgcctgagagggaactgagtcttacaaagaaacatataccaggctgaacaaaccagaggcctcagagaccacaaacaccgactgctccctcaaagaattcccagtgaaatactttcccctaaaatactaacacgggaaaaggatggaaagcatgaaaatatccagaaaacacacaaaactgaaaccagtaagcacaaggtggcatggacaaaggaacagatgaagggacaccaagaccgaatgatctgagggagagaactcaaagcaaagacacgctcagaagcgctccagccccgttccatctttcctaaaatctcaagtggaaaaagagaaggtgaaagagtttgaatgggtcacagcttatccaattttgcaaccttaccagaaagcacttaggaaagtgatgattctgatggagaaataagaaaaaagagagtataaaattaagaaaccactctgaaggga

SEQ ID NO: 283691 - DNA, 497 bp, Homo sapiens
actggagcacagcggtgtttcccaacaacatccccctcccccggggccatcttcagtgagccgtgaaggacaaaagcatggaggggctgaaggcgctgagggaggtgatccgggtgtgccaggtgtggtgacctggaggcagccgccccgcgctgctcagcaggacacgtgaacacccagacacccactcagggactcaagtctcacctccctccccggtggagggaggaactttggcactagcccttggagccaggaaaaaagactcgtgtctcaggcagactcttactctggttactaagatcatctgtgcatgacggggagggtggaacaggtcccggaggagtcgtgaatggttctcaccaggacctgaatcgttgcttgtgtttgagaattggaggaatgagtcagcaggcgtggctcatggcccccccgtgtgcaggatcaattgtaggaggaaatttcttttttattaaaagcgaatgtgtatcccaaaa

SEQ ID NO: 283692 - DNA, 1395 bp, Homo sapiens
ggtacccgcgggcttccccgggcggctgcgtccccagtagcccggccggcctcggcaccgcgtgtcgtgggggtcccgggccgcggctgcagggccggggcggcggcgaggccgaggggcgggaagccactgcccggcctggcagtgtgaacgtgcaagtcgatcccctaacccagaaagccccaggcgcggtctctatgggcggccccgctcctgcttctgttttatttttttacggacagggtctcgctctaccgcccgggttgtaatgcaatggtgtgatcacggctcaccgcagcctcgacctcccgggctgaagcgatcttcccgcctcagcctcctgagtaactgggaccacaggcgcgccctgctggttttttttttttttttttttggtagagatgggggtctcgctatgttggccaggctggtctcgaattcctggcctcaacgatcgtcctgtctcggcctcccaaagtgccgggatgacaggcatgagccaccgcgcctggccccttcttttgaatgggcctccttgcgtttccgtttcaatgccccgtgctacttttttgggagccccaaggctgtactgtttgattgactcctttttttcccctttctttttaacctaaattaaagctgccactgcagagccccgccatggaagacacgccgttggtgatatcgaagcagaagacggaggtggtgtgcggggtccccacccaggtggtgtgtacggccttcagcagtcacatcctggtggtggtgacccagtttgggaagatgggcaccctggtctccctggagcccagcagcgtggccagtgacgtcagcaagcctgtgctcaccacaaaagtccttctggggcaggatgagcctctcatccatgtctttgcaaagaacctggtagcgtttgtgtctcaagaagctggaaacagagcagtcctcctcgccgtggccgtgaaggacaaaagcatggaggggctgaaggcgctgagggaggtgatccgggtgtgccaggtgtggtgacctggaggcagccgccccgcgctgctcagcaggacacgtgaacacccagacacccactcagggactcaagtctcacctccctccccggtggagggaggaactttggcactagcccttggagccaggaaaaaagactcgtgtctcaggcagactcttactctggttactaagatcatctgtgcatgacggggagggtggaacaggtcccggaggagtcgtgaatggttctcaccaggacctgaatcgttgcttgtgtttgagaattggaggaatgagtcagcaggcgtggctcatggcccccccgtgtgcaggatcaattgtaggaggaaatttcttttttattaaaagcgaatgtgtatcccaaaa

SEQ ID NO: 283693 - DNA, 1317 bp, Homo sapiens
  misc_feature (28)..(30): n is a, c, g, or t
aactacggctaggtacgaggctgggtgnnnccagcactttgggaggccgaggaaggcagatcacctgaggtcaggagttcaagaccagcctgaccgacatggtgaaaccccatctctactaaaaatttaaaaagttagccgggcctggtggcgcacgcctgtaatcccagctacacaggaggctgaggcaggagaattgcttgaaccagggaggcggaggctgcagtgagccgagatcgcgccactgcactccagcctgggtgacacagcaagactccgtctcaaacaaaacaaaacaaaaaaccttccagcttggagaaactgagagtgagcagtagggagtgagggggtccctgggaggaaccagaactcatcccgcttcagggtggggctggcccccttcttggccttggccggggcttcgtgtcacggagcgcccgagggacggtcggagcccaccccagcccgcccgccgcctgagcctggccgagctctctgcacctgcacacgtctgtaaaacgcggatgaaacgcttctacggaaccgggtggctgagatgaactgccactgcagagccccgccatggaagacacgccgttggtgatatcgaagcagaagacggaggtggtgtgcggggtccccacccaggtggtgtgtacggccttcagcagtcacatcctggtggtggtgacccagtttgggaagatgggcaccctggtctccctggagcccagcagcgtggccagtgacgtcagcaagcctgtgctcaccacaaaagtccttctggggcaggatgagcctctcatccatgtctttgcaaagaacctggtagcgtttgtgtctcaagaagctggaaacagagcagtcctcctcgccgtggccgtgaaggacaaaagcatggaggggctgaaggcgctgagggaggtgatccgggtgtgccaggtgtggtgacctggaggcagccgccccgcgctgctcagcaggacacgtgaacacccagacacccactcagggactcaagtctcacctccctccccggtggagggaggaactttggcactagcccttggagccaggaaaaaagactcgtgtctcaggcagactcttactctggttactaagatcatctgtgcatgacggggagggtggaacaggtcccggaggagtcgtgaatggttctcaccaggacctgaatcgttgcttgtgtttgagaattggaggaatgagtcagcaggcgtggctcatggcccccccgtgtgcaggatcaattgtaggaggaaatttcttttttattaaaagcgaatgtgtatcccaaaa

SEQ ID NO: 283694 - DNA, 714 bp, Homo sapiens
ggtacggccttcagcagtcacatcctgggtggggtccccacccaggtggtgtgtacggccttcagcagtcacatcctggtggtggtgacccagtttgggaagatgggcaccctggtctccctggagcccagcagcgtggccagtgacgtcagcaagcctgtgctcaccacaaaagtccttctggggcaggatgagcctctcatccatgtctttgcaaagaacctggtagcgtttgtgtctcaagaagctggaaacagagcagtcctcctcgccgtggccgtgaaggacaaaagcatggaggggctgaaggcgctgagggaggtgatccgggtgtgccaggtgtggtgacctggaggcagccgccccgcgctgctcagcaggacacgtgaacacccagacacccactcagggactcaagtctcacctccctccccggtggagggaggaactttggcactagcccttggagccaggaaaaaagactcgtgtctcaggcagactcttactctggttactaagatcatctgtgcatgacggggagggtggaacaggtcccggaggagtcgtgaatggttctcaccaggacctgaatcgttgcttgtgtttgagaattggaggaatgagtcagcaggcgtggctcatggcccccccgtgtgcaggatcaattgtaggaggaaatttcttttttattaaaagcgaatgtgtatcccaaaa

SEQ ID NO: 283695 - DNA, 1564 bp, Homo sapiens
ggtacccgcgggcttccccgggcggctgcgtccccagtagcccggccggcctcggcaccgcgtgtcgtgggggtcccgggccgcggctgcagggccggggcggcggcgaggccgaggggcgggaagccactgcccggcctggcagtgtgaacgtgcaagtcgatcccctaacccagaaagccccaggcgcggtctctatgggcggccccgctcctgcttctgttttatttttttacggacagggtctcgctctaccgcccgggttgtaatgcaatggtgtgatcacggctcaccgcagcctcgacctcccgggctgaagcgatcttcccgcctcagcctcctgagtaactgggaccacaggcgcgccctgctggttttttttttttttttttttggtagagatgggggtctcgctatgttggccaggctggtctcgaattcctggcctcaacgatcgtcctgtctcggcctcccaaagtgccgggatgacaggcatgagccaccgcgcctggccccttcttttgaatgggcctccttgcgtttccgtttcaatgccccgtgctacttttttgggagccccaaggctgtactgtttgattgactcctttttttcccctttctttttaacctaaattaaagctgccactgcagagccccgccatggaagacacgccgttggtgatatcgaagcagaagacggaggtggtgtgcggggtccccacccaggtggtgtgtacggccttcagcagtcacatcctggtggtggtgacccagtttgggaagatgggcaccctggtctccctggagcccagcagcgtggccagtgacgtcagcaagcctgtgctcaccacaaaagtccttctggggcaggatgagcctctcatccatgtctttgcaaagaacctggtagcgtttgtgtctcaagaagctggaaacagagcagtcctcctcgccgtggccgtgaaggacaaaagcatggaggggctgaaggcgctgagggaggtgatccgggtgtgccaggtgtggtgacctggaggcagccgccccgcgctgctcagcaggacacgtgaacacccagacacccactcagggactcaagtctcacctccctccccggtggagggaggaactttggcactagcccttggagccaggaaaaaagactcgtgtctcaggcagactcttactctggttactaagatcatctgtgcatgacggggagggtggaacaggtcccggaggagtcgtgaatggttctcaccaggacctgaatcgttgcttgtgtttgagaattggaggaatgagtcagcaggcgtggctcatggcccccccgtgtgcaggatcaattgtaggaggaaatttcttttttattaaaagcgaatgtgtatcccaaaaaaaaaaaaaaaaaaaaaaaggggggcgccaaagattccggggggccatccgccccctttgcaaggggccaaagagggtaaaaaaagggcgttaaaagaggaacggcctgcctggggacccccggtgatggacccaaaccggaaaattaggaccatcgggagttgtacat

SEQ ID NO: 283696 - DNA, 610 bp, Homo sapiens
ggtacccgcgggcttccccgggcggctgcgtccccagtagcccggccggcctcggcaccgcgtgtcgtgggggtcccgggccgcggctgcagggccggggcggcggcgaggccgaggggcgggaagccactgcccggcctggcagtgtgaacgtgcaagtcgatcccctaacccagaaagccccaggcgcggtctctatgggcggccccgctcctgcttctgttttatttttttacggacagggtctcgctctaccgcccgggttgtaatgcaatggtgtgatcacggctcaccgcagcctcgacctcccgggctgaagcgatcttcccgcctcagcctcctgagtaactgggaccacaggcgcgccctgctggttttttttttttttttttttttggggtgagaaaggggggttccgcatggtgggccagggggggctcgagaactcccggtggcgctacaagaagactggggccggggctcggagccctccacaaaggtggccggggagagcagggatgagacgccacacggggctggggccccttattattgtggaaggggcgccccttgggatacccggtctaaagtgcccggggaaaattacggg

SEQ ID NO: 283697 - DNA, 910 bp, Homo sapiens
ggtacccgcgggcttccccgggcggctgcgtccccagtagcccggccggcctcggcaccgcgtgtcgtgggggtcccgggccgcggctgcagggccggggcggcggcgaggccgaggggcgggaagccactgcccggcctggcagtgtgaacgtctgccactgcagagccccgccatggaagacacgccgttggtgatatcgaagcagaagacggaggtggtgtgcggggtccccacccaggtggtgtgtacggccttcagcagtcacatcctggtggtggtgacccagtttgggaagatgggcaccctggtctccctggagcccagcagcgtggccagtgacgtcagcaagcctgtgctcaccacaaaagtccttctggggcaggatgagcctctcatccatgtctttgcaaagaacctggtagcgtttgtgtctcaagaagctggaaacagagcagtcctcctcgccgtggccgtgaaggacaaaagcatggaggggctgaaggcgctgagggaggtgatccgggtgtgccaggtgtggtgacctggaggcagccgccccgcgctgctcagcaggacacgtgaacacccagacacccactcagggactcaagtctcacctccctccccggtggagggaggaactttggcactagcccttggagccaggaaaaaagactcgtgtctcaggcagactcttactctggttactaagatcatctgtgcatgacggggagggtggaacaggtcccggaggagtcgtgaatggttctcaccaggacctgaatcgttgcttgtgtttgagaattggaggaatgagtcagcaggcgtggctcatggcccccccgtgtgcaggatcaattgtaggaggaaatttcttttttattaaaagcgaatgtgtatcccaaaa

SEQ ID NO: 283698 - DNA, 1611 bp, Homo sapiens
  misc_feature (1527)..(1528): n is a, c, g, or t
ggtacccgcgggcttccccgggcggctgcgtccccagtagcccggccggcctcggcaccgcgtgtcgtgggggtcccgggccgcggctgcagggccggggcggcggcgaggccgaggggcgggaagccactgcccggcctggcagtgtgaacgtgcaagtcgatcccctaacccagaaagccccaggcgcggtctctatgggcggccccgctcctgcttctgttttatttttttacggacagggtctcgctctaccgcccgggttgtaatgcaatggtgtgatcacggctcaccgcagcctcgacctcccgggctgaagcgatcttcccgcctcagcctcctgagtaactgggaccacaggcgcgccctgctggttttttttttttttttttttggtagagatgggggtctcgctatgttggccaggctggtctcgaattcctggcctcaacgatcgtcctgtctcggcctcccaaagtgccgggatgacaggcatgagccaccgcgcctggccccttcttttgaatgggcctccttgcgtttccgtttcaatgccccgtgctacttttttgggagccccaaggctgtactgtttgattgactcctttttttcccctttctttttaacctaaattaaagctgccactgcagagccccgccatggaagacacgccgttggtgatatcgaagcagaagacggaggtggtgtgcggggtccccacccaggtggtgtgtacggccttcagcagtcacatcctggtggtggtgacccagtttgggaagatgggcaccctggtctccctggagcccagcagcgtggccagtgacgtcagcaagcctgtgctcaccacaaaagtccttctggggcaggatgagcctctcatccatgtctttgcaaagaacctggtagcgtttgtgtctcaagaagctggaaacagagcagtcctcctcgccgtggccgtgaaggacaaaagcatggaggggctgaaggcgctgagggaggtgatccgggtgtgccaggtgtggtgacctggaggcagccgccccgcgctgctcagcaggacacgtgaacacccagacacccactcagggactcaagtctcacctccctccccggtggagggaggaactttggcactagcccttggagccaggaaaaaagactcgtgtctcaggcagactcttactctggttactaagatcatctgtgcatgacggggagggtggaacaggtcccggaggagtcgtgaatggttctcaccaggacctgaatcgttgcttgtgtttgagaattggaggaatgagtcagcaggcgtggctcatggcccccccgtgtgcaggatcaattgtaggaggaaatttcttttttattaaaagcgaatgtgtatcccaaaaaaaaaaaaccggggcccttttcgggcggggaaaggggttgatggcatggttccgttctgccgtttttgcagggggaatgccgcccttggggcgtatcagaccagtggttgtcacgagaccaagacccagaanntaaaacacaaagcgagcaaaaagcaaacacaaaccacaaaaaacagacaacaagcaacacaacagaacaaagcacatatcagc

SEQ ID NO: 283699 - DNA, 2629 bp, Homo sapiens
  misc_feature (2533)..(2533): n is a, c, g, or t
ccaaagctcccaccaaagttcaacacgcccccaaagccagcgcctgattggcccgccctgcccacaagctgaggcagcctcaccttctgattggctgttatgctccctgttcggtgctggaaccctccccttctctgattggccagatgcctacctgcgctcgccccagattgggcgccagctggggcggctcgttggctcccaggggccccgctctctgattcgccgctcgggccagcccccacggcctgcacgctgaatggctgcgccgctacctatattggcctccgattgggtgcacggcgcctccccggcgtgataggtcaggaccaccgcccccctggctccccattggctgctcgaagaagcccggtctccgggtaagatggcagcggacggacagtgctcgctccccgcttcatggcggccggtgaccctcacccacgtcgaatatcctgcaggtgatctctctggccacctccttgcctacctgagcctcagccctgtatttgtcatcgtcggtttcgtgaccctcatcatatttaagcgggagctgcacacgatctccttccttgggggcctggcactgaacgagggggtcaactggctgatcaaaaacgtcatccaggagccacggccctgtggaggcccccacacagcagtgggcaccaagtacgggatgccctccagccattcccagtttatgtggttcttctccgtctattccttccttttcctgtatttaagaatgcaccaaacaaacaacgccaggttcctggacttgctgtggaggcacgtgctctccctgggactcctcgctgtggccttcctagtctcctacagcagggtctacctgctgtaccacacctggagccaggtgctctatggaggcatcgctggaggcctcatggccatcgcctggttcatcttcacccaggaggtcctcaccccgctgttccccaggatagcagcctggcctgtctccgagttcttcctaatccgagacacaagcctcattcccaacgtactctggtttgagtacacggtaacccgggcagaagccaggaacagacaacgcaagctggggacgaaactgcagtgaccagtgggtgtggctgggtccagcctccagatctggcccgcacgatgccttgcaggatggacaggatgacagacagggacgaagcagagacctctacagacccaagtcaccaagtggagcctttttttttcttattttaattttaatgaacaaggtggaccaaagggctgaaccagcccctcaaccaggaccctggggggcctgctgcctgggggccgtggccagagaccctcgctgtgctgctgccagcccctggctgggcagaaagtgccctcggcatgggcacctgggtgtggggtggaggaggagggctcgcgcctctggtctcggggccaggaattccaggtggcgtgagaagtacacactatttattttttggttttgtcagaggcaggcaggattttggagctggaagaatctgctctccggtggctgccctgtgaacagagggctcccggtcagcttcccaggcccttcgccctatgcccagagggcagactgcctctccctgggccggggtggcctgggtgccaggaggaggggagcataccccacaccctccctgccaccgttgccgttccagaacctcggtcagtgtttccctgtctgggggcagggcccagagcgagcacgcgtctggcggctgctgtcgttgtgttctaccccgtactgacccaacaccacaagggctttctctggtcccctgtccctaagacaataatcgctttctgacaaaggagcctgcacatttgggtgagcagacccaagctgtttacagctctttcttgtcctgccatccagtagcagttagtcttcatccccacgtgaacaaaatgggaaggagccgtgaggagaggagtgaggcaacaggcacccgaagtccctcgtccttccctctgtgtgctctgaatatgtccttgtccttcctgacccatctctgaccagctgggaacctgcttggggtccccctcaaacctgtgtctggggtgtgggctcacagatccctatcagcctggttcgtgggagggctcttcctaaagggacccccatctctaagtcactctgaaagggagttgtggagaggagacgcctccagactctcagaagttttgaggactgaactgggtcactcgggatctgtgttcgaatcctccccacccctttctttgtggagtttcctaacctgctgctgaagcacaatgttttggtgctttcttttctcatttgttaaaggcagtgtccaaaagccattccagatgccaagaccaggggcttatttctagggaaggtaggtcggtttccatgtttccctcccgttatttttattttttactttttgcctgagacaagccgagtatgaggtggtttgatttaagaaaaatcaatgaaattgtttactactgttttaaaataaaaccgtaaactctgaanacaacaacaccaacacatcacccaccacaactacccacttcacacccacacactcacctccaccatccactcctacacgcacacaaccatcgccaa

SEQ ID NO: 283700 - DNA, 2402 bp, Homo sapiens
ccaaagctcccaccaaagttcaacacgcccccaaagccagcgcctgattggcccgccctgcccacaagctgaggcagcctcaccttctgattggctgttatgctccctgttcggtgctggaaccctccccttctctgattggccagatgcctacctgcgctcgccccagattgggcgccagctggggcggctcgttggctcccaggggccccgctctctgattcgccgctcgggccagcccccacggcctgcacgctgaatggctgcgccgctacctatattggcctccgattgggtgcacggcgcctccccggcgtgataggtcaggaccaccgcccccctggctccccattggctgctcgaagaagcccggtctccgggtaagatggcagcggacggacagtgctcgctccccgcttcatggcggccggtgaccctcacccacgtcgaatatcctgcaggtgatctctctggccacctccttgcctacctgagcctcagccctgtatttgtcatcgtcggtttcgtgaccctcatcatatttaagcgggagctgcacacgatctccttccttgggggcctggcactgaacgagggggtcaactggctgatcaaaaacgtcatccaggagccacggccctgtggaggcccccacacagcagtgggcaccaagtacgggatgccctccagccattcccagtttatgtggttcttctccgtctattccttccttttcctgtatttaagaatgcaccaaacaaacaacgccaggttcctggacttgctgtggaggcacgtgctctccctgggactcctcgctgtggccttcctagtctcctacagcaggcctgtctccgagttcttcctaatccgagacacaagcctcattcccaacgtactctggtttgagtacacggtaacccgggcagaagccaggaacagacaacgcaagctggggacgaaactgcagtgaccagtgggtgtggctgggtccagcctccagatctggcccgcacgatgccttgcaggatggacaggatgacagacagggacgaagcagagacctctacagacccaagtcaccaagtggagcctttttttttcttattttaattttaatgaacaaggtggaccaaagggctgaaccagcccctcaaccaggaccctggggggcctgctgcctgggggccgtggccagagaccctcgctgtgctgctgccagcccctggctgggcagaaagtgccctcggcatgggcacctgggtgtggggtggaggaggagggctcgcgcctctggtctcggggccaggaattccaggtggcgtgagaagtacacactatttattttttggttttgtcagaggcaggcaggattttggagctggaagaatctgctctccggtggctgccctgtgaacagagggctcccggtcagcttcccaggcccttcgccctatgcccagagggcagactgcctctccctgggccggggtggcctgggtgccaggaggaggggagcataccccacaccctccctgccaccgttgccgttccagaacctcggtcagtgtttccctgtctgggggcagggcccagagcgagcacgcgtctggcggctgctgtcgttgtgttctaccccgtactgacccaacaccacaagggctttctctggtcccctgtccctaagacaataatcgctttctgacaaaggagcctgcacatttgggtgagcagacccaagctgtttacagctctttcttgtcctgccatccagtagcagttagtcttcatccccacgtgaacaaaatgggaaggagccgtgaggagaggagtgaggcaacaggcacccgaagtccctcgtccttccctctgtgtgctctgaatatgtccttgtccttcctgacccatctctgaccagctgggaacctgcttggggtccccctcaaacctgtgtctggggtgtgggctcacagatccctatcagcctggttcgtgggagggctcttcctaaagggacccccatctctaagtcactctgaaagggagttgtggagaggagacgcctccagactctcagaagttttgaggactgaactgggtcactcgggatctgtgttcgaatcctccccacccctttctttgtggagtttcctaacctgctgctgaagcacaatgttttggtgctttcttttctcatttgttaaaggcagtgtccaaaagccattccagatgccaagaccaggggcttatttctagggaaggtaggtcggtttccatgtttccctcccgttatttttattttttactttttgcctgagacaagccgagtatgaggtggtttgatttaagaaaaatcaatgaaattgtttactactgttttaaaataaaaccgtaaactctga

SEQ ID NO: 283701 - DNA, 2477 bp, Homo sapiens
ccaaagctcccaccaaagttcaacacgcccccaaagccagcgcctgattggcccgccctgcccacaagctgaggcagcctcaccttctgattggctgttatgctccctgttcggtgctggaaccctccccttctctgattggccagatgcctacctgcgctcgccccagattgggcgccagctggggcggctcgttggctcccaggggccccgctctctgattcgccgctcgggccagcccccacggcctgcacgctgaatggctgcgccgctacctatattggcctccgattgggtgcacggcgcctccccggcgtgataggtcaggaccaccgcccccctggctccccattggctgctcgaagaagcccggtctccgggtaagatggcagcggacggacagtgctcgctccccgcttcatggcggccggtgaccctcacccacgtcgaatatcctgcaggtgatctctctggccacctccttgcctacctgagcctcagccctgtatttgtcatcgtcggtttcgtgaccctcatcatatttaagcgggagctgcacacgatctccttccttgggggcctggcactgaacgagggggtcaactggctgatcaaaaacgtcatccaggagccacggccctgtggaggcccccacacagcagtgggcaccaagtacgggatgccctccagccattcccagtttatgtggttcttctccgtctattccttccttttcctgtatttaagaatgcaccaaacaaacaacgccaggttcctggacttgctgtggaggcacgtgctctccctgggactcctcgctgtggccttcctagtctcctacagcagggtctacctgctgtaccacacctggagccaggtgctctatggaggcatcgctggaggcctcatggccatcgcctggttcatcttcacccaggaggtcctcaccccgctgttccccaggatagcagcctggcctgtctccgagttcttcctaatccgagacacaagcctcattcccaacgtactctggtttgagtacacggtaacccgggcagaagccaggaacagacaacgcaagctggggacgaaactgcagtgaccagtgggtgtggctgggtccagcctccagatctggcccgcacgatgccttgcaggatggacaggatgacagacagggacgaagcagagacctctacagacccaagtcaccaagtggagcctttttttttcttattttaattttaatgaacaaggtggaccaaagggctgaaccagcccctcaaccaggaccctggggggcctgctgcctgggggccgtggccagagaccctcgctgtgctgctgccagcccctggctgggcagaaagtgccctcggcatgggcacctgggtgtggggtggaggaggagggctcgcgcctctggtctcggggccaggaattccaggtggcgtgagaagtacacactatttattttttggttttgtcagaggcaggcaggattttggagctggaagaatctgctctccggtggctgccctgtgaacagagggctcccggtcagcttcccaggcccttcgccctatgcccagagggcagactgcctctccctgggccggggtggcctgggtgccaggaggaggggagcataccccacaccctccctgccaccgttgccgttccagaacctcggtcagtgtttccctgtctgggggcagggcccagagcgagcacgcgtctggcggctgctgtcgttgtgttctaccccgtactgacccaacaccacaagggctttctctggtcccctgtccctaagacaataatcgctttctgacaaaggagcctgcacatttgggtgagcagacccaagctgtttacagctctttcttgtcctgccatccagtagcagttagtcttcatccccacgtgaactcgtccttccctctgtgtgctctgaatatgtccttgtccttcctgacccatctctgaccagctgggaacctgcttggggtccccctcaaacctgtgtctggggtgtgggctcacagatccctatcagcctggttcgtgggagggctcttcctaaagggacccccatctctaagtcactctgaaagggagttgtggagaggagacgcctccagactctcagaagttttgaggactgaactgggtcactcgggatctgtgttcgaatcctccccacccctttctttgtggagtttcctaacctgctgctgaagcacaatgttttggtgctttcttttctcatttgttaaaggcagtgtccaaaagccattccagatgccaagaccaggggcttatttctagggaaggtaggtcggtttccatgtttccctcccgttatttttattttttactttttgcctgagacaagccgagtatgaggtggtttgatttaagaaaaatcaatgaaattgtttactactgttttaaaataaaaccgtaaactctga

SEQ ID NO: 283702 - DNA, 1884 bp, Homo sapiens
ccaaagctcccaccaaagttcaacacgcccccaaagccagcgcctgattggcccgccctgcccacaagctgaggcagcctcaccttctgattggctgttatgctccctgttcggtgctggaaccctccccttctctgattggccagatgcctacctgcgctcgccccagattgggcgccagctggggcggctcgttggctcccaggggccccgctctctgattcgccgctcgggccagcccccacggcctgcacgctgaatggctgcgccgctacctatattggcctccgattgggtgcacggcgcctccccggcgtgataggtcaggaccaccgcccccctggctccccattggctgctcgaagaagcccggtctccgggtaagatggcagcggacggacagtgctcgctccccgcttcatggcggccggtgaccctcacccacgtcgaatatcctgcaggtgatctctctggccacctccttgcctacctgagcctcagcccttgcaggatggacaggatgacagacagggacgaagcagagacctctacagacccaagtcaccaagtggagcctttttttttcttattttaattttaatgaacaaggtggaccaaagggctgaaccagcccctcaaccaggaccctggggggcctgctgcctgggggccgtggccagagaccctcgctgtgctgctgccagcccctggctgggcagaaagtgccctcggcatgggcacctgggtgtggggtggaggaggagggctcgcgcctctggtctcggggccaggaattccaggtggcgtgagaagtacacactatttattttttggttttgtcagaggcaggcaggattttggagctggaagaatctgctctccggtggctgccctgtgaacagagggctcccggtcagcttcccaggcccttcgccctatgcccagagggcagactgcctctccctgggccggggtggcctgggtgccaggaggaggggagcataccccacaccctccctgccaccgttgccgttccagaacctcggtcagtgtttccctgtctgggggcagggcccagagcgagcacgcgtctggcggctgctgtcgttgtgttctaccccgtactgacccaacaccacaagggctttctctggtcccctgtccctaagacaataatcgctttctgacaaaggagcctgcacatttgggtgagcagacccaagctgtttacagctctttcttgtcctgccatccagtagcagttagtcttcatccccacgtgaacaaaatgggaaggagccgtgaggagaggagtgaggcaacaggcacccgaagtccctcgtccttccctctgtgtgctctgaatatgtccttgtccttcctgacccatctctgaccagctgggaacctgcttggggtccccctcaaacctgtgtctggggtgtgggctcacagatccctatcagcctggttcgtgggagggctcttcctaaagggacccccatctctaagtcactctgaaagggagttgtggagaggagacgcctccagactctcagaagttttgaggactgaactgggtcactcgggatctgtgttcgaatcctccccacccctttctttgtggagtttcctaacctgctgctgaagcacaatgttttggtgctttcttttctcatttgttaaaggcagtgtccaaaagccattccagatgccaagaccaggggcttatttctagggaaggtaggtcggtttccatgtttccctcccgttatttttattttttactttttgcctgagacaagccgagtatgaggtggtttgatttaagaaaaatcaatgaaattgtttactactgttttaaaataaaaccgtaaactctga

SEQ ID NO: 283703 - DNA, 2531 bp, Homo sapiens
ccaaagctcccaccaaagttcaacacgcccccaaagccagcgcctgattggcccgccctgcccacaagctgaggcagcctcaccttctgattggctgttatgctccctgttcggtgctggaaccctccccttctctgattggccagatgcctacctgcgctcgccccagattgggcgccagctggggcggctcgttggctcccaggggccccgctctctgattcgccgctcgggccagcccccacggcctgcacgctgaatggctgcgccgctacctatattggcctccgattgggtgcacggcgcctccccggcgtgataggtcaggaccaccgcccccctggctccccattggctgctcgaagaagcccggtctccgggtaagatggcagcggacggacagtgctcgctccccgcttcatggcggccggtgaccctcacccacgtcgaatatcctgcaggtgatctctctggccacctccttgcctacctgagcctcagccctgtatttgtcatcgtcggtttcgtgaccctcatcatatttaagcgggagctgcacacgatctccttccttgggggcctggcactgaacgagggggtcaactggctgatcaaaaacgtcatccaggagccacggccctgtggaggcccccacacagcagtgggcaccaagtacgggatgccctccagccattcccagtttatgtggttcttctccgtctattccttccttttcctgtatttaagaatgcaccaaacaaacaacgccaggttcctggacttgctgtggaggcacgtgctctccctgggactcctcgctgtggccttcctagtctcctacagcagggtctacctgctgtaccacacctggagccaggtgctctatggaggcatcgctggaggcctcatggccatcgcctggttcatcttcacccaggaggtcctcaccccgctgttccccaggatagcagcctggcctgtctccgagttcttcctaatccgagacacaagcctcattcccaacgtactctggtttgagtacacggtaacccgggcagaagccaggaacagacaacgcaagctggggacgaaactgcagtgaccagtgggtgtggctgggtccagcctccagatctggcccgcacgatgccttgcaggatggacaggatgacagacagggacgaagcagagacctctacagacccaagtcaccaagtggagcctttttttttcttattttaattttaatgaacaaggtggaccaaagggctgaaccagcccctcaaccaggaccctggggggcctgctgcctgggggccgtggccagagaccctcgctgtgctgctgccagcccctggctgggcagaaagtgccctcggcatgggcacctgggtgtggggtggaggaggagggctcgcgcctctggtctcggggccaggaattccaggtggcgtgagaagtacacactatttattttttggttttgtcagaggcaggcaggattttggagctggaagaatctgctctccggtggctgccctgtgaacagagggctcccggtcagcttcccaggcccttcgccctatgcccagagggcagactgcctctccctgggccggggtggcctgggtgccaggaggaggggagcataccccacaccctccctgccaccgttgccgttccagaacctcggtcagtgtttccctgtctgggggcagggcccagagcgagcacgcgtctggcggctgctgtcgttgtgttctaccccgtactgacccaacaccacaagggctttctctggtcccctgtccctaagacaataatcgctttctgacaaaggagcctgcacatttgggtgagcagacccaagctgtttacagctctttcttgtcctgccatccagtagcagttagtcttcatccccacgtgaacaaaatgggaaggagccgtgaggagaggagtgaggcaacaggcacccgaagtccctcgtccttccctctgtgtgctctgaatatgtccttgtccttcctgacccatctctgaccagctgggaacctgcttggggtccccctcaaacctgtgtctggggtgtgggctcacagatccctatcagcctggttcgtgggagggctcttcctaaagggacccccatctctaagtcactctgaaagggagttgtggagaggagacgcctccagactctcagaagttttgaggactgaactgggtcactcgggatctgtgttcgaatcctccccacccctttctttgtggagtttcctaacctgctgctgaagcacaatgttttggtgctttcttttctcatttgttaaaggcagtgtccaaaagccattccagatgccaagaccaggggcttatttctagggaaggtaggtcggtttccatgtttccctcccgttatttttattttttactttttgcctgagacaagccgagtatgaggtggtttgatttaagaaaaatcaatgaaattgtttactactgttttaaaataaaaccgtaaactctga

SEQ ID NO: 283704 - DNA, 2490 bp, Homo sapiens
  misc_feature (2470)..(2470): n is a, c, g, or t
ccaaagctcccaccaaagttcaacacgcccccaaagccagcgcctgattggcccgccctgcccacaagctgaggcagcctcaccttctgattggctgttatgctccctgttcggtgctggaaccctccccttctctgattggccagatgcctacctgcgctcgccccagattgggcgccagctggggcggctcgttggctcccaggggccccgctctctgattcgccgctcgggccagcccccacggcctgcacgctgaatggctgcgccgctacctatattggcctccgattgggtgcacggcgcctccccggcgtgataggtcaggaccaccgcccccctggctccccattggctgctcgaagaagcccggtctccgggtaagatggcagcggacggacagtgctcgctccccgcttcatggcggccggtgaccctcacccacgtcgaatatcctgcaggtgatctctctggccacctccttgcctacctgagcctcagccctgtatttgtcatcgtcggtttcgtgaccctcatcatatttaagcgggagctgcacacgatctccttccttgggggcctggcactgaacgagggggtcaactggctgatcaaaaacgtcatccaggagccacggccctgtggaggcccccacacagcagtgggcaccaagtacgggatgccctccagccattcccagtttatgtggttcttctccgtctattccttccttttcctgtatttaagaatgcaccaaacaaacaacgccaggttcctggacttgctgtggaggcacgtgctctccctgggactcctcgctgtggccttcctagtctcctacagcagggtctacctgctgtaccacacctggagccaggtgctctatggaggcatcgctggaggcctcatggccatcgcctggttcatcttcacccaggaggtcctcaccccgctgttccccaggatagcagcctggcctgtctccgagttcttcctaatccgagacacaagcctcattcccaacgtactctggtttgagtacacggtaacccgggcagaagccaggaacagacaacgcaagctggggacgaaactgcagtgaccagtgggtgtggctgggtccagcctccagatctggcccgcacgatgccttgcaggatggacaggatgacagacagggacgaagcagagacctctacagacccaagtcaccaagtggagcctttttttttcttattttaattttaatgaacaaggtggaccaaagggctgaaccagcccctcaaccaggaccctggggggcctgctgcctgggggccgtggccagagaccctcgctgtgctgctgccagcccctggctgggcagaaagtgccctcggcatgggcacctgggtgtggggtggaggaggagggctcgcgcctctggtctcggggccaggaattccaggtggcgtgagaagtacacactatttattttttggttttgtcagaggcaggcaggattttggagctggaagaatctgctctccggtggctgccctgtgaacagagggctcccggtcagcttcccaggcccttcgccctatgcccagagggcagactgcctctccctgggccggggtggcctgggtgccaggaggaggggagcataccccacaccctccctgccaccgttgccgttccagaacctcggtcagtgtttccctgtctgggggcagggcccagagcgagcacgcgtctggcggctgctgtcgttgtgttctaccccgtactgacccaacaccacaagggctttctctggtcccctgtccctaagacaataatcgctttctgacaaaggagcctgcacatttgggtgagcagacccaagctgtttacagctctttcttgtcctgccatccagtagcagttagtcttcatccccacgtgaacaaaatgggaaggagccgtgaggagaggagtgaggcaacaggcacccgaagtccctcgtccttccctctgtgtgctctgaatatgtccttgtccttcctgacccatctctgaccagctgggaacctgcttggggtccccctcaaacctgtgtctggggtgtgggctcacagatccctatcagcctggttcgtgggagggctcttcctaaagggacccccatctctaagtcactctgaaagggagttgtggagaggagacgcctccagactctcagaagttttgaggactgaactgggtcactcgggatctgtgttcgaatcctccccacccctttctttgtggagtttcctaacctgctgctgaagcacaatgttttggtgctttcttttctcatttgttaaaggcagtgtccaaaagccattccagatgccaagaccaggggcttatttctagggaaggtaggtcggtttccatgtttccctcccgttatttttattttttactttttgcctgagacaagccgagtctgaagcagtcnggaggtaccgagctctatcc

SEQ ID NO: 283705 - DNA, 1734 bp, Homo sapiens
catcctggtccctacccctgctccaatcccctggctccacttctgggattgcagactgagataactgaggtacaggcctcgcggggagatcagccctgtctaggtgccattcccagggcaggtgctctgattggcccagttcaggtcaatcgctggctactgggtgtgggcatttgcctacttagttgggactacgggtggggtggggacagctgtaggtcactgaacaccagatgtctccacatctgacccccatcctgttttgcaggaacagacaacgcaagctggggacgaaactgcagtgaccagtgggtgtggctgggtccagcctccagatctggcccgcacgatgccttgcaggatggacaggatgacagacagggacgaagcagagacctctacagacccaagtcaccaagtggagcctttttttttcttattttaattttaatgaacaaggtggaccaaagggctgaaccagcccctcaaccaggaccctggggggcctgctgcctgggggccgtggccagagaccctcgctgtgctgctgccagcccctggctgggcagaaagtgccctcggcatgggcacctgggtgtggggtggaggaggagggctcgcgcctctggtctcggggccaggaattccaggtggcgtgagaagtacacactatttattttttggttttgtcagaggcaggcaggattttggagctggaagaatctgctctccggtggctgccctgtgaacagagggctcccggtcagcttcccaggcccttcgccctatgcccagagggcagactgcctctccctgggccggggtggcctgggtgccaggaggaggggagcataccccacaccctccctgccaccgttgccgttccagaacctcggtcagtgtttccctgtctgggggcagggcccagagcgagcacgcgtctggcggctgctgtcgttgtgttctaccccgtactgacccaacaccacaagggctttctctggtcccctgtccctaagacaataatcgctttctgacaaaggagcctgcacatttgggtgagcagacccaagctgtttacagctctttcttgtcctgccatccagtagcagttagtcttcatccccacgtgaacaaaatgggaaggagccgtgaggagaggagtgaggcaacaggcacccgaagtccctcgtccttccctctgtgtgctctgaatatgtccttgtccttcctgacccatctctgaccagctgggaacctgcttggggtccccctcaaacctgtgtctggggtgtgggctcacagatccctatcagcctggttcgtgggagggctcttcctaaagggacccccatctctaagtcactctgaaagggagttgtggagaggagacgcctccagactctcagaagttttgaggactgaactgggtcactcgggatctgtgttcgaatcctccccacccctttctttgtggagtttcctaacctgctgctgaagcacaatgttttggtgctttcttttctcatttgttaaaggcagtgtccaaaagccattccagatgccaagaccaggggcttatttctagggaaggtaggtcggtttccatgtttccctcccgttatttttattttttactttttgcctgagacaagccgagtatgaggtggtttgatttaagaaaaatcaatgaaattgtttactactgttttaaaataaaaccgtaaactctga

SEQ ID NO: 283706 - DNA, 540 bp, Homo sapiens
gtggggaataccattagctgttgatagcgggccatgtatccgaggaaagcctgagctacaaggcaaaggcatcccatctggaacaaaatcagaaagctattggcaaaggtaatcaatcaggccataaatagccatttacccgcttccttttcggggctggaggtgggccgggagccctccaagggtgagctgggcaacttgtagagcaaggaatatgccctccgctgccggcgccccggccgcttttgtctgggctcccagccgggcttccgaggctttgtaccatggatttgggagtgacaatgggcatttccctcagattcaaggctgctcaacctcacctctgtagggggaaaaaaatcagaagggagtgtcccaaggacctagccattcggccgaattttttagacattttgggagtctcctccgaggcctttaagtgcgaaccgcgcgaagcggccctgcccggggagactcgctgaggcagggctgaggcggcgggcgggagcaagctgctctagcatttgggttctgccctgt

SEQ ID NO: 283707 - DNA, 3149 bp, Homo sapiens
gtggggaataccattagctgttgatagcgggccatgtatccgaggaaagcctgagctacaaggcaaaggcatcccatctggaacaaaatcagaaagctattggcaaaggtaatcaatcaggccataaatagccatttacccgcttccttttcggggctggaggtgggccgggagccctccaagggtgagctgggcaacttgtagagcaaggaatatgccctccgctgccggcgccccggccgcttttgtctgggctcccagccgggcttccgaggctttgtaccatggatttgggagtgacaatgggcatttccctcagattcaaggctgctcaacctcacctctgtagggggaaaaaaatcagaagggagtgtcccaaggacccagcctcacgtcggggtgtgtgtggccgcgcgggcgtgtgtgagtgtggcagggggagggggccctccgatctgctccatccgtccgttttattagggacacattaatctataatcaaatacacctcataaaatttttattgaaaggcataatatcattacagaggtcttccacctgttttaaacaacacgacaagctgtgagcaagcgtgtgtgtggggatgtgtggggaggggtgggtgtgagtagggagagaggcgaggggagaacagctcccctcgggcgctaggggccgccccgagggcccgcctgcctcgggcgacaccggcctggcgcccccgcggccgctccgtgtgccctggacgcgccgcccgcggctcggaagctggagagtcagcgacggggcccgactgcgggaccgagggctgcaagaagaagcgaacaaatagtccccagcgcctcctctggatgcggtcgcgtctgtggtcctggcagccgctgggcgggccaggccaggtcgggccgggccgagccgggcacatggacctgggcctgcgggctctaattgcggcgcttatgttgatgattttttttttaatcacagcagcccccagtttagcggactgatttactcccggtattggtaaatatgatcacgtgggccgcgcgaccaatggtggaggctgcagcctgcgaactagtcggtggctcgggcgccggcggggagctgctcggcggcggacagtgtaatgttgggtgggagtgcgggacgcctcaaaatgtcttccagtggcaccctcagcaactactacgtggactcgcttataggccatgagggcgacgaggtgttcgcggcgcgcttcgggccgccggggccaggcgcgcagggccggcctgcaggtgtggctgatggcccggccgccaccgccgccgagttcgcctcgtgtagttttgcccccagatcggccgtgttctctgcctcgtggtccgcggtgccctcccagcccccggcagcggcggcgatgagcggcctctaccacccgtacgttcccccgccgcccctggccgcctctgcctccgagcccggccgctacgtgcgctcctggatggagccgctgcccggcttcccgggcggtgcgggcggtggcggtggtggtggaggcggcggtccgggccgcggtcccagccctggccccagcggcccagccaacgggcgccactacgggattaagcctgaaacccgagcggccccggcccccgccacggccgcctccaccacctcctcctcctccacttccttatcctcctcctccaaacggactgagtgctccgtggcccgggagtcccaggggagcagcggccccgagttctcgtgcaactcgttcctgcaggagaaggcggcaggcggcgacggggggaaccgggcctggggcagggatcggggccgcgactgggacgggcggctcgtcggagccctcagcttgcagcgaccacccgatcccaggctgttcgctgaaggaggaggagaagcagcattcgcagccgcagcagcagcaacttgacccaaacaaccccgaagcgaactggatccacgctcgctccacccggaaaaagcgctgtccctacaccaaataccagacgcttgagctggagaaagaattcctcttcaacatgtacctcacccgggaccggcgctacgaggtggccaggattctcaacctaacagagagacaggtcaaaatctggtttcagaaccgtaggatgaaaatgaaaaagatgagcaaggagaaatgccccaaaggagactgacccggcgcggtgctggcgggagcgctcaagggcagcggatttgttgttgttgctgttttcctttgtgggtgtttggtgcttgatttccagaaactctccagcgacttggacttcttcttttttttttttttctttttagatagaagtgactgtgtggttggtctctgaggtatttgggggactctgtatttgctcgtttacgtgttggaaaaaccaagtggctttggggtttcgccctatcccactccctctctttcctgctccattggttccttaagaaatgctatattttgtgagtgcaagctggcttggggagccctctcttgtgtaaatgtcccccatgtttctgaaaagtgctgtagtttagtcccctcacccccagcactgcccaaacaggggccaagtgcgccccaattccaagaatgaaggcagagcgacaacagtgcggacaccccggctgctagcccacggtgaagcccggcggggttgcccaccagttgcgaaagccccctttcctcagggagcacgcgggacctcggtggagatctccagtgaggcttagaggagcccagggcctcgggcgggttggggtttgtcctcagtgcattggacgcgctgctctctcccctgaaggctgggctcgcgtgggcggccgcgggtggtggccctcccggttcctgcccgaggaccagttgtaaatgttactgcttcctactaataaatgctgacctgatcaaatggagcccagacgctggccctaaacattgtgtgcctgctttctctgcctctctgcaaaatatcacactcaggatatttctcctctacccctgggagtgagacattgttaaaaattcagggcccttccacctgacagatctctctgatgtgtctctgccttctctgcctcacatccctttgtgtaggcagatgcagcagcacagaccctgtggggggaca

SEQ ID NO: 283708 - DNA, 2821 bp, Homo sapiens
ctttccagcatcatcggagaagacgaagcaccctggccgccactgtccgtgctgcgccaactcgcccggccgcccgcccttccgagggcaggcagaagcccctctgtgtcctccaccgccgcgccccggctcgcccctcgggccgcggcgtgtgcccagcctcacgtcggggtgtgtgtggccgcgcgggcgtgtgtgagtgtggcagggggagggggccctccgatctgctccatccgtccgttttattagggacacattaatctataatcaaatacacctcataaaatttttattgaaaggcataatatcattacagaggtcttccacctgttttaaacaacacgacaagctgtgagcaagcgtgtgtgtggggatgtgtggggaggggtgggtgtgagtagggagagaggcgaggggagaacagctcccctcgggcgctaggggccgccccgagggcccgcctgcctcgggcgacaccggcctggcgcccccgcggccgctccgtgtgccctggacgcgccgcccgcggctcggaagctggagagtcagcgacggggcccgactgcgggaccgagggctgcaagaagaagcgaacaaatagtccccagcgcctcctctggatgcggtcgcgtctgtggtcctggcagccgctgggcgggccaggccaggtcgggccgggccgagccgggcacatggacctgggcctgcgggctctaattgcggcgcttatgttgatgattttttttttaatcacagcagcccccagtttagcggactgatttactcccggtattggtaaatatgatcacgtgggccgcgcgaccaatggtggaggctgcagcctgcgaactagtcggtggctcgggcgccggcggggagctgctcggcggcggacagtgtaatgttgggtgggagtgcgggacgcctcaaaatgtcttccagtggcaccctcagcaactactacgtggactcgcttataggccatgagggcgacgaggtgttcgcggcgcgcttcgggccgccggggccaggcgcgcagggccggcctgcaggtgtggctgatggcccggccgccaccgccgccgagttcgcctcgtgtagttttgcccccagatcggccgtgttctctgcctcgtggtccgcggtgccctcccagcccccggcagcggcggcgatgagcggcctctaccacccgtacgttcccccgccgcccctggccgcctctgcctccgagcccggccgctacgtgcgctcctggatggagccgctgcccggcttcccgggcggtgcgggcggtggcggtggtggtggaggcggcggtccgggccgcggtcccagccctggccccagcggcccagccaacgggcgccactacgggattaagcctgaaacccgagcggccccggcccccgccacggccgcctccaccacctcctcctcctccacttccttatcctcctcctccaaacggactgagtgctccgtggcccgggagtcccaggggagcagcggccccgagttctcgtgcaactcgttcctgcaggagaaggcggcaggcggcgacggggggaaccgggcctggggcagggatcggggccgcgactgggacgggcggctcgtcggagccctcagcttgcagcgaccacccgatcccaggctgttcgctgaaggaggaggagaagcagcattcgcagccgcagcagcagcaacttgacccaaacaaccccgaagcgaactggatccacgctcgctccacccggaaaaagcgctgtccctacaccaaataccagacgcttgagctggagaaagaattcctcttcaacatgtacctcacccgggaccggcgctacgaggtggccaggattctcaacctaacagagagacaggtcaaaatctggtttcagaaccgtaggatgaaaatgaaaaagatgagcaaggagaaatgccccaaaggagactgacccggcgcggtgctggcgggagcgctcaagggcagcggatttgttgttgttgctgttttcctttgtgggtgtttggtgcttgatttccagaaactctccagcgacttggacttcttcttttttttttttttctttttagatagaagtgactgtgtggttggtctctgaggtatttgggggactctgtatttgctcgtttacgtgttggaaaaaccaagtggctttggggtttcgccctatcccactccctctctttcctgctccattggttccttaagaaatgctatattttgtgagtgcaagctggcttggggagccctctcttgtgtaaatgtcccccatgtttctgaaaagtgctgtagtttagtcccctcacccccagcactgcccaaacaggggccaagtgcgccccaattccaagaatgaaggcagagcgacaacagtgcggacaccccggcttagaggagcccagggcctcgggcgggttggggtttgtcctcagtgcattggacgcgctgctctctcccctgaaggctgggctcgcgtgggcggccgcgggtggtggccctcccggttcctgcccgaggaccagttgtaaatgttactgcttcctactaataaatgctgacctgatcaaatggagcccagacgctggccctaaacattgtgtgcctgctttctctgcctctctgcaaaatatcacactcaggatatttctcctctacccctgggagtgagacattgttaaaaattcagggcccttccacctgacagatctctctgatgtgtctctgccttctctgcctcacatccctttgtgtaggcagatgcagcagcacagaccctgtggggggaca

SEQ ID NO: 283709 - DNA, 1451 bp, Homo sapiens
ctttccagcatcatcggagaagacgaagcaccctggccgccactgtccgtgctgcgccaactcgcccggccgcccgcccttccgagggcaggcagaagcccctctgtgtcctccaccgccgcgccccggctcgcccctcgggccgcggcgtgtgcccagcctcacgtcggggtgtgtgtggccgcgcgggcgtgtgtgagtgtggcagggggagggggccctccgatctgctccatccgtccgttttattagggacacattaatctataatcaaatacacctcataaaatttttattgaaaggcataatatcattacagaggtcttccacctgttttaaacaacacgacaagctgtgagcaagcgtgtgtgtggggatgtgtggggaggggtgggtgtgagtagggagagaggcgaggggagaacagctcccctcgggcgctaggggccgccccgagggcccgcctgcctcgggcgacaccggcctggcgcccccgcggccgctccgtgtgccctggacgcgccgcccgcggctcggaagctggagagtcagcgacggggcccgactgcgggaccgagggctgcaagaagaagcgaacaaatagtccccagcgcctcctctggatgcggtcgcgtctgtggtcctggcagccgctgggcgggccaggccaggtcgggccgggccgagccgggcacatggacctgggcctgcgggctctaattgcggcgcttatgttgatgattttttttttaatcacagcagcccccagtttagcggactgatttactcccggtattggtaaatatgatcacgtgggccgcgcgaccaatggtggaggctgcagcctgcgaactagtcggtggctcgggcgccggcggggagctgctcggcggcggacagtgtaatgttgggtgggagtgcgggacgcctcaaaatgtcttccagtggcaccctcagcaactactacgtggactcgcttataggccatgagggcgacgaggtgttcgcggcgcgcttcgggccgccggggccaggcgcgcagggccggcctgcaggtgtggctgatggcccggccgccaccgccgccgagttcgcctcgtgtagttttgcccccagatcggccgtgttctctgcctccgtgggcggccgcgggtggtggccctcccggttcctgcccgaggaccagttgtaaatgttactgcttcctactaataaatgctgacctgatcaaatggagcccagacgctggccctaaacattgtgtgcctgctttctctgcctctctgcaaaatatcacactcaggatatttctcctctacccctgggagtgagacattgttaaaaattcagggcccttccacctgacagatctctctgatgtgtctctgccttctctgcctcacatccctttgtgtaggcagatgcagcagcacagaccctgtggggggaca

SEQ ID NO: 283710 - DNA, 2921 bp, Homo sapiens
ctttccagcatcatcggagaagacgaagcaccctggccgccactgtccgtgctgcgccaactcgcccggccgcccgcccttccgagggcaggcagaagcccctctgtgtcctccaccgccgcgccccggctcgcccctcgggccgcggcgtgtgcccagcctcacgtcggggtgtgtgtggccgcgcgggcgtgtgtgagtgtggcagggggagggggccctccgatctgctccatccgtccgttttattagggacacattaatctataatcaaatacacctcataaaatttttattgaaaggcataatatcattacagaggtcttccacctgttttaaacaacacgacaagctgtgagcaagcgtgtgtgtggggatgtgtggggaggggtgggtgtgagtagggagagaggcgaggggagaacagctcccctcgggcgctaggggccgccccgagggcccgcctgcctcgggcgacaccggcctggcgcccccgcggccgctccgtgtgccctggacgcgccgcccgcggctcggaagctggagagtcagcgacggggcccgactgcgggaccgagggctgcaagaagaagcgaacaaatagtccccagcgcctcctctggatgcggtcgcgtctgtggtcctggcagccgctgggcgggccaggccaggtcgggccgggccgagccgggcacatggacctgggcctgcgggctctaattgcggcgcttatgttgatgattttttttttaatcacagcagcccccagtttagcggactgatttactcccggtattggtaaatatgatcacgtgggccgcgcgaccaatggtggaggctgcagcctgcgaactagtcggtggctcgggcgccggcggggagctgctcggcggcggacagtgtaatgttgggtgggagtgcgggacgcctcaaaatgtcttccagtggcaccctcagcaactactacgtggactcgcttataggccatgagggcgacgaggtgttcgcggcgcgcttcgggccgccggggccaggcgcgcagggccggcctgcaggtgtggctgatggcccggccgccaccgccgccgagttcgcctcgtgtagttttgcccccagatcggccgtgttctctgcctcgtggtccgcggtgccctcccagcccccggcagcggcggcgatgagcggcctctaccacccgtacgttcccccgccgcccctggccgcctctgcctccgagcccggccgctacgtgcgctcctggatggagccgctgcccggcttcccgggcggtgcgggcggtggcggtggtggtggaggcggcggtccgggccgcggtcccagccctggccccagcggcccagccaacgggcgccactacgggattaagcctgaaacccgagcggccccggcccccgccacggccgcctccaccacctcctcctcctccacttccttatcctcctcctccaaacggactgagtgctccgtggcccgggagtcccaggggagcagcggccccgagttctcgtgcaactcgttcctgcaggagaaggcggcaggcggcgacggggggaaccgggcctggggcagggatcggggccgcgactgggacgggcggctcgtcggagccctcagcttgcagcgaccacccgatcccaggctgttcgctgaaggaggaggagaagcagcattcgcagccgcagcagcagcaacttgacccaaacaaccccgaagcgaactggatccacgctcgctccacccggaaaaagcgctgtccctacaccaaataccagacgcttgagctggagaaagaattcctcttcaacatgtacctcacccgggaccggcgctacgaggtggccaggattctcaacctaacagagagacaggtcaaaatctggtttcagaaccgtaggatgaaaatgaaaaagatgagcaaggagaaatgccccaaaggagactgacccggcgcggtgctggcgggagcgctcaagggcagcggatttgttgttgttgctgttttcctttgtgggtgtttggtgcttgatttccagaaactctccagcgacttggacttcttcttttttttttttttctttttagatagaagtgactgtgtggttggtctctgaggtatttgggggactctgtatttgctcgtttacgtgttggaaaaaccaagtggctttggggtttcgccctatcccactccctctctttcctgctccattggttccttaagaaatgctatattttgtgagtgcaagctggcttggggagccctctcttgtgtaaatgtcccccatgtttctgaaaagtgctgtagtttagtcccctcacccccagcactgcccaaacaggggccaagtgcgccccaattccaagaatgaaggcagagcgacaacagtgcggacaccccggctgctagcccacggtgaagcccggcggggttgcccaccagttgcgaaagccccctttcctcagggagcacgcgggacctcggtggagatctccagtgaggcttagaggagcccagggcctcgggcgggttggggtttgtcctcagtgcattggacgcgctgctctctcccctgaaggctgggctcgcgtgggcggccgcgggtggtggccctcccggttcctgcccgaggaccagttgtaaatgttactgcttcctactaataaatgctgacctgatcaaatggagcccagacgctggccctaaacattgtgtgcctgctttctctgcctctctgcaaaatatcacactcaggatatttctcctctacccctgggagtgagacattgttaaaaattcagggcccttccacctgacagatctctctgatgtgtctctgccttctctgcctcacatccctttgtgtaggcagatgcagcagcacagaccctgtggggggaca

SEQ ID NO: 283711 - DNA, 2896 bp, Homo sapiens
ctttccagcatcatcggagaagacgaagcaccctggccgccactgtccgtgctgcgccaactcgcccggccgcccgcccttccgagggcaggcagaagcccctctgtgtcctccaccgccgcgccccggctcgcccctcgggccgcggcgtgtgcccagcctcacgtcggggtgtgtgtggccgcgcgggcgtgtgtgagtgtggcagggggagggggccctccgatctgctccatccgtccgttttattagggacacattaatctataatcaaatacacctcataaaatttttattgaaaggcataatatcattacagaggtcttccacctgttttaaacaacacgacaagctgtgagcaagcgtgtgtgtggggatgtgtggggaggggtgggtgtgagtagggagagaggcgaggggagaacagctcccctcgggcgctaggggccgccccgagggcccgcctgcctcgggcgacaccggcctggcgcccccgcggccgctccgtgtgccctggacgcgccgcccgcggctcggaagctggagagtcagcgacggggcccgactgcgggaccgagggctgcaagaagaagcgaacaaatagtccccagcgcctcctctggatgcggtcgcgtctgtggtcctggcagccgctgggcgggccaggccaggtcgggccgggccgagccgggcacatggacctgggcctgcgggctctaattgcggcgcttatgttgatgattttttttttaatcacagcagcccccagtttagcggactgatttactcccggtattggtaaatatgatcacgtgggccgcgcgaccaatggtggaggctgcagcctgcgaactagtcggtggctcgggcgccggcggggagctgctcggcggcggacagtgtaatgttgggtgggagtgcgggacgcctcaaaatgtcttccagtggcaccctcagcaactactacgtggactcgcttataggccatgagggcgacgaggtgttcgcggcgcgcttcgggccgccggggccaggcgcgcagggccggcctgcaggtgtggctgatggcccggccgccaccgccgccgagttcgcctcgtgtagttttgcccccagatcggccgtgttctctgcctcgtggtccgcggtgccctcccagcccccggcagcggcggcgatgagcggcctctaccacccgtacgttcccccgccgcccctggccgcctctgcctccgagcccggccgctacgtgcgctcctggatggagccgctgcccggcttcccgggcggtgcgggcggtggcggtggtggtggaggcggcggtccgggccgcggtcccagccctggccccagcggcccagccaacgggcgccactacgggattaagcctgaaacccgagcggccccggcccccgccacggccgcctccaccacctcctcctcctccacttccttatcctcctcctccaaacggactgagtgctccgtggcccgggagtcccaggggagcagcggccccgagttctcgtgcaactcgttcctgcaggagaaggcggcaggcggcgacggggggaaccgggcctggggcagggatcggggccgcgactgggacgggcggctcgtcggagccctcagcttgcagcgaccacccgatcccaggctgttcgctgaaggaggaggagaagcagcattcgcagccgcagcagcagcaacttgacccaaacaaccccgaagcgaactggatccacgctcgctccacccggaaaaagcgctgtccctacaccaaataccagacgcttgagctggagaaagaattcctcttcaacatgtacctcacccgggaccggcgctacgaggtggccaggattctcaacctaacagagagacaggtcaaaatctggtttcagaaccgtaggatgaaaatgaaaaagatgagcaaggagaaatgccccaaaggagactgacccggcgcggtgctggcgggagcgctcaagggcagcggatttgttgttgttgctgttttcctttgtgggtgtttggtgcttgatttccagaaactctccagcgacttggacttcttcttttttttttttttctttttagatagaagtgactgtgtggttggtctctgaggtatttgggggactctgtatttgctcgtttacgtgttggaaaaaccaagtggctttggggtttcgccctatcccactccctctctttcctgctccattggttccttaagaaatgctatattttgtgagtgcaagctggcttggggagccctctcttgtgtaaatgtcccccatgtttctgaaaagtgctgtagtttagtcccctcacccccagcactgcccaaacaggggccaagtgcagcgacaacagtgcggacaccccggctgctagcccacggtgaagcccggcggggttgcccaccagttgcgaaagccccctttcctcagggagcacgcgggacctcggtggagatctccagtgaggcttagaggagcccagggcctcgggcgggttggggtttgtcctcagtgcattggacgcgctgctctctcccctgaaggctgggctcgcgtgggcggccgcgggtggtggccctcccggttcctgcccgaggaccagttgtaaatgttactgcttcctactaataaatgctgacctgatcaaatggagcccagacgctggccctaaacattgtgtgcctgctttctctgcctctctgcaaaatatcacactcaggatatttctcctctacccctgggagtgagacattgttaaaaattcagggcccttccacctgacagatctctctgatgtgtctctgccttctctgcctcacatccctttgtgtaggcagatgcagcagcacagaccctgtggggggaca

SEQ ID NO: 283712 - DNA, 3636 bp, Homo sapiens
accggctgactcggggcgccggtagcgtcgcttcctgctagtgaacgcccggggcgtaccggagcctctgattacaccgaccatcctcccaccctctccaactacacctctgggaccgcgactgcgcagggaggagccggccgaaccatggaccgcggtgtgggctaagctggtggccccggctttagactggaccccacaatgtttgcagagatgttcaggcacgcgggagctgattacacacaatgaatgggggcaatgagagcagtggagcagacagagctgggggccctgtggccacatctgtccccatcggctggcagcgctgtgtgcgagagggtgctgtgctctacatcagtccaagtggcacagagctgtcttccttggagcaaacccggagctacctcctcagcgatgggacctgcaagtgcggtctggagtgtccacttaatgtccccaaggttttcaactttgaccctttggccccggtgaccccgggtggggctggggtggggccagcatcagaggaggacatgaccaagctgtgcaaccaccggcggaaagctgttgctatggcaactctgtaccgcagcatggagaccacctgctcacactcttctcctggagagggagcgagcccccaaatgttccacactgtgtccccagggcccccctctgcccgccctccctgtcgagttcctcctacaactccacttaatgggggtcctggctcccttcccccagaaccaccctcagtttcccaggcctttcccactctagcaggccctggggggcttttccccccaaggcttgctgacccagtcccttctgggggcagtagcagcccccgtttcctcccaaggggcaatgccccctctccagccccacctcctccacctgctatcagcctcaatgctccctcatacaactggggagctgccctcagatccagcctggtgccctctgacctgggctctcctccggcccctcatgcctcctcctcaccaccttcagaccctcctctcttccactgtagtgatgccttaacaccccctcccctgcccccgagcaataatctccccgcccaccctggtcctgcctctcagccaccagtgtcttcagccactatgcacctgcccctggtcctggggcccctgggaggggcccccacggtggaggggcctggggcaccccccttccttgctagcagcctactctctgcagcggccaaggcacagcatcccccactaccccctcccagcactttacagggccgaaggccccgtgcccaggcaccctcagcttcccactcctcatcacttcgtccctctcagcgtcgtccccgcagaccccctactgtatttcgattgctagaagggagaggccctcaaacccctagacggagccgtcctcgggcccctgctcctgtcccccaacccttttctctcccggagccatcccaaccaattctcccttctgtgctgtccctgctgggactccccacccctggcccttcccactctgatggaagctttaaccttttggggtcagatgcacaccttcctcctcccccaaccctctcctcagggagccctccccagcccaggcaccccatccagccctccctgcctgggaccaccagtggcagcctcagcagtgtgccaggtgcccctgccccaccagctgcctccaaagccccagtagtccccagccctgtgcttcaaagcccatccgaaggactggggatgggggcaggcccggcctgccctctgcctcccctggctggtggagaggctttccctttccccagccctgagcagggcctggcactgagtggagctggcttccctgggatgcttggggccttgcctctccctctgagtctggggcagcctccaccttctccattgctcaaccacagtttatttggtgtgctgactgggggaggaggacaacctccccctgagcccctgctacccccaccaggaggacctggtcctcccctagccccaggagagcctgaagggccttcgcttttggtggcttccttgcttcctccaccaccctcagaccttcttccacctccttcagcacctcccagcaacctccttgcctctttcctgcccctgttggctctgggccccacagctggggatggggagggatctgcagagggagccgggggtccaagtggggagccattttcaggcttgggagacctgtcccccctacttttccccccactttcagccccccctaccctcatagctttaaattctgcgctgctggctgccaccctggatcccccctcggggacacccccccagccctgtgtcctgagtgccccccaacctggaccacctacctccagtgtcaccacggcaactactgacccgggggcctcctctctgggcaaggccccctccaactcagggagacccccccaactccttagccctctgctgggtgccagcctgctgggtgacctgtcttcactgaccagcagccctggagccctccccagcctgttgcagcctcctggccctcttctctctggccagttggggctgcagctcctccctggggggggagctcctccacccctctcagaggcttctagtcccctagcctgcctgctacagagtctccagatccctccagagcagccagaagccccctgtctaccccccgagagccctgcctcagccctcgaaccagagcctgccaggcctcccctcagtgccttagccccaccccatggttctcccgaccccccagtccctgagctgctcactgggagggggtcagggaaacggggccggaggggaggagggggacttaggggcattaatggtgaggccaggccagcccggggccgaaagcctggcagccggcgggagcctggccgactggccctcaaatgggggacacgtggtggcttcaatggacaaatggaaaggtccccaagaagaacccaccattggcagcataatggggagctggctgaagggggtgctgagcccaaggatccaccccctcccgggccccattctgaggaccttaaggtgcccccgggagtagtcagaaagtctcgtcgtggccgtaggagaaaatacaaccctacccggaacagcaatagctcccgccaggacattaccttggaacccagccctacagcccgagcagctgtccctctgcctccccgggcccgccctggccgtcctgccaaaaacaagaggaggaaactggccccatagcagccatacctggagctggatctgaccctgattggggagagctgagtgctgagccttgggagcccctgccagccacctgcacctgtggacagtggccaacaggctcagtttacaaacctgtgagctactgttggctgctgccctccttcccagtgaaagagacgttgtgatgatgcgactgaggattatgcaacgtggtccaaccggagcggccagcatgaccagctgtccaggggctgcctcctgccttttcttttgtaaagacaagacccttgggagttttaattctgttttgtacttgccctgtggggcctccactgcttttctatgggagacactcttaatttaacagatgagaatattttgaaactctggcaaa

SEQ ID NO: 283713 - DNA, 3572 bp, Homo sapiens
accggctgactcggggcgccggtagcgtcgcttcctgctagtgaacgcccggggcgtaccggagcctctgattacaccgaccatcctcccaccctctccaactacacctctgggaccgcgactgcgcagggaggagccggccgaaccatggaccgcggtgtgggctaagctggtggccccggctttagactggaccccacaatgtttgcagagatgttcaggcacgcgggagctgattacacacaatgaatgggggcaatgagagcagtggagcagacagagctgggggccctgtggccacatctgtccccatcggctggcagcgctgtgtgcgagagggtgctgtgctctacatcagtccaagtggcacagagctgtcttccttggagcaaacccggagctacctcctcagcgatgggacctgcaagtgcggtctggagtgtccacttaatgtccccaaggttttcaactttgaccctttggccccggtgaccccgggtggggctggggtggggccagcatcagaggaggacatgaccaagctgtgcaaccaccggcggaaagctgttgctatggcaactctgtaccgcagcatggagaccacctgctcacactcttctcctggagagggagcgagcccccaaatgttccacactgtgtccccagggcccccctctgcccgccctccctgtcgagttcctcctacaactccacttaatgggggtcctggctcccttcccccagaaccaccctcagtttcccaggcctttcccactctagcaggccctggggggcttttccccccaaggcttgctgacccagtcccttctgggggcagtagcagcccccgtttcctcccaaggggcaatgccccctctccagccccacctcctccacctgctatcagcctcaatgctccctcatacaactggggagctgccctcagatccagcctggtgccctctgacctgggctctcctccggcccctcatgcctcctcctcaccaccttcagaccctcctctcttccactgtagtgatgccttaacaccccctcccctgcccccgagcaataatctccccgcccaccctggtcctgcctctcagccaccagtgtcttcagccactatgcacctgcccctggtcctggggcccctgggaggggcccccacggtggaggggcctggggcaccccccttccttgctagcagcctactctctgcagcggccaaggcacagcatcccccactaccccctcccagcactttacagggccgaaggccccgtgcccaggcaccctcagcttcccactcctcatcacttcgtccctctcagcgtcgtccccgcagaccccctactgtatttcgattgctagaagggagaggccctcaaacccctagacggagccgtcctcgggcccctgctcctgtcccccaacccttttctctcccggagccatcccaaccaattctcccttctgtgctgtccctgctgggactccccacccctggcccttcccactctgatggaagctttaaccttttggggtcagatgcacaccttcctcctcccccaaccctctcctcagggagccctccccagcccaggcaccccatccagccctccctgcctgggaccaccagtggcagcctcagcagtgtgccaggtgcccctgccccaccagctgcctccaaagccccagtagtccccagccctgtgcttcaaagcccatccgaaggactggggatgggggcaggcccggcctgccctctgcctcccctggctggtggagaggctttccctttccccagccctgagcagggcctggcactgagtggagctggcttccctgggatgcttggggccttgcctctccctctgagtctggggcagcctccaccttctccattgctcaaccacagtttatttggtgtgctgactgggggaggaggacaacctccccctgagcccctgctacccccaccaggaggacctggtcctcccctagccccaggagagcctgaagggccttcgcttttggtggcttccttgcttcctccaccaccctcagaccttcttccacctccttcagcacctcccagcaacctccttgcctctttcctgcccctgttggctctgggccccacagctggggatggggagggatctgcagagggagccgggggtccaagtggggagccattttcaggcttgggagacctgtcccccctacttttccccccactttcagccccccctaccctcatagctttaaattctgcgctgctggctgccaccctggatcccccctcggggacacccccccagccctgtgtcctgagtgccccccaacctggaccacctacctccagtgtcaccacggcaactactgacccgggggcctcctctctgggcaaggccccctccaactcagggagacccccccaactccttagccctctgctgggtgccagcctgctgggtgacctgtcttcactgaccagcagccctggagccctccccagcctgttgcagcctcctggccctcttctctctggccagttggggctgcagctcctccctggggggggagctcctccacccctctcagaggcttctagtcccctagcctgcctgctacagagtctccagatccctccagagcagccagaagccccctgtctaccccccgagagccctgcctcagccctcgaaccagagcctgccaggcctcccctcagtgccttagccccaccccatggttctcccgaccccccagtccctgagctgctcactgggagggggtcagggaaacggggccggaggggaggagggggacttaggggcattaatggtgaggccaggccagcccggggccgaaagcctggcagccggcgggagcctggccgactggccctcaaatgggggacacgtggtggcttcaatggacaaatggaaaggtccccaagaagaacccaccattggcagcataatggggagctggctgaagggggtgctgagcccaaggatccaccccctcccgggccccattctgaggaccttaaggtgcccccgggagtagtcagaaagtctcgtcgtggccgtaggagaaaatacaaccctacccggaacagcaatagctcccgccaggacattaccttggaacccagccctacagcccgagcagctgtccctctgcctccccgggcccgccctggccgtcctgccaaaaacaagaggaggaaactggccccatagcagccatacctggagctggatctgaccctgattggggagagctgagtgctgagccttgggagcccctgccagccacctgcacctgtggacagtggagacgttgtgatgatgcgactgaggattatgcaacgtggtccaaccggagcggccagcatgaccagctgtccaggggctgcctcctgccttttcttttgtaaagacaagacccttgggagttttaattctgttttgtacttgccctgtggggcctccactgcttttctatgggagacactcttaatttaacagatgagaatattttgaaactctggcaaa

SEQ ID NO: 283714 - DNA, 3559 bp, Homo sapiens
accggctgactcggggcgccggtagcgtcgcttcctgctagtgaacgcccggggcgtaccggagcctctgattacaccgaccatcctcccaccctctccaactacacctctgggaccgcgactgcgcagggaggagccggccgaaccatggaccgcggtgtgggctaagctggtggccccggctttagactggaccccacaatgtttgcagagatgttcaggcacgcgggagctgattacacacaatgaatgggggcaatgagagcagtggagcagacagagctgggggccctgtggccacatctgtccccatcggctggcagcgctgtgtgcgagagggtgctgtgctctacatcagtccaagtggcacagagctgtcttccttggagcaaacccggagctacctcctcagcgatgggacctgcaagtgcggtctggagtgtccacttaatgtccccaaggttttcaactttgaccctttggccccggtgaccccgggtggggctggggtggggccagcatcagaggaggacatgaccaagctgtgcaaccaccggcggaaagctgttgctatggcaactctgtaccgcagcatggagaccacctgctcacactcttctcctggagagggagcgagcccccaaatgttccacactgtgtccccagggcccccctctgcccgccctccctgtcgagttcctcctacaactccacttaatgggggtcctggctcccttcccccagaaccaccctcagtttcccaggcctttcccactctagcaggccctggggggcttttccccccaaggcttgctgacccagtcccttctgggggcagtagcagcccccgtttcctcccaaggggcaatgccccctctccagccccacctcctccacctgctatcagcctcaatgctccctcatacaactggggagctgccctcagatccagcctggtgccctctgacctgggctctcctccggcccctcatgcctcctcctcaccaccttcagaccctcctctcttccactgtagtgatgccttaacaccccctcccctgcccccgagcaataatctccccgcccaccctggtcctgcctctcagccaccagtgtcttcagccactatgcacctgcccctggtcctggggcccctgggaggggcccccacggtggaggggcctggggcaccccccttccttgctagcagcctactctctgcagcggccaaggcacagcatcccccactaccccctcccagcactttacagggccgaaggccccgtgcccaggcaccctcagcttcccactcctcatcacttcgtccctctcagcgtcgtccccgcagaccccctactgtatttcgattgctagaagggagaggccctcaaacccctagacggagccgtcctcgggcccctgctcctgtcccccaacccttttctctcccggagccatcccaaccaattctcccttctgtgctgtccctgctgggactccccacccctggcccttcccactctgatggaagctttaaccttttggggtcagatgcacaccttcctcctcccccaaccctctcctcagggagccctccccagcccaggcaccccatccagccctccctgcctgggaccaccagtggcagcctcagcagtgtgccaggtgcccctgccccaccagctgcctccaaagccccagtagtccccagccctgtgcttcaaagcccatccgaaggactggggatgggggcaggcccggcctgccctctgcctcccctggctggtggagaggctttccctttccccagccctgagcagggcctggcactgagtggagctggcttccctgggatgcttggggccttgcctctccctctgagtctggggcagcctccaccttctccattgctcaaccacagtttatttggtgtgctgactgggggaggaggacaacctccccctgagcccctgctacccccaccaggaggacctggtcctcccctagccccaggagagcctgaagggccttcgcttttggtggcttccttgcttcctccaccaccctcagaccttcttccacctccttcagcacctcccagcaacctccttgcctctttcctgcccctgttggctctgggccccacagctggggatggggagggatctgcagagggagccgggggtccaagtggggagccattttcaggcttgggagacctgtcccccctacttttccccccactttcagccccccctaccctcatagctttaaattctgcgctgctggctgccaccctggatcccccctcggggacacccccccagccctgtgtcctgagtgccccccaacctggaccacctacctccagtgtcaccacggcaactactgacccgggggcctcctctctgggcaaggccccctccaactcagggagacccccccaactccttagccctctgctgggtgccagcctgctgggtgacctgtcttcactgaccagcagccctggagccctccccagcctgttgcagcctcctggccctcttctctctggccagttggggctgcagctcctccctggggggggagctcctccacccctctcagaggcttctagtcccctagcctgcctgctacagagtctccagatccctccagagcagccagaagccccctgtctaccccccgagagccctgcctcagccctcgaaccagagcctgccaggcctcccctcagtgccttagccccaccccatggttctcccgaccccccagtccctgagctgctcactgggagggggtcagggaaacggggccggaggggaggagggggacttaggggcattaatggtgaggccaggccagcccggggccgaaagcctggcagccggcgggagcctggccgactggccctcaaatgggggacacgtggtggcttcaatggacaaatggaaaggtccccaagaagaacccaccattggcagcataatggggagctggctgaagggggtgctgagcccaaggatccaccccctcccgggccccattctgaggaccttaaggtgcccccgggagtagtcagaaagtctcgtcgtggccgtaggagaaaatacaaccctacccggaacagcaatagctcccgccaggacattaccttggaacccagccctacagcccgagcagctgtccctctgcctccccgggcccgccctggccgtcctgccaaaaacaagaggaggaaactggccccatagcagccatacctggagctggatctgaccctgattggggagagctgagtgctgagccttgggagcccctgccagccacctgcacctgtggacagtggccaacaggctcagtttacaaacctgtgagctactgttggctgctgccctccttcccagtgaaagagacgttgtgatgatgcgactgaggattatgcaacgtggtccaaccggagcggccagcatgaccagctgtccaggggctgcctcctgccttttcttttgtaaagacaagacccttgggggccagctggaggggtaccgagctc

SEQ ID NO: 283715 - DNA, 1043 bp, Homo sapiens
  misc_feature (19)..(19): n is a, c, g, or t
  misc_feature (32)..(33): n is a, c, g, or t
cagtatctcgggtatggtncgaggctgggtgnngctgctgctactgagtctccagcagatccctccagagcagccagaagccccctgtctaccccccgagagccctgcctcagccctcgaaccagagcctgccaggcctcccctcagtgccttagccccaccccatggttctcccgaccccccagtccctgagctgctcactgggagggggtcagggaaacggggccggaggggaggagggggacttaggggcattaatggtgaggccaggccagcccggggccgaaagcctggcagccggcgggagcctggccgactggccctcaaatgggggacacgtggtggcttcaatggacaaatggaaaggtccccaagaagaacccaccattggcagcataatggggagctggctgaagggggtgctgagcccaaggatccaccccctcccgggccccattctgaggaccttaaggtgcccccgggagtagtcagaaagtctcgtcgtggccgtaggagaaaatacaaccctacccggaacagcaatagctcccgccaggacattaccttggaacccagccctacagcccgagcagctgtccctctgcctccccgggcccgccctggccgtcctgccaaaaacaagaggaggaaactggccccatagcagccatacctggagctggatctgaccctgattggggagagctgagtgctgagccttgggagcccctgccagccacctgcacctgtggacagtggccaacaggctcagtttacaaacctgtgagctactgttggctgctgccctccttcccagtgaaagagacgttgtgatgatgcgactgaggattatgcaacgtggtccaaccggagcggccagcatgaccagctgtccaggggctgcctcctgccttttcttttgtaaagacaagacccttgggagttttaattctgttttgtacttgccctgtggggcctccactgcttttctatgggagacactcttaatttaacagatgagaatattttgaaactctggcaaa

SEQ ID NO: 283716 - DNA, 2010 bp, Homo sapiens
  misc_feature (1950)..(1950): n is a, c, g, or t
  misc_feature (2003)..(2003): n is a, c, g, or t
accggctgactcggggcgccggtagcgtcgcttcctgctagtgaacgcccggggcgtaccggagcctctgattacaccgaccatcctcccaccctctccaactacacctctgggaccgcgactgcgcagggaggagccggccgaaccatggaccgcggtgtgggctaagctggtggccccggctttagactggaccccacaatgtttgcagagatgttcaggcacgcgggagctgattacacacaatgaatgggggcaatgagagcagtggagcagacagagctgggggccctgtggccacatctgtccccatcggctggcagcgctgtgtgcgagagggtgctgtgctctacatcagtccaagtggcacagagctgtcttccttggagcaaacccggagctacctcctcagcgatgggacctgcaagtgcggtctggagtgtccacttaatgtccccaaggttttcaactttgaccctttggccccggtgaccccgggtggggctggggtggggccagcatcagaggaggacatgaccaagctgtgcaaccaccggcggaaagctgttgctatggcaactctgtaccgcagcatggagaccacctgctcacactcttctcctggagagggagcgagcccccaaatgttccacactgtgtccccagggcccccctctgcccgccctccctgtcgagttcctcctacaactccacttaatgggggtcctggctcccttcccccagaaccaccctcagtttcccaggcctttcccactctagcaggccctggggggcttttccccccaaggcttgctgacccagtcccttctgggggcagtagcagcccccgtttcctcccaaggggcaatgccccctctccagccccacctcctccacctgctatcagcctcaatgctccctcatacaactggggagctgccctcagatccagcctggtgccctctgacctgggctctcctccggcccctcatgcctcctcctcaccaccttcagaccctcctctcttccactgtagtgatgccttaacaccccctcccctgcccccgagcaataatctccccgcccaccctggtcctgcctctcagccaccagtgtcttcagccactatgcacctgcccctggtcctggggcccctgggaggggcccccacggtggaggggcctggggcaccccccttccttgctagcagcctactctctgcagcggccaaggcacagcatcccccactaccccctcccagcactttacagggccgaaggccccgtgcccaggcaccctcagcttcccactcctcatcacttcgtccctctcagcgtcgtccccgcagaccccctactgtatttcgattgctagaagggagaggccctcaaacccctagacggagccgtcctcgggcccctgctcctgtcccccaacccttttctctcccggagccatcccaaccaattctcccttctgtgctgtccctgctgggactccccacccctggcccttcccactctgatggaagctttaaccttttggggtcagatgcacaccttcctcctcccccaaccctctcctcagggagccctccccagcccaggcaccccatccagccctccctgcctgggaccaccagtggcagcctcagcagtgtgccaggtgcccctgccccaccagctgcctccaaagccccagtagtccccagccctgtgcttcaaagcccatccgaaggactggggatgggggcaggcccggcctgccctctgcctcccctggctggtggagaggctttccctttccccagccctgagcagggcctggcactgagtggagctggcttccctgggatgcttggggccttgcctctccctctgagtctggggcagcctccaccttctccattgctcaaccacagtttatttggtgtgctgactggggagaganactccctgagcctgtacccacagagactgtctcctagccagagactgaggctngtttgtg

SEQ ID NO: 283717 - DNA, 527 bp, Homo sapiens
tcggtaccccatgccctcatccagtggcaaggaaagctccaaatccatgacagtcgaagtctctgactggacagttccctgaattctactagtacctccaattccattttctcccatggaatcactaagagcaagacccactctgttccagaagccctataagctggaggtggacaactcaatgtaaatttcatgggaaaacccttgtacgtgaagcatgagccactcagaactcaccaaaatattcgacaccataacaacagatgctcaaactgtaaaccaggacaacaagtggatgacttcacactgtggacagtttttcccaagatgtcagaacaagactccccactggatgagggcatgcatgccctcatccagtggggagctgccctcagatccagcctggtgccctctgacctgggctctcctccggcccctcatgcctcctcctcaccaccttcagaccctcctctcttccactggatgaggtcatggggatccttctagatcacctcagcatcagctgc

SEQ ID NO: 283718 - DNA, 3135 bp, Homo sapiens
gcgaattcactagtgattgagctgaggaggacatgaccaagctgtgcaaccaccggcggaaagctgttgctatggcaactctgtaccgcagcatggagaccacctgctcacactcttctcctggagagggagcgagcccccaaatgttccacactgtgtccccagggcccccctctgcccgccctccctgtcgagttcctcctacaactccacttaatgggggtcctggctcccttcccccagaaccaccctcagtttcccaggcctttcccactctagcaggccctggggggcttttccccccaaggcttgctgacccagtcccttctgggggcagtagcagcccccgtttcctcccaaggggcaatgccccctctccagccccacctcctccacctgctatcagcctcaatgctccctcatacaactggggagctgccctcagatccagcctggtgccctctgacctgggctctcctccggcccctcatgcctcctcctcaccaccttcagaccctcctctcttccactgtagtgatgccttaacaccccctcccctgcccccgagcaataatctccccgcccaccctggtcctgcctctcagccaccagtgtcttcagccactatgcacctgcccctggtcctggggcccctgggaggggcccccacggtggaggggcctggggcaccccccttccttgctagcagcctactctctgcagcggccaaggcacagcatcccccactaccccctcccagcactttacagggccgaaggccccgtgcccaggcaccctcagcttcccactcctcatcacttcgtccctctcagcgtcgtccccgcagaccccctactgtatttcgattgctagaagggagaggccctcaaacccctagacggagccgtcctcgggcccctgctcctgtcccccaacccttttctctcccggagccatcccaaccaattctcccttctgtgctgtccctgctgggactccccacccctggcccttcccactctgatggaagctttaaccttttggggtcagatgcacaccttcctcctcccccaaccctctcctcagggagccctccccagcccaggcaccccatccagccctccctgcctgggaccaccagtggcagcctcagcagtgtgccaggtgcccctgccccaccagctgcctccaaagccccagtagtccccagccctgtgcttcaaagcccatccgaaggactggggatgggggcaggcccggcctgccctctgcctcccctggctggtggagaggctttccctttccccagccctgagcagggcctggcactgagtggagctggcttccctgggatgcttggggccttgcctctccctctgagtctggggcagcctccaccttctccattgctcaaccacagtttatttggtgtgctgactgggggaggaggacaacctccccctgagcccctgctacccccaccaggaggacctggtcctcccctagccccaggagagcctgaagggccttcgcttttggtggcttccttgcttcctccaccaccctcagaccttcttccacctccttcagcacctcccagcaacctccttgcctctttcctgcccctgttggctctgggccccacagctggggatggggagggatctgcagagggagccgggggtccaagtggggagccattttcaggcttgggagacctgtcccccctacttttccccccactttcagccccccctaccctcatagctttaaattctgcgctgctggctgccaccctggatcccccctcggggacacccccccagccctgtgtcctgagtgccccccaacctggaccacctacctccagtgtcaccacggcaactactgacccgggggcctcctctctgggcaaggccccctccaactcagggagacccccccaactccttagccctctgctgggtgccagcctgctgggtgacctgtcttcactgaccagcagccctggagccctccccagcctgttgcagcctcctggccctcttctctctggccagttggggctgcagctcctccctggggggggagctcctccacccctctcagaggcttctagtcccctagcctgcctgctacagagtctccagatccctccagagcagccagaagccccctgtctaccccccgagagccctgcctcagccctcgaaccagagcctgccaggcctcccctcagtgccttagccccaccccatggttctcccgaccccccagtccctgagctgctcactgggagggggtcagggaaacggggccggaggggaggagggggacttaggggcattaatggtgaggccaggccagcccggggccgaaagcctggcagccggcgggagcctggccgactggccctcaaatgggggacacgtggtggcttcaatggacaaatggaaaggtccccaagaagaacccaccattggcagcataatggggagctggctgaagggggtgctgagcccaaggatccaccccctcccgggccccattctgaggaccttaaggtgcccccgggagtagtcagaaagtctcgtcgtggccgtaggagaaaatacaaccctacccggaacagcaatagctcccgccaggacattaccttggaacccagccctacagcccgagcagctgtccctctgcctccccgggcccgccctggccgtcctgccaaaaacaagaggaggaaactggccccatagcagccatacctggagctggatctgaccctgattggggagagctgagtgctgagccttgggagcccctgccagccacctgcacctgtggacagtggccaacaggctcagtttacaaacctgtgagctactgttggctgctgccctccttcccagtgaaagagacgttgtgatgatgcgactgaggattatgcaacgtggtccaaccggagcggccagcatgaccagctgtccaggggctgcctcctgccttttcttttgtaaagacaagacccttgggagttttaattctgttttgtacttgccctgtggggcctccactgcttttctatgggagacactcttaatttaacagatgagaatattttgaaactctggcaaa

SEQ ID NO: 283719 - DNA, 4178 bp, Homo sapiens
accggctgactcggggcgccggtagcgtcgcttcctgctagtgaacgcccggggcgtaccggagcctctgattacaccgaccatcctcccaccctctccaactacacctctgggaccgcgactgcgcagggaggagccggccgaaccatggaccgcggtgtgggctaagctggtggccccggctttagactggaccccacaatgtttgcagagatgttcaggcacgcgggagctgattacacacaatgaatgggggcaatgagagcagtggagcagacagagctgggggccctgtggccacatctgtccccatcggctggcagcgctgtgtgcgagagggtgctgtgctctacatcagtccaagtggcacagagctgtcttccttggagcaaacccggagctacctcctcagcgatgggacctgcaagtgcggtctggagtgtccacttaatgtccccaaggttttcaactttgaccctttggccccggtgaccccgggtggggctggggtggggccagcatcagaggaggacatgaccaagctgtgcaaccaccggcggaaagctgttgctatggcaactctgtaccgcagcatggagaccacctgctcacactcttctcctggagagggagcgagcccccaaatgttccacactgtgtccccagggcccccctctgcccgccctccctgtcgagttcctcctacaactccacttaatgggggtcctggctcccttcccccagaaccaccctcagtttcccaggcctttcccactctagcaggccctggggggcttttccccccaaggcttgctgacccagtcccttctgggggcagtagcagcccccgtttcctcccaaggggcaatgccccctctccagccccacctcctccacctgctatcagcctcaatgctccctcatacaactggggagctgccctcagatccagcctggtgccctctgacctgggctctcctccggcccctcatgcctcctcctcaccaccttcagaccctcctctcttccactgtagtgatgccttaacaccccctcccctgcccccgagcaataatctccccgcccaccctggtcctgcctctcagccaccagtgtcttcagccactatgcacctgcccctggtcctggggcccctgggaggggcccccacggtggaggggcctggggcaccccccttccttgctagcagcctactctctgcagcggccaaggcacagcatcccccactaccccctcccagcactttacagggccgaaggccccgtgcccaggcaccctcagcttcccactcctcatcacttcgtccctctcagcgtcgtccccgcagaccccctactgtatttcgattgctagaagggagaggccctcaaacccctagacggagccgtcctcgggcccctgctcctgtcccccaacccttttctctcccggagccatcccaaccaattctcccttctgtgctgtccctgctgggactccccacccctggcccttcccactctgatggaagctttaaccttttggggtcagatgcacaccttcctcctcccccaaccctctcctcagggagccctccccagcccaggcaccccatccagccctccctgcctgggaccaccagtggcagcctcagcagtgtgccaggtgcccctgccccaccagctgcctccaaagccccagtagtccccagccctgtgcttcaaagcccatccgaaggactggggatgggggcaggcccggcctgccctctgcctcccctggctggtggagaggctttccctttccccagccctgagcagggcctggcactgagtggagctggcttccctgggatgcttggggccttgcctctccctctgagtctggggcagcctccaccttctccattgctcaaccacagtttatttggtgtgctgactgggggaggaggacaacctccccctgagcccctgctacccccaccaggaggacctggtcctcccctagccccaggagagcctgaagggccttcgcttttggtggcttccttgcttcctccaccaccctcagaccttcttccacctccttcagcacctcccagcaacctccttgcctctttcctgcccctgttggctctgggccccacagctggggatggggagggatctgcagagggagccgggggtccaagtggggagccattttcaggcttgggagacctgtcccccctacttttccccccactttcagccccccctaccctcatagctttaaattctgcgctgctggctgccaccctggatcccccctcggggacacccccccagccctgtgtcctgagtgccccccaacctggaccacctacctccagtgtcaccacggcaactactgacccgggggcctcctctctgggcaaggccccctccaactcagggagacccccccaactccttagccctctgctgggtgccagcctgctgggtgacctgtcttcactgaccagcagccctggagccctccccagcctgttgcagcctcctggccctcttctctctggccagttggggctgcagctcctccctggggggggagctcctccacccctctcagaggcttctagtcccctagcctgcctgctacagagtctccagatccctccagagcagccagaagccccctgtctaccccccgagagccctgcctcagccctcgaaccagagcctgccaggcctcccctcagtgccttagccccaccccatggttctcccgaccccccagtccctgagctgctcactgggagggggtcagggaaacggggccggaggggaggagggggacttaggggcattaatggtgaggccaggccagcccggggccgaaagcctggcagccggcgggagcctggccgactggccctcaaatgggggacacgtggtggcttcaatggacaaatggaaaggtccccaagaagaacccaccattggcagcataatggggagctggctgaagggggtgctgagcccaaggatccaccccctcccgggccccattctgaggaccttaaggtgcccccgggagtagtcagaaagtctcgtcgtggccgtaggagaaaatacaaccctacccggaacagcaatagctcccgccaggacattaccttggaacccagccctacagcccgagcagctgtccctctgcctccccgggcccgccctggccgtcctgccaaaaacaagaggaggaaactggccccatagcagccatacctggagctggatctgaccctgattggggagagctgagtgctgagccttgggagcccctgccagccacctgcacctgtggacagtgggtgggggcactactccccactcagagcacaaatgcaactccttcccctacaatcccatcctgagccattgcagggggcagggaagttcacccccccccaccccccccacacgcccccccgaagccatgtcactgaaaaggcctgggggggatggtatatggccctttccccaccaggcgctaaggggaacacccccttccccaggtcttttatttgtttaagttatttttgcacaaatgactcttttatatttaattcgatttcattgcctcccttcttaaagccaacaggctcagtttacaaacctgtgagctactgttggctgctgccctccttcccagtgaaaggtacaaagcaataagcatcatgcatcctccccttacccctccaacacccctctgcctctggctcaggttgctcaaagcacagatcctctcttaccccgtccccaggtttgaaacacatagcctcatttcaaggtgtagccaggttcccccgactttcctctgggatataaaaaagggggtaagggggcaaagagagccctctgggcctctcctcccatacacactacactgccccttctccccccatcaaaacgctcagagacgttgtgatgatgcgactgaggattatgcaacgtggtccaaccggagcggccagcatgaccagctgtccaggggctgcctcctgccttttcttttgtaaagacaagacccttgggagttttaattctgttttgtacttgccctgtggggcctccactgcttttctatgggagacactcttaatttaacagatgagaatattttgaaactctggcaaa

SEQ ID NO: 283720 - DNA, 3468 bp, Homo sapiens
accggctgactcggggcgccggtagcgtcgcttcctgctagtgaacgcccggggcgtaccggagcctctgattacaccgaccatcctcccaccctctccaactacacctctgggaccgcgactgcgcagggaggagccggccgaaccatggaccgcggtgtgggctaagctggtggccccggctttagactggaccccacaatgtttgcagagatgttcaggcacgcgggagctgattacacacaatgaatgggggcaatgagagcagtggagcagacagagctgggggccctgtggccacatctgtccccatcggctggcagcgctgtgtgcgagagggtgctgtgctctacatcagtccaagtggcacagagctgtcttccttggagcaaacccggagctacctcctcagcgatgggacctgcaagtgcggtctggagtgtccacttaatgtccccaaggttttcaactttgaccctttggccccggtgaccccgggtggggctggggtggggccagcatcagaggaggacatgaccaagctgtgcaaccaccggcggaaagctgttgctatggcaactctgtaccgcagcatggagaccacctgctcacactcttctcctggagagggagcgagcccccaaatgttccacactgtgtccccagggcccccctctgcccgccctccctgtcgagttcctcctacaactccacttaatgggggtcctggctcccttcccccagaaccaccctcagtttcccaggcctttcccactctagcaggccctggggggcttttccccccaaggcttgctgacccagtcccttctgggggcagtagcagcccccgtttcctcccaaggggcaatgccccctctccagccccacctcctccacctgctatcagcctcaatgctccctcatacaactggggagctgccctcagatccagcctggtgccctctgacctgggctctcctccggcccctcatgcctcctcctcaccaccttcagaccctcctctcttccactgtagtgatgccttaacaccccctcccctgcccccgagcaataatctccccgcccaccctggtcctgcctctcagccaccagtgtcttcagccactatgcacctgcccctggtcctggggcccctgggaggggcccccacggtggaggggcctggggcaccccccttccttgctagcagcctactctctgcagcggccaaggcacagcatcccccactaccccctcccagcactttacagggccgaaggccccgtgcccaggcaccctcagcttcccactcctcatcacttcgtccctctcagcgtcgtccccgcagaccccctactgtatttcgattgctagaagggagaggccctcaaacccctagacggagccgtcctcgggcccctgctcctgtcccccaacccttttctctcccggagccatcccaaccaattctcccttctgtgctgtccctgctgggactccccacccctggcccttcccactctgatggaagctttaaccttttggggtcagatgcacaccttcctcctcccccaaccctctcctcagggagccctccccagcccaggcaccccatccagccctccctgcctgggaccaccagtggcagcctcagcagtgtgccaggtgcccctgccccaccagctgcctccaaagccccagtagtccccagccctgtgcttcaaagcccatccgaaggactggggatgggggcaggcccggcctgccctctgcctcccctggctggtggagaggctttccctttccccagccctgagcagggcctggcactgagtggagctggcttccctgggatgcttggggccttgcctctccctctgagtctggggcagcctccaccttctccattgctcaaccacagtttatttggtgtgctgactgggggaggaggacaacctccccctgagcccctgctacccccaccaggaggacctggtcctcccctagccccaggagagcctgaagggccttcgcttttggtggcttccttgcttcctccaccaccctcagaccttcttccacctccttcagcacctcccagcaacctccttgcctctttcctgcccctgttggctctgggccccacagctggggatggggagggatctgcagagggagccgggggtccaagtggggagccattttcaggcttgggagacctgtcccccctacttttccccccactttcagccccccctaccctcatagctttaaattctgcgctgctggctgccaccctggatcccccctcggggacacccccccagccctgtgtcctgagtgccccccaacctggaccacctacctccagtgtcaccacggcaactactgacccgggggcctcctctctgggcaaggccccctccaactcagggagacccccccaactccttagccctctgctgggtgccagcctgctgggtgacctgtcttcactgaccagcagccctggagccctccccagcctgttgcagcctcctggccctcttctctctggccagttggggctgcagctcctccctggggggggagctcctccacccctctcagaggcttctagtcccctagcctgcctgctacagagtctccagatccctccagagcagccagaagccccctgtctaccccccgagagccctgcctcagccctcgaaccagagcctgccaggcctcccctcagtgccttagccccaccccatggttctcccgaccccccagtccctgagctgctcactgggagggggtcagggaaacggggccggaggggaggagggggacttaggggcattaatggtgaggccaggccagcccggggccgaaagcctggcagccggcgggagcctggccgactggccctcaaatgggggacacgtggtggcttcaatggacaaatggaaaggtccccaagaagaacccaccattggcagcataatggggagctggctgaagggggtgctgagcccaaggatccaccccctcccgggccccattctgaggaccttaaggtgcccccgggagtagtcagaaagtctcgtcgtggccgtaggagaaaatacaaccctacccggaacagcaatagctcccgccaggacattaccttggaacccagccctacagcccgagcagctgtccctctgcctccccgggcccgccctggccgtcctgccaaaaacaagaggaggaaactggccccatagcagccagctggactaggagtgggaagggcctggacactcacagaggccccctctgtcatcactccttgggacccaccaacttcctgcacacactggcagagaggggcgctgggaaatcaccccacaggcgggaggtctcctgttggctacactctaaagctgcttggccttcatgttcaaacagattcaggcaccaccccctcttccccag

SEQ ID NO: 283721 - DNA, 1724 bp, Homo sapiens
agacccctgactataatttctcaacaggtgacctgtcttcactgaccagcagccctggagccctccccagcctgttgcagcctcctggccctcttctctctggccagttggggctgcagctcctccctggggggggagctcctccacccctctcagaggcttctagtcccctagcctgcctgctacagagtctccagatccctccagagcagccagaagccccctgtctaccccccgagagccctgcctcagccctcgaaccagagcctgccaggcctcccctcagtgccttagccccaccccatggttctcccgaccccccagtccctgagctgctcactgggagggggtcagggaaacggggccggaggggaggagggggacttaggggcattaatggtgaggccaggccagcccggggccgaaagcctggcagccggcgggagcctggccgactggccctcaaatgggggacacgtggtggcttcaatggacaaatggaaaggtccccaagaagaacccaccattggcagcataatggggagctggctgaagggggtgctgagcccaaggatccaccccctcccgggccccattctgaggaccttaaggtgcccccgggagtagtcagaaagtctcgtcgtggccgtaggagaaaatacaaccctacccggaacagcaatagctcccgccaggacattaccttggaacccagccctacagcccgagcagctgtccctctgcctccccgggcccgccctggccgtcctgccaaaaacaagaggaggaaactggccccatagcagccatacctggagctggatctgaccctgattggggagagctgagtgctgagccttgggagcccctgccagccacctgcacctgtggacagtgggtgggggcactactccccactcagagcacaaatgcaactccttcccctacaatcccatcctgagccattgcagggggcagggaagttcacccccccccaccccccccacacgcccccccgaagccatgtcactgaaaaggcctgggggggatggtatatggccctttccccaccaggcgctaaggggaacacccccttccccaggtcttttatttgtttaagttatttttgcacaaatgactcttttatatttaattcgatttcattgcctcccttcttaaagccaacaggctcagtttacaaacctgtgagctactgttggctgctgccctccttcccagtgaaaggtacaaagcaataagcatcatgcatcctccccttacccctccaacacccctctgcctctggctcaggttgctcaaagcacagatcctctcttaccccgtccccaggtttgaaacacatagcctcatttcaaggtgtagccaggttcccccgactttcctctgggatataaaaaagggggtaagggggcaaagagagccctctgggcctctcctcccatacacactacactgccccttctccccccatcaaaacgctcagagacgttgtgatgatgcgactgaggattatgcaacgtggtccaaccggagcggccagcatgaccagctgtccaggggctgcctcctgccttttcttttgtaaagacaagacccttgggagttttaattctgttttgtacttgccctgtggggcctccactgcttttctatgggagacactcttaatttaacagatgagaatattttgaaactctggcaaa

SEQ ID NO: 283722 - DNA, 448 bp, Homo sapiens
gggcaatctgtactttttatatcatcttcctgggtagagaacaacaggagccagacactctgggaaacttcctagtggcctagcattatgggaatgtgcccatactcctggttgaagtcttctactccgaatggagggaggccttgcccttcatatgcctaagaattgggctagactttcttggtcccagggagctgaggttctgaccctctggtccctagggactgggcttggaaaggatggttgtagactaagccagcagatccccgagatctttataggtgcttgcctcacattgttaaggatctttcttttgagagggtgctgggctgtgctgctctttagagttgggcagactcctgacagtcccatctctctacttgcgttgcaggtgtgggctaagctggtggccccggctttagactggaccccacaatgtttgcagaga

SEQ ID NO: 283723 - DNA, 1725 bp, Homo sapiens
gaccttgactttccagaattggaacacatttttcctaatttgcatcatcagctgtttaaacccttagaaccacatccagattttgacttatcatcatcatcctctgggatttctccagacaacagagacttttaccagagatcagattcttcatctgaaagccactgtgctactggattatccaaaagtacagtttatttcacagcactgaggaggaccagcatgcattcttctcttaacacaagtccgaatcaacaacctgacactaacttggctcatgttggagctcacagttttgctacagaaaatattattgggggatctgaacaatgttttgaacagcttcagccagaatattcttcacaggaggagagccagcatgctgatctaccaagtatttttagcattgaagcaagagattcttcccaaggcatgaaaaatcagaactatccctctgaagaacatactgaaatattacaaaacaagaaaaaaattgttcatttccagctttctataggaaacttaagttcagtctacagttcatctgatgaagctaatgtatttgatcagttaaatgtacagcatagcactccatgtggttctaactctagtgagtgctcaacaaaacaccaactagaaagcagaaaggaaagtatgggctttgaagaactatcaaaaagaggggttgttacaatgttacaaagtcaaggactcattgaagataataaaaatgaaacctgtagggttttagacataaatccacaggtagaggaaactgactctcgattatgtgtaagaacagtggagatgggaacttcaattcaggcaccatattccttaactactcaaaatgaaaaatattttgagaattcagctgaaacagacattccaaaaatcaccaaaaaactatctcaactaggagaatcagagctttttgcaagttctggatcattttcattacagagctctataccagtctgggaaacagaaactggccatggtataatggaagaaccagaacttactttaataagcaccactgataccagtattgctgaaatggattttgcaaatttaaccctagaagagaagagcgagaatgaagcaaaatgcttctttcaggtgagtgtgtttctgcctcttgtatcagcaacagaagcctcagattatccagctgtatcagaactttccatagaaaaaccaaggacagcatctacagaaacccctcgcaggcttacacctgtaccagggagcttacaagaagcatttataaagaggaaaaaatcatttatggagagatcccaccagaggcagaaagaaataaggaataaaattcatgtctctgaaaattctcaaatcaaaacagttaaagagaaaccatctataagttcatctgtgagtcgtctaaagggcgtgaataaagtcagagcatcttttcctgaagacagaaagactacacaggctctaaggcaccaaaggggtctaaggttatacaatcaactagctgaagtgaaacaacaaaaggaagaaaaaacaaaacaagaagcttatgcccaaaacagagcaagggcaaaagaattccataagaaaacactagagaaacttcgagccaaaaatacatgctgactttctagaaatagtgtaaaggttttttaattgtgtatatgtagcattagacaaaattatttaaagtcaataaattgttattcgaggaaaaaaaaaatg

SEQ ID NO: 283724 - DNA, 1807 bp, Homo sapiens
gaccttgactttccagaattggaacacatttttcctaatttgcatcatcagctgtttaaacccttagaaccacatccagattttgacttatcatcatcatcctctgggatttctccagacaacagagacttttaccagagatcagattcttcatctgaaagccactgtgctactggattatccaaaagtacagtttatttcacagcactgaggaggaccagcatgcattcttctcttaacacaagtccgaatcaacaacctgacactaacttggctcatgttggagctcacagttttgctacagaaaatattattgggggatctgaacaatgttttgaacagcttcagccagaatattcttcacaggaggagagccagcatgctgatctaccaagtatttttagcattgaagcaagagattcttcccaaggcatgaaaaatcagaactatccctctgaagaacatactgaaatattacaaaacaagaaaaaaattgttcatttccagctttctataggaaacttaagttcagtctacagttcatctgatgaagctaatgtatttgatcagttaaatgtacagcatagcactccatgtggttctaactctagtgagtgctcaacaaaacaccaactagaaagcagaaaggaaagtatgggctttgaagaactatcaaaaagaggggttgttacaatgttacaaagtcaaggactcattgaagataataaaaatgaaacctgtagggttttagacataaatccacaggtagaggaaactgactctcgattatgtgtaagaacagtggagatgggaacttcaattcaggcaccatattccttaactactcaaaatgaaaaatattttgagaattcagctgaaacagacattccaaaaatcaccaaaaaactatctcaactaggagaatcagagctttttgcaagttctggatcattttcattacagagctctataccagtctgggaaacagaaactggccatggtataatggaagaaccagaacttactttaataagcaccactgataccagtattgctgaaatggattttgcaaatttaaccctagaagagaagagcgagaatgaagcaaaatgcttctttcaggtgagtgtgtttctgcctcttgtatcagcaacagaagcctcagattatccagctgtatcagaactttccatagaaaaaccaaggacagcatctacagaaacccctcgcaggcttacacctgtaccagggagcttacaagaagcatttataaagaggaaaaaatcatttatggagagatcccaccagaggcagaaagaaataaggaataaaattcatgtctctgaaaattctcaaatcaaaacagttaaagagaaaccatctataagttcatctgtgagtcgtctaaagggcgtgaataaagtcagagcatcttttcctgaagacagaaagactacacaggctctaaggcaccaaaggggtctaaggttatacaatcaactagctgaagtgaaacaacaaaaggaagaaaaaacaaaacaagaagcttatgcccaaaacagagcaagggcaaaagaattccataaggtgagtataactgagggggaaggacttaatttttcaagcatgaagtacacaactgaaactcaaatttttattccttccacagaaaacactagagaaacttcgagccaaaaatacatgctgactttctagaaatagtgtaaaggttttttaattgtgtatatgtagcattagacaaaattatttaaagtcaataaattgttattcgaggaaaaaaaaaatg

SEQ ID NO: 283725 - DNA, 396 bp, Homo sapiens
gatgattaactgatttttgaatttcttaatgcaggatctgaacaatgttttgaacagcttcagccagaatattcttcacaggaggagagccagcatgctgatctaccaagtatttttagcattgaagcaagagattcttcccaaggcatgaaaaatcagaactatccctctgaagaacatactgaaatattacaaaacaagaaaaaaattgttcatttccagctttctataggaaacttaagttcagtctacagttcatctgatgaagctaatgtatttgatcagttaaatgtacagcatagcactccatgtggttctaactctagtgagtgctcaacaaaacaccaactagaaagcagaaaggaaagtatgggctttgaagaactatcaaaaaga

SEQ ID NO: 283726 - DNA, 449 bp, Homo sapiens
ctttcagtccattgtcacactatttcatcccctccccaaagtaggctccagtatttctacaactgaatgctggagttatggaagcctaaggaaatctgatctgttggtctttgccaatcattgcttttcttcctccattttcacatttatatacacttgcaaaaaatgtgcattatatacaaaacgattagtttaagtcttttaaggctattttgacatggttttccttttaattgtggttcacaggaaacagaaactggccatggtataatggaagaaccagaacttactttaataagcaccactgataccagtattgctgaaatggattttgcaaatttaaccctagaagagaagagcgagaatgaagcaaaatgcttctttcaggtaaatttaagctttccttctattttattctattacaagcaaaccagttgatttgtctctta

SEQ ID NO: 283727 - DNA, 472 bp, Homo sapiens
gaaatgtttaaagccttgtgtttacaacttgatttcacttttctttcctcaggttcatctgtgagtcgtctaaagggcgtgaataaagtcagagcatcttttcctgaagacagaaagactacacaggctctaaggcaccaaaggggtctaaggttatacaatcaactagctgaagtgaaacaacaaaaggaagaaaaaacaaaacaagaagcttatgcccaaaacagagcaagggcaaaagaattccataaggtgagtataactgagggggaaggacttaatttttcaagcatgaagtacacaactgaaactcaaatttttattccttccacagaaaacactagagaaacttcgagccaaaaatacatgctgactttctagaaatagtgtaaaggttttttaattgtgtatatgtagcattagacaaaattatttaaagtcaataaattgttattcgaggaaaaaaaaaatg

SEQ ID NO: 283728 - DNA, 1800 bp, Homo sapiens
ccacccaaagtccctggggtttctctactggacagcctggcagaagaggccagtgccttagagaacagcaggtggggaggtgagggagggcagaagttggagggaccctggcaagggcctggactctgtcctgagtgatggaagaagccctaacccaggcccccaaggcgccaccagccatagcttcccaagcccaccggtgggaagcagaccaacgcatcgtgtgcccagctgcgcactgccagcccctgcctgcccgccccgcagcgagctcaccatctcgtgaaggatgtcattggtcaggaagctgtcctggacgtaggccatctccacatccatggggatgccatagtcactgggcctttgctggcagggacacagaccagtgagagaagcctcaccagcccgcagcccatggcagctggggacaattggcagtgcccgggctgggaacgggagagtgcacaccccggctcagctctgcaccgggatcggcacctggtggtgggaccagggaggcagtgtagcatccttactgtgggagaggcccagaagagagccagggccctgaaatgacttcccagggctgacctctgacttcagggcaggattggggaatgaagccaggcagggtcaggaagggagccctctttgtactgagcagccaatgacacaacggaggccccacgcccaggacctcaccaaaatatgggcagggcagcagtcacgtccccatttcatagatggagaaactggggccccaactctccagtggagcctggaaccaggggcccctgcctagtcgtgacccaaatgccccagtgctcccgggccccccaggctctcccaacagccccacctacctcgggaggaggcatcacccagaaaggcgagatcttggactcggggcctgggttgccagaatagtaaggggctggcgggagagagggagaggggttggccctgggaggctcggctggcccagcatcccccctccttgctccccccacagccccatcccgcgtacagcagagcagggcgaggcagggctggaagccattgctggagccctgcagccgcagctggtagtccatctgtgcgtcgatgtcctgcagagatggcagcgccgggctgtgtgggtggctgtggtaccagcccaccagggacaggccccgcaggaacaggctctggtagatctggggacagaggcgcagctcagcgggcacaggggcctgaacggctctagtgagcttatgtggctggccagccctgaacgaattcctgctgtgtatcaggcctggggacacagtgatgaccaagacaggccctgcccccaccgccactgagtccagtgggagctggagagacagccaacaaggacctcttttaatataaaagatgcaccctgccacaaagccaggacaccaaagtcattttgttcactgctgtagcccagcttacagaataatggtcgccacacagtaagcactcaacaaacagttaaaactaggctgggagcagtggctcacgcctgtaatcccagtgctttgggaggctgaggcaggcagatcacttgaggtcacgagttcaggactagcctggccaacatggagaaacccccttctctactaaaaatacaaaggttagccaggtgtggtggcgtgtgtctgtactcccatctactgtggaggctgaggcaggaggatgttgaacctgggcagctgatgctgcagtgagccatgattatgccactgcagtccagcctgggcaacagagcaagatcgtgtctcaaagaaaagg

SEQ ID NO: 283729 - DNA, 4196 bp, Homo sapiens
cgaagtcaagacgtctggaaagaattacccagtcctggcttcgagcagcccattgaaccagagacttgaaacagccccagccaaagacttttctcccaattctgcgcttcctgggttctgctgagtcttccacaggctttttttttttttttttttttttaagacgaaaaagagattttctgttatcgggggcagaaagactgaagcacaaaaaaaaaaaaaaagaaaagaaaagaaaagaaaaaagaaaagttaatttatttttaaagcataatttttttaagaattagactgaagtgcaacggaaacataaagagaatattagtgaaattattttttaaagtggggaagaatcaaacatttaagactcccctatcctttttaaatgttgtttttaaatttcttattttttttggccggtcgtctcaaattcatctgatctcttattacctcaattttggaaactgcccgccaccgaccctccgggaccacacagacaggctgaggacgactttatgaccaagagctgaacaagatgcattgtgagaggtttctatgtatcctgagaataattggaaccacactctttggagtctctctcctccttggaatcacagctgcttatattgttggctaccagtttatccaaacggataattactatttctcttttggactgtatggtgcctttttggcatcacacctcatcatccaaagcctgtttgcctttttggagcaccgaaaaatgaaaaaatccctagaaacccccataaagttgaacaaaacagttgccctttgcatcgctgcctatcaagaagatccagactacttaaggaaatgtttgcaatctgtgaaaaggctaacctaccctgggattaaagttgtcatggtcatagatgggaactcagaagatgacctttacatgatggacatcttcagtgaagtcatgggcagagacaaatcagccacttatatctggaagaacaacttccacgaaaagggtcccggtgagacagatgagtcacataaagaaagctcgcaacacgtaacgcaattggtcttgtccaacaaaagtatctgcatcatgcaaaaatggggtggaaaaagagaagtcatgtacacagccttcagagcactgggacgaagtgtggattatgtacaggtttgtgattcagacactatgcttgacccagcctcatctgtggagatggtaaaagttttagaagaagatcccatggttggaggtgttgggggagatgtccagattttaaacaagtacgattcctggatctcattcctcagcagtgtaagatattggatggcttttaatatagaaagggcctgtcagtcttattttgggtgtgttcagtgcattagtggacctctgggaatgtacagaaactccttgttgcatgagtttgtggaagattggtacaatcaagaatttatgggcaaccaatgtagctttggtgatgacaggcatctcacgaaccgggtgctgagcctgggctatgcaacaaaatacacagctcgatctaagtgccttactgaaacacctatagagtatctcagatggctaaaccagcagacccgttggagcaagtcctacttccgagaatggctgtacaatgcaatgtggtttcacaaacatcacttgtggatgacctacgaagcgattatcactggattctttcctttctttctcattgccacagtaatccagctcttctaccggggtaaaatttggaacattctcctcttcttgttaactgtccagctagtaggtctcataaaatcatcttttgccagctgccttagaggaaatatcgtcatggtcttcatgtctctctactcagtgttatacatgtcgagtttacttcccgccaagatgtttgcaattgcaacaataaacaaagctgggtggggcacatcaggaaggaaaaccattgttgttaatttcataggactcattccagtatcagtttggtttacaatcctcctgggtggtgtgattttcaccatttataaggagtctaaaaggccattttcagaatccaaacagacagttctaattgttggaacgttgctctatgcatgctattgggtcatgcttttgacgctgtatgtagttctcatcaataagtgtggcaggcggaagaagggacaacaatatgacatggtgcttgatgtatgatcttccatgttttgacgtttgcagtcacacacaacaccttagttcctctaggggctgtacagtattgtggcatcagataatgccaccaaaggagacatatcactgctgctgggacttgaacaaagacatttatatgggtttattttcattctgccaaagtaaaacaatacatcaacaagaagaaactcagatttaacctgttatttctatgaaaatgggatgaattctttgtttatgcactttttccttactgtgcatccgcctgaaagtgttttgccctatatacctcactagccatgctttatgtgggttatcatggaagaaaaggattttggaaactcaaggaaaagttctttcaacctatacaacctaacttatggactgttttgatagatgataattttttttttttaggaaggattttctttttaactttaccaaatgaaatgccaaaggaagttttaaaggccgttggctgtgctgtattttgatataattgtactgtgtttttaaattttgtatgccaatcttaaagacaaattttgcatattctctattttacttttctgccaaaataaacctgttcttccttttttaaaataaaataagttcttaaaaaatttatacttaaaaaatcctgcccaaaatgtgaagcttggttgactgatgttcatgatagaaagaataaaatgtttctctctctctaccttttaaaattgaatagtttatttctgtgaaagaagtatttaaactttcaatattttaactttttgtttttatttcttttagaaaaggccaatatacctatcacactttggaagtaaaaatacacactttcgtgtgtacctaaaaaaaaaatcgttgaaaatcaaggccaaaggtagtgcaattttttcattaagatttaaaaaaaagggaatgatagtctttgaaagaaaacagtaggcatccagcactggacaaaacatgggtatcaaagatgaataatctttggagattctggcagtgttttcccagaacaagtcaagtggaaagtggagaaattatctgtataattttggacacatacaatgcagtttatcaaaggttttgttctgtggcctgaatttactgggtcctacctacacattgaacatgttttgcctgtcttttttttttttttcaacttgccagttcactttacatgttagtataatgtttacacgggtgagttggataaattataaaacatataaattcaaaattggcagatagaatcaccaagtatctatcctcttttactttcaaatgaggaattttgtttttctgaattacacagatcatcacttcctatttcctgttctggacctgtataaaaatgtctacacagtagaagtgacatcaaggtttaataagtatatcaatgattggcacatataaaaattgttgaaccacatactctgaacttggctaatttagttactgcaaggcctccattatccagttttattttttacacgattgaccttgccttgtagctggtgctgtgtagacctgtgttgaaaacacaatcggaatatatgaataattgaataaacagcattatggtgaggcagagacacatggagaagtgttaaaaaaaaaatgggcttcctgcctttctgcctcttttttatgcagtcatctatgttacatctatcctgcctaagaaaaagctgcacatcctaccttcagagtacaaaaaggtacatctgagactcaagactctcactgattggagagcttgtggaaaacaaaacacaccatgccaataaatgagatgaaaacttgagtttgcctttttaactatttatgttctaagttaagctttgataacattcaaatgtcaaattctctcattcttataaaaagttgaattaattgcctgtatttattttagcaattattcaatgtatttccagtataggatgtatagtataattaattttttgtaaataaaatatttttgataagaaaattgcct

SEQ ID NO: 283730 - DNA, 1551 bp, Homo sapiens
tccagtctgggtgacagagcgagacttcctctcaaaaaaaaaaaaaaaaaggccaggggcggtggcttatgcctgtaatcccagcactttgggagcccaaggcgggcagatcacccgaagtcaggctggtcttgaagtcctgacctcagtgatccactcgcctcagccgaagtgctgcgattacagacctgagccactgcgcccagccttgatcttgaggtaagagggtactgtacagcagttactctatcataacacctaaataatacctaaagttaaagagttttgatgaagttcttggcagcagtgcttttccccttctgctttccaaaaggaggtaaaaagaagccagtcaatttcaaaaacccctatcctgcttttattttcagctaccttgaaagtgagctgaatcaccatggaaatgtgcaaatgtgaggtttgcatacttggttttaagccctgagcaccatatgctaatcaggcaatcaggattctgtgcctccctgcagtcagttgcatttctatttaaaagtgcattttggtttggaagcccctttctggagcctaactaccaaaaggcagcaactttttgtatcattacaaagaaagctgtgtaagtgcactcccaagcaaaggtgtggtaggagagtagcagccacagaggacccaagcccaagtcttggcctgagttaagttagtgctattgctcccattgacgtgctatgatgtgaagccgtttctggtacagtgttcctttgctcagcaccttaaaagcttggatttaatagtaactgggtaaccttaatcagtagtcagaattatcaacactttgctttatttgacacaaccagactttctcagttcctgttctgtatctagagcaacgtcttcatactgttttttcacaaaatttttatttaaaacagttgtgacagccgaaggatttttttttttttttttacaaaattaaaatgaaataacttgtacaactggtgcgtaccatggctccagccagatgcccaaagcactggctattaattcctggagttcagatggtcagttgagtctatcctagttttttgcttcacttgttcaatcatggaactttctagaacgctgccactcttcaaaggcttctcaatttcaaatttgaaaacttaattctctccctcttagtttcaaagttgttacagtgttatctatgtgaagtatgtggaaagttgggggctggggattttcctccaggcagattaagaaacagctctccgggtcgggcgctgtggctcaggcctgtaatcccagcactttgggaggctgaggcaggagaatcgctcgaacccgggaggcggaggttgcagtgagctgagatcatgccattgcactccggggcctgggcgacagagccagacgctgtctcaaaaaaaaaaaaaaaaaaaaggcacggtgactcacacctgtaatcccagcactttgggaggccaaggtggagggatcatgaggtcaggagtttgaggccagtctggccaatacagtgaaaccccatctctacta

SEQ ID NO: 283731 - DNA, 1498 bp, Homo sapiens
tccagtctgggtgacagagcgagacttcctctcaaaaaaaaaaaaaaaaaggccaggggcggtggcttatgcctgtaatcccagcactttgggagcccaaggcgggcagatcacccgaagtcaggctggtcttgaagtcctgacctcagtgatccactcgcctcagccgaagtgctgcgattacagacctgagccactgcgcccagccttgatcttgaggtaagagggtactgtacagcagttactctatcataacacctaaataatacctaaagttaaagagttttgatgaagttcttggcagcagtgcttttccccttctgctttccaaaaggaggtaaaaagaagccagtcaatttcacatggaaatgtgcaaatgtgaggtttgcatacttggttttaagccctgagcaccatatgctaatcaggcaatcaggattctgtgcctccctgcagtcagttgcatttctatttaaaagtgcattttggtttggaagcccctttctggagcctaactaccaaaaggcagcaactttttgtatcattacaaagaaagctgtgtaagtgcactcccaagcaaaggtgtggtaggagagtagcagccacagaggacccaagcccaagtcttggcctgagttaagttagtgctattgctcccattgacgtgctatgatgtgaagccgtttctggtacagtgttcctttgctcagcaccttaaaagcttggatttaatagtaactgggtaaccttaatcagtagtcagaattatcaacactttgctttatttgacacaaccagactttctcagttcctgttctgtatctagagcaacgtcttcatactgttttttcacaaaatttttatttaaaacagttgtgacagccgaaggatttttttttttttttttacaaaattaaaatgaaataacttgtacaactggtgcgtaccatggctccagccagatgcccaaagcactggctattaattcctggagttcagatggtcagttgagtctatcctagttttttgcttcacttgttcaatcatggaactttctagaacgctgccactcttcaaaggcttctcaatttcaaatttgaaaacttaattctctccctcttagtttcaaagttgttacagtgttatctatgtgaagtatgtggaaagttgggggctggggattttcctccaggcagattaagaaacagctctccgggtcgggcgctgtggctcaggcctgtaatcccagcactttgggaggctgaggcaggagaatcgctcgaacccgggaggcggaggttgcagtgagctgagatcatgccattgcactccggggcctgggcgacagagccagacgctgtctcaaaaaaaaaaaaaaaaaaaaggcacggtgactcacacctgtaatcccagcactttgggaggccaaggtggagggatcatgaggtcaggagtttgaggccagtctggccaatacagtgaaaccccatctctacta

SEQ ID NO: 283732 - DNA, 1497 bp, Homo sapiens
tccagtctgggtgacagagcgagacttcctctcaaaaaaaaaaaaaaaaaggccaggggcggtggcttatgcctgtaatcccagcactttgggagcccaaggcgggcagatcacccgaagtcaggctggtcttgaagtcctgacctcagtgatccactcgcctcagccgaagtgctgcgattacagacctgagccactgcgcccagccttgatcttgaggtaagagggtactgtacagcagttactctatcataacacctaaataatacctaaagttaaagagttttgatgaagttcttggcagcagtgcttttccccttctgctttccaaaaggaggtaaaaagaagccagtcaatttcaaaaacccctatcctgcttttattttcagctaccttgaaagtgagctgaatcaccatggaaatgtgcaaatgtgaggtttgcatacttggttttaagccctgagcaccatatgctaatcaggcaatcaggattctgtgcctccctgcagtcagttgcatttctatttaaaagtgcattttggtttggaagcccctttctggagcctaactaccaaaaggcagcaactttttgtatcattacaaagaaagctgtgtaagtgcactcccaagcaaaggtgtggtaggagagtagcagccacagaggacccaagcccaagtcttggcctgagttaagttagtgctattgctcccattgacgtgctatgatgtgaagccgtttctggtacagtgttcctttgctcagcaccttaaaagcttggatttaatagtaactgggtaaccttaatcagtagtcagaattatcaacactttgctttatttgacacaaccagactttctcagttcctgttctgtatctagagcaacgtcttcatactgttttttcacaaaatttttatttaaaacagttgtgacagccgaaggatttttttttttttttttacaaaattaaacactggctattaattcctggagttcagatggtcagttgagtctatcctagttttttgcttcacttgttcaatcatggaactttctagaacgctgccactcttcaaaggcttctcaatttcaaatttgaaaacttaattctctccctcttagtttcaaagttgttacagtgttatctatgtgaagtatgtggaaagttgggggctggggattttcctccaggcagattaagaaacagctctccgggtcgggcgctgtggctcaggcctgtaatcccagcactttgggaggctgaggcaggagaatcgctcgaacccgggaggcggaggttgcagtgagctgagatcatgccattgcactccggggcctgggcgacagagccagacgctgtctcaaaaaaaaaaaaaaaaaaaaggcacggtgactcacacctgtaatcccagcactttgggaggccaaggtggagggatcatgaggtcaggagtttgaggccagtctggccaatacagtgaaaccccatctctacta

SEQ ID NO: 283733 - DNA, 1494 bp, Homo sapiens
tccagtctgggtgacagagcgagacttcctctcaaaaaaaaaaaaaaaaaggccaggggcggtggcttatgcctgtaatcccagcactttgggagcccaaggcgggcagatcacccgaagtcaggctggtcttgaagtcctgacctcagtgatccactcgcctcagccgaagtgctgcgattacagacctgagccactgcgcccagccttgatcttgaggtaagagggtactgtacagcagttactctatcataacacctaaataatacctaaagttaaagagttttgatgaagttcttggcagcagtgcttttccccttctgctttccaaaaggaggtaaaaagaagccagtcaatttcaaaaacccctatcctgcttttattttcagctaccttgaaagtgagctgaatcaccatggaaatgtgcaaatgtgaggtttgcatacttggttttaagccctgagcaccatatgctaatcaggcaatcaggattctgtgcctccctgcagtcagttgcatttctatttaaaagtgcattttggtttggaagcccctttctggagcctaactaccaaaaggcagcaactttttgtatcattacaaagaaagctgtgtaagtgcactcccaagcaaaggtgtggtaggagagtagcagccacagaggacccaagcccaagtcttggcctgagttaagttagtgctattgctcccattgacgtgctatgatgtgaagccgtttctggtacagtgttcctttgctcagcaccttaaaagcttggatttaatagtaactgggtaaccttaatcagtagtcagaattatcaacactttgctttatttgacacaaccagactttctcagttcctgttctgtatctagagcaacgtcttcatactgttttttcacaaaatttttatttaaaacagttgtgacagccgaaggatttttttttttttttttacaaaattaaaatgaaataacttgtacaactggtgcgtaccatggctccagccagatgcccaaagcactggctattaattcctggagttcagatggtcagttgagtctatcctagttttttgcttcacttgttcaatcatggaactttctagaacgctgccactcttcaaaggcttctcaatttcaaatttgaaaacttaattctctccctcttagtttcaaagttgttacagtgttatctatgtgaagtgggtcgggcgctgtggctcaggcctgtaatcccagcactttgggaggctgaggcaggagaatcgctcgaacccgggaggcggaggttgcagtgagctgagatcatgccattgcactccggggcctgggcgacagagccagacgctgtctcaaaaaaaaaaaaaaaaaaaaggcacggtgactcacacctgtaatcccagcactttgggaggccaaggtggagggatcatgaggtcaggagtttgaggccagtctggccaatacagtgaaaccccatctctacta

SEQ ID NO: 283734 - DNA, 1497 bp, Homo sapiens
tccagtctgggtgacagagcgagacttcctctcaaaaaaaaaaaaaaaaaggccaggggcggtggcttatgcctgtaatcccagcactttgggagcccaaggcgggcagatcacccgaagtcaggctggtcttgaagtcctgacctcagtgatccactcgcctcagccgaagtgctgcgattacagacctgagccactgcgcccagccttgatcttgaggtaagagggtactgtacagcagttactctatcataacacctaaataatacctaaagttaaagagttttgatgaagttcttggcagcagtgcttttccccttctgctttccaaaaggaggtaaaaagaagccagtcaatttcaaaaacccctatcctgcttttattttcagctaccttgaaagtgagctgaatcaccatggaaatgtgcaaatgtgaggtttgcatacttggttttaagccctgagcaccatatgctaatcaggcaatcaggattctgtgcctccctgcagtcagttgcatttctatttaaaagtgcattttggtttggaagcccctttctggagcctaactaccaaaaggcagcaactttttgtatcattacaaagaaagctgtgtaagtgcactcccaagcaaaggtgtggtaggagagtagcagccacagaggacccaagcccaagtcttggcctgagttaagttagtgctattgctcccattgacgtgctatgatgtgaagccgtttctggtacagtgttcctttgctcagcaccttaaaagcttggatttaatagtaactgggtaaccttaatcagtagtcagaattatcaacactttgctttatttgacacaaccagactttctcagttcctgttctgtatctagagcaacgtcttcatactgttttttcacaaaatttttatttaaaacagttgtgacagccgaaggatttttttttttttttttacaaaattaaaatgaaataacttgtacaactggtgcgtaccatggctccagccagatgcccaaagcactggctattaattcctggagttcagatggtcagttgagtctatcctagttttttgcttcacttgttcaatcatggaactttctagaacgctgccactcttcaaaggcttctcaatttcaaatttgaaaaatgtggaaagttgggggctggggattttcctccaggcagattaagaaacagctctccgggtcgggcgctgtggctcaggcctgtaatcccagcactttgggaggctgaggcaggagaatcgctcgaacccgggaggcggaggttgcagtgagctgagatcatgccattgcactccggggcctgggcgacagagccagacgctgtctcaaaaaaaaaaaaaaaaaaaaggcacggtgactcacacctgtaatcccagcactttgggaggccaaggtggagggatcatgaggtcaggagtttgaggccagtctggccaatacagtgaaaccccatctctacta

SEQ ID NO: 283735 - DNA, 672 bp, Homo sapiens
tccagtctgggtgacagagcgagacttcctctcaaaaaaaaaaaaaaaaaggccaggggcggtggcttatgcctgtaatcccagcactttgggagcccaaggcgggcagatcacccgaagtcaggctggtcttgaagtcctgacctcagtgatccactcgcctcagccgaagtgctgcgattacagacctgagccactgcgcccagccttgatcttgaggtttcctgggagaaggtggcttaaggctgagacacttatgccctgggccagccactggattcctgtgctctgcttcactcctagttaccagaaaggtggaatctggatgagtggaggccccagcggaaaggcgcagatacccggagacttcccagagagactcgacccaccaaaaagcgcaccgcggccgcgcagcccttccttcagctctggaacccagcgccccacacctcaaatgggagaactggtgacctctagtggcccatgaccagcctgcagggcctggggctggcggggattctctgacccaaactctcctgggctctaatgctgttcccctgcccaccctaccttctgccttcacactgctgaggggtccatagccgacaaggaagagctcatttctcatttgtcatgaccatctttaataaaaaataaattagttctgggtgg

SEQ ID NO: 283736 - DNA, 666 bp, Homo sapiens
agagacggggttttgccgtgttggtcaggctggtcttgaagtcctgacctcagtgatccactcgcctcagccgaagtgctgcgattacagacctgagccactgcgcccagccttgatcttgaggtaagagggtactgtacagcagttactctatcataacacctaaataatacctaaagttaaagagttttgatgaagttcttggcagcagtgcttttccccttctgctttccaaaaggaggtaaaaagaagccagtcaatttcaaaaacccctatcctgcttttattttcagctaccttgaaagtgagctgaatcaccatggaaatgtgcaaatgtgaggtttgcatacttggttttaagccctgagcaccatatgctaatcaggcaatcaggattctgtgcctccctgcagtcagttgcatttctatttaaaagtgcattttggtttggaagcccctttctggagcctaactaccaaaaggcagcaactttttgtatcattacaaagaaagctgtgtaagtgcactcccaagcaaaggtgtggtaggagagtagcagccacagaggacccaagcccaagtcttggcctgagttaagttagtgctattgctcccattgacgtgctatgatgtgaagccgtttctggtacagtgttcctttgctca

SEQ ID NO: 283737 - DNA, 6831 bp, Homo sapiens
aatctcccaaggcctaaggaggcaagaggcctgcaaatcgcctcctgctcagcaaacgggttgctcagcaggcccggggtcctggtccaccccaggtccctggtttgcccacctccgatggcggccttcgctggcagggtgggcgcctctggggagccagctccgtcccggcgcctttagagccccatctcttccacgtccctggccttcctccccttccaggcggctgtccccgccggggtccagatggtgtcggagggccggcggttcgacggcgggcccggggttcagcctcccggcctccctccgtccctgactctcctttcttcggagagggcgcgggggccggggccaaagcgccgctcttggggttctcctggactcggagttgccccaggcgggcgcagctctgccccgcggggtgccagcctcgggcgggcaaggtccgtgagtcaccgcctgtaaccgaacaccaggcctccctgccccctcccccagctccggccgccaggctgcggcgacacctacaagaaaatgaaggggcgcccaggcccgcggcggccccggccgtatcgcgagcaggtcccggcggcccccggctcgcggcgctctttcttccccggccccggggctcggccagccgcaaccgccgccccggcgccagcaggaatccaggccgagcgaccggccccggagcccgaggcggcggagggcccgcggtagctgcgactggcgagcccgagagcgcccggggagggggcgcccggcttggaatttcccggtcccttccggcccagcgaggacaaagcactcctggccgccgccgccgccgccgccgtggcctacgccgcgccgcacaaagggcgagtcgcgacacgctcccatccccctcccagctcacggcggccccggccccgggtggctgcagggaggtgggggaagccctggctgcaccgcccctcgctccccctcccctggggccgcgcgagcgccgcccccgccccgtctgcgcgtcctcccggggaggggttggggggcgcggcgccccacataacactccccctcctgcgctgcgagccaccctctcccctccctcctgcaaacaccaccgcctcccctgccaccgccgccacctcgcccgacgctccacagctcgccgcggccggggggcggtgcgcggaccgtgcgcgccgcgggcgccagatgtgcagtccccgccgccgccagtgaccgagccgcagtccgagcggtatcgggccgcctccctgatgctgcgggggcgaccttgagcgtacagcggcttccctcggtggggaccccgacatcccagcgctgtgcccggtcttgccctctgtagcccggctcgccccgcgcttggacatggaaggggccgccgcgcctgtggcgggggaccgccccgacttggggctgggggcgccgggctctccccgagaggcggtggcgggggcgactgcagccctggagcccaggaagccgcacggggtgaagcggcatcaccacaagcacaacttgaagcaccgctacgagctgcaggagaccctgggcaaaggcacctacggcaaagtcaagcgggccaccgagaggttttctggccgagtggttgctataaaatccattcgtaaggacaaaattaaggatgaacaagacatggttcacatcagacgagagattgagatcatgtcatctctcaaccatcctcatatcatcagtatttatgaagtgtttgagaacaaagataagattgtgatcatcatggaatatgccagcaaaggggagctgtacgattacatcagtgagcggcgacgcctcagtgagagggagacccggcacttcttccggcagatcgtctctgctgtgcactattgtcacaagaacggtgtggtccaccgggacttgaagctggaaaatatactgctcgatgacaactgcaatattaagattgctgactttgggctttccaacctgtaccagaaggataagttcttacaaacgttttgtgggagtccactctatgcatctcctgagattgtcaatgggagaccttaccgagggccagaggtggacagctgggccctgggtgtgttgctttacactcttgtttatggaacaatgcccttcgatggtttcgatcacaaaaacctcattcggcaaatcagcagcggagagtaccgggagccaacacagccctcagatgctcgaggactcatacggtggatgctgatggtgaaccccgatcgccgggccactattgaggacattgccaaccactggtgggtgaactggggctataagagcagcgtgtgtgactgtgatgccctccatgactctgagtccccactcctggctcggatcattgactggcaccaccgttccacagggctgcaggctgacaccgaagccaaaatgaagggcctggccaaacccacgacctctgaggtcatgctagagcggcagcggtcgctgaagaaatccaagaaagagaatgactttgctcagtctggtcaggatgcagtgcctgaaagcccatccaagttgagttctaagaggcccaaggggatcctgaagaagcgaagcaacagcgagcatcgctctcacagcactggcttcattgaaggtgtagttggtcctgccttaccctctactttcaagatggagcaggacttgtgcaggactggcgtgctcctcccaagctcaccagaggcagaggtgccgggaaaactcagccccaagcagtcggccacgatgcccaagaaaggcatcttgaaaaagacccagcagagagaatcaggttactactcttccccagagcgcagtgagtcttcggagctgttggacagtaatgatgtgatgggcagcagcatcccctcccccagccccccggacccagccagggtaacctcccacagcctctcctgccggaggaagggcatcttgaaacacagcagcaaatactcagcgggcaccatggacccagccctggtcagccctgaaatgcccacactggaatccctgtcagagcctggtgtccctgccgagggcctctcccggagctacagccgcccttccagtgtcatcagcgatgacagcgtgctgtccagcgactcttttgacttgctggatttgcaggagaatcgccctgcccgccagcgcatccgcagctgcgtctctgcagaaaacttcctccagatccaggactttgaggggctccagaaccggccccggccccagtacctgaagcggtaccggaaccggctggcagacagcagcttctccctcctcacagacatggatgatgtgactcaggtctacaagcaagcgctggagatctgcagcaagctcaactagcattccagggcgcccaggggcgggcgggggtacgagggaggaaggggagcaagacttgggctcacaggctggttacctctttgctggctgtgacaacagactgaaaaaggattggcactgtctcacttggccaagtttgcagccttgagccaacacctaaaagggagaggtgggctcttctgccagttctgtcaattgtcagtcagaatttgggccctgtttggcatttgctttatggcacctcctagaggaccagctgtccaggggaggtggtattgaccggcactcagtgggtggagaggaagcatatgtggaaggagcatttccttagaagtcatccagatgcttctggaggaggggcaggagacacttgggctgtttgccttgggtgagcccaaagaacttgccccttttctccttgcattagcaagctaggtctggctgcgtggagctggcaagtagatttcagcaacttgagcttgagttgatgatcaattaatagtggctgccagttgtgctggcgtaagtggcccacatcatggggaaggagtgctgtgattgactagtaatggctaccacgggaaagggaaggggaagcagtagcactaatgctatgtagttgtcatctttgatctggctaggccctgggaatcgggtttagtcatcctgtgggatctgtgttaactctttcatgccactggtgaggcatttgttaatttgctactcaactttgaggaaagacagggccttggtcagagagagaatgctctgaactctgctaaggacatagagtcagcccatggtgatttagctccttgctgttcacctcctctttcctgatgtctgccttgctctacagcacaacctcttgagggtggacagggagaaagatgatggtgtcagaggtcaaaactattatatatgacagggcacaagatggtctgtgatctttgcacagatgaatggaagttgatgcacaccaacaagaggcaacttgtcactttctttctcaatattaactggaatgctgcctcttgggttctcacctgcatggatgctttgagttggacgtgatactgtccatattctccagaggattacctggctgaaccattggctctgttcaccagtgacagatggtttccccatccactgagtgtagcatcctcagaggtaggcaagtttgcttctagggagttagcatgtagatgggatattgggatgaggaaaggaaaatcaggtagatggtgctttttttcccccaaatctaagtattctatgtcatggttttaaactttgccatgaactcctgggctttgggggaagagaaagttccattcatttaaatgaataaggtgttgaaagagtgcagggggttgggaggaagcatgtaagagagggaacatttccttagatgttacccagatggttctgggggagacagaaaagaggtgcggcaggactcttatcttaaaaagtaaacaaaacaaaacaaaacaaaacaaaaaactagatatgtaatttctaaacacccagatcacaatgacaagatgccactccaaccatgggacaccttcatgatactaggtttgtacttcctggtctctgggatgacttcagattctgctggccaaggcaaattgaactcagttcaagatggccaccactggtagacgtgtagatagaaaagaggactggtcttgggaacatctttggaaaaaccaacaaacaatagttctagggagatgagaaaaaaattcaccttacagtgctaagaaagtgcattagaatggaattgccctttccttaaggagacagtttgggctctccccttgccaccggctctggtgttttggcttatgcgttccttcaggttgagctgagcagtgtgttatgggaagctgctcaatttcctttcattcaattccacctccttcctgaactctaatagaggttaaaagggaaaaaaaaaattctgtagatagcaaattgtgtgtgtgggggggggtgggggtgtgggtgcatggaggacaacctgcaactctgagctccctacttcctgcctcatttcatgcagtcttttctgaacagcctatgctgctgccctgctggccccttgtgcacggcagctggccgtgtccgtagctgtcagtatgacttagatctagctcctacctactggttgatgtgttttttccttttgccaagtgattgagtctgtttagtagtttccatcattctagtctttaagtaaaaatgacactattgaggaaagtcagtctactcccttcttcctccccccaaacacgtgttctcttttgtcaggaaactcagccagtggactgtggcagagaaagtcctccactcagaggcagagactgagttaagtcataggtggccttaggcatctgcattgtttgcaggggttaagttttccttccagtgagggctggagggatgaattagctggtacctgaagccccgcttagctctgacactctgccaacatcctctgattctaggtgtggtgttgactgtcctttcaaggaaaaacttgcaatagagggaaaagccattaaagcagctccctgcttcatcattaagtcctgtcatccctaccagccaatcccagtcaaagaagttatgctttattcacttctgtggaattacaagtgagagacacttttaggacctgatggacaaagcaggagattcactgtcagctttcctggtcctctccttacttctgtgggccttgcaccgtcttagtttacacatctgccaaaggggtagaattacacttctttttacaggtaaatgtcaaggcacaatcagttttcaggaagtgcttcaagaccccaggtgaaatgaaaatgctaagtaccctctgaatggccatgcctgttaccaggtgctgcttcttcagatgatggggagcacttttcagggtgaaattcaggcgagttttgcccaggcctgctgtcttgagtacaaatgtgaatgatcgactgactgcttgttgccaaactggaaatgttctgtagggatttactggcatggtatcattcctagaagaaaaaaagagagaaacttgactgcacattaaaaaaaaaaaaatccacattgtgacttttatttaatttctattttttttggtaataaaaagttgacttttttatttgaatttgtcttttttatttattggtctgaaaggcatttcaaaggtattataataatatattggtgtaatttaattggtgcaacatgctttatggctcctgtcaaaattggttttcactcatttgattggtttgagcccagaacagcctacaggggaaaaacaagctggataaccacccaaagtgtttgtattttcgttggaaactgatttttgtttcattttggtttttgtttctgtttttatttttaaattaaataaattgcaatgaactgaaaaaaaaaaat

SEQ ID NO: 283738 - DNA, 2874 bp, Homo sapiens
aatctcccaaggcctaaggaggcaagaggcctgcaaatcgcctcctgctcagcaaacgggttgctcagcaggcccggggtcctggtccaccccaggtccctggtttgcccacctccgatggcggccttcgctggcagggtgggcgcctctggggagccagctccgtcccggcgcctttagagccccatctcttccacgtccctggccttcctccccttccaggcggctgtccccgccggggtccagatggtgtcggagggccggcggttcgacggcgggcccggggttcagcctcccggcctccctccgtccctgactctcctttcttcggagagggcgcgggggccggggccaaagcgccgctcttggggttctcctggactcggagttgccccaggcgggcgcagctctgccccgcggggtgccagcctcgggcgggcaaggtccgtgagtcaccgcctgtaaccgaacaccaggcctccctgccccctcccccagctccggccgccaggctgcggcgacacctacaagaaaatgaaggggcgcccaggcccgcggcggccccggccgtatcgcgagcaggtcccggcggcccccggctcgcggcgctctttcttccccggccccggggctcggccagccgcaaccgccgccccggcgccagcaggaatccaggccgagcgaccggccccggagcccgaggcggcggagggcccgcggtagctgcgactggcgagcccgagagcgcccggggagggggcgcccggcttggaatttcccggtcccttccggcccagcgaggacaaagcactcctggccgccgccgccgccgccgccgtggcctacgccgcgccgcacaaagggcgagtcgcgacacgctcccatccccctcccagctcacggcggccccggccccgggtggctgcagggaggtgggggaagccctggctgcaccgcccctcgctccccctcccctggggccgcgcgagcgccgcccccgccccgtctgcgcgtcctcccggggaggggttggggggcgcggcgccccacataacactccccctcctgcgctgcgagccaccctctcccctccctcctgcaaacaccaccgcctcccctgccaccgccgccacctcgcccgacgctccacagctcgccgcggccggggggcggtgcgcggaccgtgcgcgccgcgggcgccagatgtgcagtccccgccgccgccagtgaccgagccgcagtccgagcggtatcgggccgcctccctgatgctgcgggggcgaccttgagcgtacagcggcttccctcggtggggaccccgacatcccagcgctgtgcccggtcttgccctctgtagcccggctcgccccgcgcttggacatggaaggggccgccgcgcctgtggcgggggaccgccccgacttggggctgggggcgccgggctctccccgagaggcggtggcgggggcgactgcagccctggagcccaggaagccgcacggggtgaagcggcatcaccacaagcacaacttgaagcaccgctacgagctgcaggagaccctgggcaaaggcacctacggcaaagtcaagcgggccaccgagaggttttctggccgagtggttgctataaaatccattcgtaaggacaaaattaaggatgaacaagacatggttcacatcagacgagagattgagatcatgtcatctctcaaccatcctcatatcatcagtatttatgaagtgtttgagaacaaagataagattgtgatcatcatggaatatgccagcaaaggggagctgtacgattacatcagtgagcggcgacgcctcagtgagagggagacccggcacttcttccggcagatcgtctctgctgtgcactattgtcacaagaacggtgtggtccaccgggacttgaagctggaaaatataccagcagagagaatcaggttactactcttccccagagcgcagtgagtcttcggagctgttggacagtaatgatgtgatgggcagcagcatcccctcccccagccccccggacccagccagggtaacctcccacagcctctcctgccggaggaagggcatcttgaaacacagcagcaaatactcagcgggcaccatggacccagccctggtcctctccttacttctgtgggccttgcaccgtcttagtttacacatctgccaaaggggtagaattacacttctttttacaggtaaatgtcaaggcacaatcagttttcaggaagtgcttcaagaccccaggtgaaatgaaaatgctaagtaccctctgaatggccatgcctgttaccaggtgctgcttcttcagatgatggggagcacttttcagggtgaaattcaggcgagttttgcccaggcctgctgtcttgagtacaaatgtgaatgatcgactgactgcttgttgccaaactggaaatgttctgtagggatttactggcatggtatcattcctagaagaaaaaaagagagaaacttgactgcacattaaaaaaaaaaaaatccacattgtgacttttatttaatttctattttttttggtaataaaaagttgacttttttatttgaatttgtcttttttatttattggtctgaaaggcatttcaaaggtattataataatatattggtgtaatttaattggtgcaacatgctttatggctcctgtcaaaattggttttcactcatttgattggtttgagcccagaacagcctacaggggaaaaacaagctggataaccacccaaagtgtttgtattttcgttggaaactgatttttgtttcattttggtttttgtttctgtttttatttttaaattaaataaattgcaatgaactgaaaaaaaaaaat

SEQ ID NO: 283739 - DNA, 4593 bp, Homo sapiens
tggccatgttaagcagcctctgctttatgaaaaaacaaaaacaaaacaaaacaaaaacaaaaacaaaaccaccatcacaaatcccaggctgtcaaacctgatgttttctgttgccaggagaagggtgtttttgctgtgtatgaaagacatgacaagggggcatttccaagctttgttttggttattgtcagttctgccaacaagtaacatctgtatttattttccaaactcccccaatggctgatttgcatctgtttagctctctgaataacatttcatttcctgactttataggttgctataaaatccattcgtaaggacaaaattaaggatgaacaagacatggttcacatcagacgagagattgagatcatgtcatctctcaaccatcctcatatcatcagtatttatgaagtgtttgagaacaaagataagattgtgatcatcatggaatatgccagcaaaggggagctgtacgattacatcagtgagcggcgacgcctcagtgagagggagacccggcacttcttccggcagatcgtctctgctgtgcactattgtcacaagaacggtgtggtccaccgggacttgaagctggaaaatatactgctcgatgacaactgcaatattaagattgctgactttgggctttccaacctgtaccagaaggataagttcttacaaacgttttgtgggagtccactctatgcatctcctgagattgtcaatgggagaccttaccgagggccagaggtggacagctgggccctgggtgtgttgctttacactcttgtttatggaacaatgcccttcgatggtttcgatcacaaaaacctcattcggcaaatcagcagcggagagtaccgggagccaacacagccctcagatgctcgaggactcatacggtggatgctgatggtgaaccccgatcgccgggccactattgaggacattgccaaccactggtgggtgaactggggctataagagcagcgtgtgtgactgtgatgccctccatgactctgagtccccactcctggctcggatcattgactggcaccaccgttccacagggctgcaggctgacaccgaagccaaaatgaagggcctggccaaacccacgacctctgaggtcatgctagagcggcagcggtcgctgaagaaatccaagaaagagaatgactttgctcagtctggtcaggatgcagtgcctgaaagcccatccaagttgagttctaagaggcccaaggggatcctgaagaagcgaagcaacagcgagcatcgctctcacagcactggcttcattgaaggtgtagttggtcctgccttaccctctactttcaagatggagcaggacttgtgcaggactggcgtgctcctcccaagctcaccagaggcagaggtgccgggaaaactcagccccaagcagtcggccacgatgcccaagaaaggcatcttgaaaaagacccagcagagagaatcaggttactactcttccccagagcgcagtgagtcttcggagctgttggacagtaatgatgtgatgggcagcagcatcccctcccccagccccccggacccagccagggtaacctcccacagcctctcctgccggaggaagggcatcttgaaacacagcagcaaatactcagcgggcaccatggacccagccctggtcagccctgaaatgcccacactggaatccctgtcagagcctggtgtccctgccgagggcctctcccggagctacagccgcccttccagtgtcatcagcgatgacagcgtgctgtccagcgactcttttgacttgctggatttgcaggagaatcgccctgcccgccagcgcatccgcagctgcgtctctgcagaaaacttcctccagatccaggactttgaggggctccagaaccggccccggccccagtacctgaagcggtaccggaaccggctggcagacagcagcttctccctcctcacagacatggatgatgtgactcaggtctacaagcaagcgctggagatctgcagcaagctcaactagcattccagggcgcccaggggcgggcgggggtacgagggaggaaggggagcaagacttgggctcacaggctggttacctctttgctggctgtgacaacagactgaaaaaggattggcactgtctcacttggccaagtttgcagccttgagccaacacctaaaagggagaggtgggctcttctgccagttctgtcaattgtcagtcagaatttgggccctgtttggcatttgctttatggcacctcctagaggaccagctgtccaggggaggtggtattgaccggcactcagtgggtggagaggaagcatatgtggaaggagcatttccttagaagtcatccagatgcttctggaggaggggcaggagacacttgggctgtttgccttgggtgagcccaaagaacttgccccttttctccttgcattagcaagctaggtctggctgcgtggagctggcaagtagatttcagcaacttgagcttgagttgatgatcaattaatagtggctgccagttgtgctggcgtaagtggcccacatcatggggaaggagtgctgtgattgactagtaatggctaccacgggaaagggaaggggaagcagtagcactaatgctatgtagttgtcatctttgatctggctaggccctgggaatcgggtttagtcatcctgtgggatctgtgttaactctttcatgccactggtgaggcatttgttaatttgctactcaactttgaggaaagacagggccttggtcagagagagaatgctctgaactctgctaaggacatagagtcagcccatggtgatttagctccttgctgttcacctcctctttcctgatgtctgccttgctctacagcacaacctcttgagggtggacagggagaaagatgatggtgtcagaggtcaaaactattatatatgacagggcacaagatggtctgtgatctttgcacagatgaatggaagttgatgcacaccaacaagaggcaacttgtcactttctttctcaatattaactggaatgctgcctcttgggttctcacctgcatggatgctttgagttggacgtgatactgtccatattctccagaggattacctggctgaaccattggctctgttcaccagtgacagatggtttccccatccactgagtgtagcatcctcagaggtaggcaagtttgcttctagggagttagcatgtagatgggatattgggatgaggaaaggaaaatcaggtagatggtgctttttttcccccaaatctaagtattctatgtcatggttttaaactttgccatgaactcctgggctttgggggaagagaaagttccattcatttaaatgaataaggtgttgaaagagtgcagggggttgggaggaagcatgtaagagagggaacatttccttagatgttacccagatggttctgggggagacagaaaagaggtgcggcaggactcttatcttaaaaagtaaacaaaacaaaacaaaacaaaacaaaaaactagatatgtaatttctaaacacccagatcacaatgacaagatgccactccaaccatgggacaccttcatgatactaggtttgtacttcctggtctctgggatgacttcagattctgctggccaaggcaaattgaactcagttcaagatggccaccactggtagacgtgtagatagaaaagaggactggtcttgggaacatctttggaaaaaccaacaaacaatagttctagggagatgagaaaaaaattcaccttacagtgctaagaaagtgcattagaatggaattgccctttccttaaggagacagtttgggctctccccttgccaccggctctggtgttttggcttatgcgttccttcaggttgagctgagcagtgtgttatgggaagctgctcaatttcctttcattcaattccacctccttcctgaactctaatagaggttaaaagggaaaaaaaaaattctgtagatagcaaattgtgtgtgtgggggggggtgggggtgtgggtgcatggaggacaacctgcaactctgagctccctacttcctgcctcatttcatgcagtcttttctgaacagcctatgctgctgccctgctggccccttgtgcacggcagctggccgtgtccgtagctgtcagtatgacttagatctagctcctacctactggttgatgtgttttttccttttgccaagtgattgagtctgtttagtaatttctattttttttggtaataaaaagttgacttttttatttgaatttgtcttttttatttattggtctgaaaggcatttcaaaggtattataataatatattggtgtaatttaattggtgcaacatgctttatggctcctgtcaaaattggttttcactcatttgattggtttgagcccagaacagcctacaggggaaaaacaagctggataaccacccaaagtgtttgtattttcgttggaaactgatttttgtttcattttggtttttgtttctgtttttatttttaaattaaataaattgcaatgaactgaaaaaaaaaaat

SEQ ID NO: 283740 - DNA, 1121 bp, Homo sapiens
tggccatgttaagcagcctctgctttatgaaaaaacaaaaacaaaacaaaacaaaaacaaaaacaaaaccaccatcacaaatcccaggctgtcaaacctgatgttttctgttgccaggagaagggtgtttttgctgtgtatgaaagacatgacaagggggcatttccaagctttgttttggttattgtcagttctgccaacaagtaacatctgtatttattttccaaactcccccaatggctgatttgcatctgtttagctctctgaataacatttcatttcctgactttataggttgctataaaatccattcgtaaggacaaaattaaggatgaacaagacatggttcacatcagacgagagattgagatcatgtcatctctcaaccatcctcatatcatcagtatttatgaagtgtttgagaacaaagataagattgtgatcatcatggaatatgccagcaaaggggagctgtacgattacatcagtgagcggcgacgcctcagtgagagggagacccggcacttcttccggcagatcgtctctgctgtgcactattgtcacaagaacggtgtggtccaccgggacttgaagctggaaaatatactgctcgatgacaactgcaatattaagattgctgactttgggctttccaacctgtaccagaaggataagttcttacaaacgttttgtgggagtccactctatgcatctcctgagattgtcaatgggagaccttaccgagggccagaggtggacagctgggccctgggtgtgttgctttacactcttgtttatggaacaatgcccttcgatggtttcgatcacaaaaacctcattcggcaaatcagcagcggagagtaccgggagccaacacagccctcagaccctccagaaagctcttggaaggagaggtgcatcatagagcaagattgaagagttcctggatcctggccataatatcagatgaggaaacacttttggaaaagtgcagtaacttgcccaagtcaaccaactgttaaatgtgcatctggattcaaatatgggcctgggtgactgactttcaagtccaagctcttagttgctctgttgggaatcagggatgatgattctgcaactca

SEQ ID NO: 283741 - DNA, 736 bp, Homo sapiens
tgcctttttttcttttttcaaagcatcagggttcttcgagtaaacgactctggccatgttaagcagcctctgctttatgaaaaaacaaaaacaaaacaaaacaaaaacaaaaacaaaaccaccatcacaaatcccaggctgtcaaacctgatgttttctgttgccaggagaagggtgtttttgctgtgtatgaaagacatgacaagggggcatttccaagctttgttttggttattgtcagttctgccaacaagtaacatctgtatttattttccaaactcccccaatggctgatttgcatctgtttagctctctgaataacatttcatttcctgactttataggttgctataaaatccattcgtaaggacaaaattaaggatgaacaagacatggttcacatcagacgagagattgagatcatgtcatctctcaaccatcctcatatcatcagtatttatgaaggtcagtgatttttttttttttaacccccatatcagttaccatttctcataccatggggcctgccaagactttgagataattgcccttctgggcagaagccaagtatttttcctcatgatgcaaaaatagtcgggtgttatctcttacttggttaccttgaacacaaccagacacatgagtgcagctcattttggtcataaaatatctctggcggataccttattctgtcttcttaattccttggcagttgctaagcaacccaccttattga

SEQ ID NO: 283742 - DNA, 5505 bp, Homo sapiens
tggccatgttaagcagcctctgctttatgaaaaaacaaaaacaaaacaaaacaaaaacaaaaacaaaaccaccatcacaaatcccaggctgtcaaacctgatgttttctgttgccaggagaagggtgtttttgctgtgtatgaaagacatgacaagggggcatttccaagctttgttttggttattgtcagttctgccaacaagtaacatctgtatttattttccaaactcccccaatggctgatttgcatctgtttagctctctgaataacatttcatttcctgactttataggttgctataaaatccattcgtaaggacaaaattaaggatgaacaagacatggttcacatcagacgagagattgagatcatgtcatctctcaaccatcctcatatcatcagtatttatgaagtgtttgagaacaaagataagattgtgatcatcatggaatatgccagcaaaggggagctgtacgattacatcagtgagcggcgacgcctcagtgagagggagacccggcacttcttccggcagatcgtctctgctgtgcactattgtcacaagaacggtgtggtccaccgggacttgaagctggaaaatatactgctcgatgacaactgcaatattaagattgctgactttgggctttccaacctgtaccagaaggataagttcttacaaacgttttgtgggagtccactctatgcatctcctgagattgtcaatgggagaccttaccgagggccagaggtggacagctgggccctgggtgtgttgctttacactcttgtttatggaacaatgcccttcgatggtttcgatcacaaaaacctcattcggcaaatcagcagcggagagtaccgggagccaacacagccctcagatgctcgaggactcatacggtggatgctgatggtgaaccccgatcgccgggccactattgaggacattgccaaccactggtgggtgaactggggctataagagcagcgtgtgtgactgtgatgccctccatgactctgagtccccactcctggctcggatcattgactggcaccaccgttccacagggctgcaggctgacaccgaagccaaaatgaagggcctggccaaacccacgacctctgaggtcatgctagagcggcagcggtcgctgaagaaatccaagaaagagaatgactttgctcagtctggtcaggatgcagtgcctgaaagcccatccaagttgagttctaagaggcccaaggggatcctgaagaagcgaagcaacagcgagcatcgctctcacagcactggcttcattgaaggtgtagttggtcctgccttaccctctactttcaagatggagcaggacttgtgcaggactggcgtgctcctcccaagctcaccagaggcagaggtgccgggaaaactcagccccaagcagtcggccacgatgcccaagaaaggcatcttgaaaaagacccagcagagagaatcaggttactactcttccccagagcgcagtgagtcttcggagctgttggacagtaatgatgtgatgggcagcagcatcccctcccccagccccccggacccagccagggtaacctcccacagcctctcctgccggaggaagggcatcttgaaacacagcagcaaatactcagcgggcaccatggacccagccctggtcagccctgaaatgcccacactggaatccctgtcagagcctggtgtccctgccgagggcctctcccggagctacagccgcccttccagtgtcatcagcgatgacagcgtgctgtccagcgactcttttgacttgctggatttgcaggagaatcgccctgcccgccagcgcatccgcagctgcgtctctgcagaaaacttcctccagatccaggactttgaggggctccagaaccggccccggccccagtacctgaagcggtaccggaaccggctggcagacagcagcttctccctcctcacagacatggatgatgtgactcaggtctacaagcaagcgctggagatctgcagcaagctcaactagcattccagggcgcccaggggcgggcgggggtacgagggaggaaggggagcaagacttgggctcacaggctggttacctctttgctggctgtgacaacagactgaaaaaggattggcactgtctcacttggccaagtttgcagccttgagccaacacctaaaagggagaggtgggctcttctgccagttctgtcaattgtcagtcagaatttgggccctgtttggcatttgctttatggcacctcctagaggaccagctgtccaggggaggtggtattgaccggcactcagtgggtggagaggaagcatatgtggaaggagcatttccttagaagtcatccagatgcttctggaggaggggcaggagacacttgggctgtttgccttgggtgagcccaaagaacttgccccttttctccttgcattagcaagctaggtctggctgcgtggagctggcaagtagatttcagcaacttgagcttgagttgatgatcaattaatagtggctgccagttgtgctggcgtaagtggcccacatcatggggaaggagtgctgtgattgactagtaatggctaccacgggaaagggaaggggaagcagtagcactaatgctatgtagttgtcatctttgatctggctaggccctgggaatcgggtttagtcatcctgtgggatctgtgttaactctttcatgccactggtgaggcatttgttaatttgctactcaactttgaggaaagacagggccttggtcagagagagaatgctctgaactctgctaaggacatagagtcagcccatggtgatttagctccttgctgttcacctcctctttcctgatgtctgccttgctctacagcacaacctcttgagggtggacagggagaaagatgatggtgtcagaggtcaaaactattatatatgacagggcacaagatggtctgtgatctttgcacagatgaatggaagttgatgcacaccaacaagaggcaacttgtcactttctttctcaatattaactggaatgctgcctcttgggttctcacctgcatggatgctttgagttggacgtgatactgtccatattctccagaggattacctggctgaaccattggctctgttcaccagtgacagatggtttccccatccactgagtgtagcatcctcagaggtaggcaagtttgcttctagggagttagcatgtagatgggatattgggatgaggaaaggaaaatcaggtagatggtgctttttttcccccaaatctaagtattctatgtcatggttttaaactttgccatgaactcctgggctttgggggaagagaaagttccattcatttaaatgaataaggtgttgaaagagtgcagggggttgggaggaagcatgtaagagagggaacatttccttagatgttacccagatggttctgggggagacagaaaagaggtgcggcaggactcttatcttaaaaagtaaacaaaacaaaacaaaacaaaacaaaaaactagatatgtaatttctaaacacccagatcacaatgacaagatgccactccaaccatgggacaccttcatgatactaggtttgtacttcctggtctctgggatgacttcagattctgctggccaaggcaaattgaactcagttcaagatggccaccactggtagacgtgtagatagaaaagaggactggtcttgggaacatctttggaaaaaccaacaaacaatagttctagggagatgagaaaaaaattcaccttacagtgctaagaaagtgcattagaatggaattgccctttccttaaggagacagtttgggctctccccttgccaccggctctggtgttttggcttatgcgttccttcaggttgagctgagcagtgtgttatgggaagctgctcaatttcctttcattcaattccacctccttcctgaactctaatagaggttaaaagggaaaaaaaaaattctgtagatagcaaattgtgtgtgtgggggggggtgggggtgtgggtgcatggaggacaacctgcaactctgagctccctacttcctgcctcatttcatgcagtcttttctgaacagcctatgctgctgccctgctggccccttgtgcacggcagctggccgtgtccgtagctgtcagtatgacttagatctagctcctacctactggttgatgtgttttttccttttgccaagtgattgagtctgtttagtagtttccatcattctagtctttaagtaaaaatgacactattgaggaaagtcagtctactcccttcttcctccccccaaacacgtgttctcttttgtcaggaaactcagccagtggactgtggcagagaaagtcctccactcagaggcagagactgagttaagtcataggtggccttaggcatctgcattgtttgcaggggttaagttttccttccagtgagggctggagggatgaattagctggtacctgaagccccgcttagctctgacactctgccaacatcctctgattctaggtgtggtgttgactgtcctttcaaggaaaaacttgcaatagagggaaaagccattaaagcagctccctgcttcatcattaagtcctgtcatccctaccagccaatcccagtcaaagaagttatgctttattcacttctgtggaattacaagtgagagacacttttaggacctgatggacaaagcaggagattcactgtcagctttcctggtcctctccttacttctgtgggccttgcaccgtcttagtttacacatctgccaaaggggtagaattacacttctttttacaggtaaatgtcaaggcacaatcagttttcaggaagtgcttcaagaccccaggtgaaatgaaaatgctaagtaccctctgaatggccatgcctgttaccaggtgctgcttcttcagatgatggggagcacttttcagggtgaaattcaggcgagttttgcccaggcctgctgtcttgagtacaaatgtgaatgatcgactgactgcttgttgccaaactggaaatgttctgtagggatttactggcatggtatcattcctagaagaaaaaaagagagaaacttgactgcacattaaaaaaaaaaaaatccacattgtgacttttatttaatttctattttttttggtaataaaaagttgacttttttatttgaatttgtcttttttatttattggtctgaaaggcatttcaaaggtattataataatatattggtgtaatttaattggtgcaacatgctttatggctcctgtcaaaattggttttcactcatttgattggtttgagcccagaacagcctacaggggaaaaacaagctggataaccacccaaagtgtttgtattttcgttggaaactgatttttgtttcattttggtttttgtttctgtttttatttttaaattaaataaattgcaatgaactgaaaaaaaaaaat

SEQ ID NO: 283743 - DNA, 4138 bp, Homo sapiens
  misc_feature (4058)..(4058): n is a, c, g, or t
tggccatgttaagcagcctctgctttatgaaaaaacaaaaacaaaacaaaacaaaaacaaaaacaaaaccaccatcacaaatcccaggctgtcaaacctgatgttttctgttgccaggagaagggtgtttttgctgtgtatgaaagacatgacaagggggcatttccaagctttgttttggttattgtcagttctgccaacaagtaacatctgtatttattttccaaactcccccaatggctgatttgcatctgtttagctctctgaataacatttcatttcctgactttataggttgctataaaatccattcgtaaggacaaaattaaggatgaacaagacatggttcacatcagacgagagattgagatcatgtcatctctcaaccatcctcatatcatcagtatttatgaagtgtttgagaacaaagataagattgtgatcatcatggaatatgccagcaaaggggagctgtacgattacatcagtgagcggcgacgcctcagtgagagggagacccggcacttcttccggcagatcgtctctgctgtgcactattgtcacaagaacggtgtggtccaccgggacttgaagctggaaaatatactgctcgatgacaactgcaatattaagattgctgactttgggctttccaacctgtaccagaaggataagttcttacaaacgttttgtgggagtccactctatgcatctcctgagattgtcaatgggagaccttaccgagggccagaggtggacagctgggccctgggtgtgttgctttacactcttgtttatggaacaatgcccttcgatggtttcgatcacaaaaacctcattcggcaaatcagcagcggagagtaccgggagccaacacagccctcagatgctcgaggactcatacggtggatgctgatggtgaaccccgatcgccgggccactattgaggacattgccaaccactggtgggtgaactggggctataagagcagcgtgtgtgactgtgatgccctccatgactctgagtccccactcctggctcggatcattgactggcaccaccgttccacagggctgcaggctgacaccgaagccaaaatgaagggcctggccaaacccacgacctctgaggtcatgctagagcggcagcggtcgctgaagaaatccaagaaagagaatgactttgctcagtctggtcaggatgcagtgcctgaaagcccatccaagttgagttctaagaggcccaaggggatcctgaagaagcgaagcaacagcgagcatcgctctcacagcactggcttcattgaaggtgtagttggtcctgccttaccctctactttcaagatggagcaggacttgtgcaggactggcgtgctcctcccaagctcaccagaggcagaggtgccgggaaaactcagccccaagcagtcggccacgatgcccaagaaaggcatcttgaaaaagacccagcagagagaatcaggttactactcttccccagagcgcagtgagtcttcggagctgttggacagtaatgatgtgatgggcagcagcatcccctcccccagccccccggacccagccagggtaacctcccacagcctctcctgccggaggaagggcatcttgaaacacagcagcaaatactcagcgggcaccatggacccagccctggtcagccctgaaatgcccacactggaatccctgtcagagcctggtgtccctgccgagggcctctcccggagctacagccgcccttccagtgtcatcagcgatgacagcgtgctgtccagcgactcttttgacttgctggatttgcaggagaatcgccctgcccgccagcgcatccgcagctgcgtctctgcagaaaacttcctccagatccaggactttgaggggctccagaaccggccccggccccagtacctgaagcggtaccggaaccggctggcagacagcagcttctccctcctcacagacatggatgatgtgactcaggtctacaagcaagcgctggagatctgcagcaagctcaactagcattccagggcgcccaggggcgggcgggggtacgagggaggaaggggagcaagacttgggctcacaggctggttacctctttgctggctgtgacaacagactgaaaaaggattggcactgtctcacttggccaagtttgcagccttgagccaacacctaaaagggagaggtgggctcttctgccagttctgtcaattgtcagtcagaatttgggccctgtttggcatttgctttatggcacctcctagaggaccagctgtccaggggaggtggtattgaccggcactcagtgggtggagaggaagcatatgtggaaggagcatttccttagaagtcatccagatgcttctggaggaggggcaggagacacttgggctgtttgccttgggtgagcccaaagaacttgccccttttctccttgcattagcaagctaggtctggctgcgtggagctggcaagtagatttcagcaacttgagcttgagttgatgatcaattaatagtggctgccagttgtgctggcgtaagtggcccacatcatggggaaggagtgctgtgattgactagtaatggctaccacgggaaagggaaggggaagcagtagcactaatgctatgtagttgtcatctttgatctggctaggccctgggaatcgggtttagtcatcctgtgggatctgtgttaactctttcatgccactggtgaggcatttgttaatttgctactcaactttgaggaaagacagggccttggtcagagagagaatgctctgaactctgctaaggacatagagtcagcccatggtgatttagctccttgctgttcacctcctctttcctgatgtctgccttgctctacagcacaacctcttgagggtggacagggagaaagatgatggtgtcagaggtcaaaactattatatatgacagggcacaagatggtctgtgatctttgcacagatgaatggaagttgatgcacaccaacaagaggcaacttgtcactttctttctcaatattaactggaatgctgcctcttgggttctcacctgcatggatgctttgagttggacgtgatactgtccatattctccagaggattacctggctgaaccattggctctgttcaccagtgacagatggtttccccatccactgagtgtagcatcctcagaggtaggcaagtttgcttctagggagttagcatgtagatgggatattgggatgaggaaaggaaaatcaggtagatggtgctttttttcccccaaatctaagtattctatgtcatggttttaaactttgccatgaactcctgggctttgggggaagagaaagttccattcatttaaatgaataaggtgttgaaagagtgcagggggttgggaggaagcatgtaagagagggaacatttccttagatgttacccagatggttctgggggagacagaaaagaggtgcggcaggactcttatcttaaaaagtaaacaaaacaaaacaaaacaaaacaaaaaactagatatgtaatttctaaacacccagatcacaatgacaagatgccactccaaccatgggacaccttcatgatactaggtttgtacttcctggtctctgggatgacttcagattctgctggccaaggcaaattgaactcagttcaagatggccaccactggtagacgtgtagatagaaaagaggactggtcttgggaacatctttggaaaaaccaacaaacaatagttctagggagatgagaaaaaaattcaccttacagtgctaagaaagtgcattagaatggaattgccctttccttaaggagacagtttgggctctccccttgccaccggctctggtgttttggcttatgcgttccttcaggttgagctgagcagtgtgttatgggaagctgctcaatttcctttcattcaattccacctccttcctgaactctaatagaggttaaaagggaaaaaaaaaattctgtagatagcaaattgtgtgtgtgggggggggcgacttctcnacactgcatagcatgccaacttcagctgcacatggccgcctccatctctacacaactttgagtcacataaatgtcacgtg

SEQ ID NO: 283744 - DNA, 829 bp, Homo sapiens
gagagagaccccctcacttcacactaccgggaaagggtaagagaaaggagagaaaaggtcacaggtcagagaagacagatgaattattaatcccagagccaaagatgccctctcgtggttttactgcagtgcagaaagcaagccaccgccaagcctgggagcccatcaccagtgtctgttcaagcggaatcctttgcccactagctttcttcaacatcccaccagaaataactattgaaaggaaaggtgcaattaaatctaagtctctacactgttaggagagggagaatgtggtgaggtgctgtagttatgagattggattatttttccctgaaaaaaatctgctggtatcaactcaatgaaatgtgtaactccaatggtacagacaagcattcactatcctgcagggacaagccacttttagagataatagggcaatacagatcttacttaacctctcccacatctaaacactaaaactgctgaagtggcagcaaattaaaaaaaaaaaattactatgctaaactaaatgccaattaagaaatgaaaaggccgggcactgtggcttacacctgtaatcccagcacttggggaggccgaagcaggcggatcacgaggtcaggagatcaagatcatcctggctaacacagtgaaaccccgtctctactaaaaatacaaaaaattagccaggcgtggtggcgggcgcctgtagtcccagctactcgggaggctgaggcaggagaatggcgtgaacccgggaggcagagcttgcagtgagccgagatcgcgccactgcactccagcctgggcgacagagcaagactctgtc

SEQ ID NO: 283745 - DNA, 472 bp, Homo sapiens
tgtggtgaggtgctgtagttatgagattggattatttttccctgaaaaaaatctgctggtatcaactcaatgaaatgtgtaactccaatggtacagacaagcattcactatcctgcagggacaagccacttttagagataatagggcaatacagatcttacttaacctctcccacatctaaacactaaaactgctgaagtggcagcaaattaaaaaaaaaaaattactatgctaaactaaatgccaattaagaaatgaaaaggccgggcactgtggcttacacctgtaatcccagcacttggggaggccgaagcaggcggatcacgaggtcagaagttcgagaccagtctggccaacatagtgaaaccctgtctctactaaaaaaatacaaaaaaaggccgggcgtggtggcgggagcctgtaattccagctactcgggaggctgagacaggagaatggcgtgaacgccgga

SEQ ID NO: 283746 - DNA, 377 bp, Homo sapiens
attgagtttttaaggcacccaaataattgaagcctaagatatattaagacaagttgcaattcctgttagcaaaacttctaggagtggggaagttggaaaatgcaggattcttccagtgagccagcatttcccatagctaaccctattctcttagtctttcaaaatgtagaatgggtccaataatggctataagatgtaataaatcccatcttaatttgttttaaaagtttcataaatcactgaacacttatgaaacaaagtgttttttaatcagatatcaactgaaacttcataaaggatgcatagttttataatgttattgaatcaaattttaaggcttgtattgtttgattttaataaagtataaattcaattta

SEQ ID NO: 283747 - DNA, 3298 bp, Homo sapiens
tgcttacagctgagaagcaggtcagtcaggttcctgggcgctctgttacacaagcaagatacagccagccccacctaattttgtttccctggcaccctcctgctcagtgcgacattgtcacacttaacccatctgttttctctaatgcacgacagattcctttcagacaggacaactgtgatatttcagttcctgattgtaaatacctcctaagcctgaagattcctttaaaaaaaaaccaataccaaagaagcctacaatgttggccttagccaaaattctgttgatttcaacgttgttttattcacttctatcggggagccatggaaaagaaaatcaagacataaacacaacacagaacattgcagaagtttttaaaacaatggaaaataaacctatttctttggaaagtgaagcaaacttaaactcagataaagaaaatataaccacctcaaatctcaaggcgagtcattcccctcctttgaatctacccaacaacagccacggaataacagatttctccagtaactcgtcagcagagcattctttgggcagtctaaaacccacatctaccatttccacaagccctcccttgatccatagctttgtttctaaagtgccttggaatgcacctatagcagatgaagatcttttgcccatctcagcacatcccaatgctacacctgctctgtcttcagaaaacttcacttggtctttggtcaatgacaccgtgaaaactcctgataacagttccattacagttagcatcctctcttcagaaccaacttctccatctgtgacccccttgatagtggaaccaagtggatggcttaccacaaacagtgatagcttcactgggtttaccccttatcaagaaaaaacaactctacagcctaccttaaaattcaccaataattcaaaactctttccaaatacgtcagatccccaaaaaggaaaatagaaatacaggaatagtattcggggccattttaggtgctattctgggtgtctcattgcttactcttgtgggctacttgttgtgtggaaaaaggaaaacggattcattttcccatcggcgactttatgacgacagaaatgaaccagttctgcgattagacaatgcaccggaaccttatgatgtgagttttgggaattctagctactacaatccaactttgaatgattcagccatgccagaaagtgaagaaaatgcacgtgatggcattcctatggatgacatacctccacttcgtacttctgtatagaactaacagcaaaaaggcgttaaacagcaagtgtcatctacatcctagccttttgacaaattcatctttcaaaaggttacacaaaattactgtcacgtggattttgtcaaggagaatcataaaagcaggagaccagtagcagaaatgtagacaggatgtatcatccaaaggttttctttcttacaatttttggccatcctgaggcatttactaagtagccttaatttgtattttagtagtattttcttagtagaaaatatttgtggaatcagataaaactaaaagatttcaccattacagccctgcctcataactaaataataaaaattattccaccaaaaaattctaaaacaatgaagatgactctttactgctctgcctgaagccctagtaccataattcaagattgcattttcttaaatgaaaattgaaagggtgctttttaaagaaaatttgacttaaagctaaaaagaggacatagcccagagtttctgttattgggaaattgaggcaatagaaatgacagacctgtattctagtacgttataattttctagatcagcacacacatgatcagcccactgagttatgaagctgacaatgactgcattcaacggggccatggcaggaaagctgaccctacccaggaaagtaatagcttctttaaaagtcttcaaaggttttgggaattttaacttgtcttaatatatcttaggcttcaattatttgggtgccttaaaaactcaatgagaatcatggtaaaaaaaaaaagttaaccaaagaatatacctgtacataatttgtacagttttaagttgttagataggaactggatttcttatgtattagacattattgctcaatcataatggaatagattctgcatccctaaatgtatgaaccataaggttaaaaaagatgaatggaaatatcaaacaactttttactgagcatcagtttcataatcaataatataagaagattaatttggattctagtatgtttcagtttgtttttaattaccaccttcctttggtagaaaaaatatgttccttgatgtaggaaagtctaggttttagagattagaggatgagatcaagagttaaattcctaaagaagcactgaatatatgaagagagcaaacaaatcaagtaccaacctagaggctttatttttgaattgattcatggtgtgtgtgtgtgtgtgtgtgtgtgtgtgtgtgtgtgtgtaacacagaaacagcttcagaaaataagggatagaaagtaatgaagaaagtacttaccccatattgccataaaaatagcaaagaagactgtccctccattatcgaacaaatatgtcacctgagtagaaaacaaacagaaatattagtcatgcaaattgattataataagccagtgaatactgtttgcactcaggtactatgattttttctcaaatagaatcatattattttatagtacagaaatattatatatgaattcctttcatgggtcttgcaacaatttcacatgatttttctcatggggagaggtgaagaaacaacattagccctcttctctcctctcttgattccctttataccccaccatcatttctgattataaataattctaccattctatggaagtatttgtgggtcacagattgtcaaactacttaatgaaagttgtatgaaattagtttttcaggtgaggcattcctagttgcaattcctgttagcaaaacttctaggagtggggaagttggaaaatgcaggattcttccagtgagccagcatttcccatagctaaccctattctcttagtctttcaaaatgtagaatgggtccaataatggctataagatgtaataaatcccatcttaatttgttttaaaagtttcataaatcactgaacacttatgaaacaaagtgttttttaatcagatatcaactgaaacttcataaaggatgcatagttttataatgttattgaatcaaattttaaggcttgtattgtttgattttaataaagtataaattcaattta

SEQ ID NO: 283748 - DNA, 3386 bp, Homo sapiens
tgcttacagctgagaagcaggtcagtcaggttcctgggcgctctgttacacaagcaagatacagccagccccacctaattttgtttccctggcaccctcctgctcagtgcgacattgtcacacttaacccatctgttttctctaatgcacgacagattcctttcagacaggacaactgtgatatttcagttcctgattgtaaatacctcctaagcctgaagcttctgttactagccattgtgagcttcagtttcttcatctgcaaaatgggcataatacaatctattcttgccacatcaagggattgttattcctttaaaaaaaaaccaataccaaagaagcctacaatgttggccttagccaaaattctgttgatttcaacgttgttttattcacttctatcggggagccatggaaaagaaaatcaagacataaacacaacacagaacattgcagaagtttttaaaacaatggaaaataaacctatttctttggaaagtgaagcaaacttaaactcagataaagaaaatataaccacctcaaatctcaaggcgagtcattcccctcctttgaatctacccaacaacagccacggaataacagatttctccagtaactcgtcagcagagcattctttgggcagtctaaaacccacatctaccatttccacaagccctcccttgatccatagctttgtttctaaagtgccttggaatgcacctatagcagatgaagatcttttgcccatctcagcacatcccaatgctacacctgctctgtcttcagaaaacttcacttggtctttggtcaatgacaccgtgaaaactcctgataacagttccattacagttagcatcctctcttcagaaccaacttctccatctgtgacccccttgatagtggaaccaagtggatggcttaccacaaacagtgatagcttcactgggtttaccccttatcaagaaaaaacaactctacagcctaccttaaaattcaccaataattcaaaactctttccaaatacgtcagatccccaaaaaggaaaatagaaatacaggaatagtattcggggccattttaggtgctattctgggtgtctcattgcttactcttgtgggctacttgttgtgtggaaaaaggaaaacggattcattttcccatcggcgactttatgacgacagaaatgaaccagttctgcgattagacaatgcaccggaaccttatgatgtgagttttgggaattctagctactacaatccaactttgaatgattcagccatgccagaaagtgaagaaaatgcacgtgatggcattcctatggatgacatacctccacttcgtacttctgtatagaactaacagcaaaaaggcgttaaacagcaagtgtcatctacatcctagccttttgacaaattcatctttcaaaaggttacacaaaattactgtcacgtggattttgtcaaggagaatcataaaagcaggagaccagtagcagaaatgtagacaggatgtatcatccaaaggttttctttcttacaatttttggccatcctgaggcatttactaagtagccttaatttgtattttagtagtattttcttagtagaaaatatttgtggaatcagataaaactaaaagatttcaccattacagccctgcctcataactaaataataaaaattattccaccaaaaaattctaaaacaatgaagatgactctttactgctctgcctgaagccctagtaccataattcaagattgcattttcttaaatgaaaattgaaagggtgctttttaaagaaaatttgacttaaagctaaaaagaggacatagcccagagtttctgttattgggaaattgaggcaatagaaatgacagacctgtattctagtacgttataattttctagatcagcacacacatgatcagcccactgagttatgaagctgacaatgactgcattcaacggggccatggcaggaaagctgaccctacccaggaaagtaatagcttctttaaaagtcttcaaaggttttgggaattttaacttgtcttaatatatcttaggcttcaattatttgggtgccttaaaaactcaatgagaatcatggtaaaaaaaaaaagttaaccaaagaatatacctgtacataatttgtacagttttaagttgttagataggaactggatttcttatgtattagacattattgctcaatcataatggaatagattctgcatccctaaatgtatgaaccataaggttaaaaaagatgaatggaaatatcaaacaactttttactgagcatcagtttcataatcaataatataagaagattaatttggattctagtatgtttcagtttgtttttaattaccaccttcctttggtagaaaaaatatgttccttgatgtaggaaagtctaggttttagagattagaggatgagatcaagagttaaattcctaaagaagcactgaatatatgaagagagcaaacaaatcaagtaccaacctagaggctttatttttgaattgattcatggtgtgtgtgtgtgtgtgtgtgtgtgtgtgtgtgtgtgtgtaacacagaaacagcttcagaaaataagggatagaaagtaatgaagaaagtacttaccccatattgccataaaaatagcaaagaagactgtccctccattatcgaacaaatatgtcacctgagtagaaaacaaacagaaatattagtcatgcaaattgattataataagccagtgaatactgtttgcactcaggtactatgattttttctcaaatagaatcatattattttatagtacagaaatattatatatgaattcctttcatgggtcttgcaacaatttcacatgatttttctcatggggagaggtgaagaaacaacattagccctcttctctcctctcttgattccctttataccccaccatcatttctgattataaataattctaccattctatggaagtatttgtgggtcacagattgtcaaactacttaatgaaagttgtatgaaattagtttttcaggtgaggcattcctagttgcaattcctgttagcaaaacttctaggagtggggaagttggaaaatgcaggattcttccagtgagccagcatttcccatagctaaccctattctcttagtctttcaaaatgtagaatgggtccaataatggctataagatgtaataaatcccatcttaatttgttttaaaagtttcataaatcactgaacacttatgaaacaaagtgttttttaatcagatatcaactgaaacttcataaaggatgcatagttttataatgttattgaatcaaattttaaggcttgtattgtttgattttaataaagtataaattcaattta

SEQ ID NO: 283749 - DNA, 3236 bp, Homo sapiens
tgcttacagctgagaagcaggtcagtcaggttcctgggcgctctgttacacaagcaagatacagccagccccacctaattttgtttccctggcaccctcctgctcagtgcgacattgtcacacttaacccatctgttttctctaatgcacgacagattcctttcagacaggacaactgtgatatttcagttcctgattgtaaatacctcctaagcctgaagcttctgttactagccattgtgagcttcagtttcttcatctgcaaaatgggcataatacaatctattcttgccacatcaagggattgttattcctttaaaaaaaaaccaataccaaagaagcctacaatgttggccttagccaaaattctgttgatttcaacgttgttttattcacttctatcggggagccatggaaaagaaaatcaagacataaacacaacacagaacattgcagaagtttttaaaacaatggaaaataaacctatttctttggaaagtgaagcaaacttaaactcagataaagaaaatataaccacctcaaatctcaaggcgagtcattcccctcctttgaatctacccaacaacagccacggaataacagatttctccagtaactcgtcagcagagcattctttgggcagtctaaaacccacatctaccatttccacaagccctcccttgatccatagctttgtttctaaagtgccttggaatgcacctatagcagatgaagatcttttgcccatctcagcacatcccaatgctacacctgctctgtcttcagaaaacttcacttggtctttggtcaatgacaccgtgaaaactcctgataacagttccattacagttagcatcctctcttcagaaccaacttctccatctgtgacccccttgatagtggaaccaagtggatggcttaccacaaacagtgatagcttcactgggtttaccccttatcaagaaaaaacaactctacagcctaccttaaaattcaccaataattcaaaactctttccaaatacgtcagatccccaaaaaggttctgcgattagacaatgcaccggaaccttatgatgtgagttttgggaattctagctactacaatccaactttgaatgattcagccatgccagaaagtgaagaaaatgcacgtgatggcattcctatggatgacatacctccacttcgtacttctgtatagaactaacagcaaaaaggcgttaaacagcaagtgtcatctacatcctagccttttgacaaattcatctttcaaaaggttacacaaaattactgtcacgtggattttgtcaaggagaatcataaaagcaggagaccagtagcagaaatgtagacaggatgtatcatccaaaggttttctttcttacaatttttggccatcctgaggcatttactaagtagccttaatttgtattttagtagtattttcttagtagaaaatatttgtggaatcagataaaactaaaagatttcaccattacagccctgcctcataactaaataataaaaattattccaccaaaaaattctaaaacaatgaagatgactctttactgctctgcctgaagccctagtaccataattcaagattgcattttcttaaatgaaaattgaaagggtgctttttaaagaaaatttgacttaaagctaaaaagaggacatagcccagagtttctgttattgggaaattgaggcaatagaaatgacagacctgtattctagtacgttataattttctagatcagcacacacatgatcagcccactgagttatgaagctgacaatgactgcattcaacggggccatggcaggaaagctgaccctacccaggaaagtaatagcttctttaaaagtcttcaaaggttttgggaattttaacttgtcttaatatatcttaggcttcaattatttgggtgccttaaaaactcaatgagaatcatggtaaaaaaaaaaagttaaccaaagaatatacctgtacataatttgtacagttttaagttgttagataggaactggatttcttatgtattagacattattgctcaatcataatggaatagattctgcatccctaaatgtatgaaccataaggttaaaaaagatgaatggaaatatcaaacaactttttactgagcatcagtttcataatcaataatataagaagattaatttggattctagtatgtttcagtttgtttttaattaccaccttcctttggtagaaaaaatatgttccttgatgtaggaaagtctaggttttagagattagaggatgagatcaagagttaaattcctaaagaagcactgaatatatgaagagagcaaacaaatcaagtaccaacctagaggctttatttttgaattgattcatggtgtgtgtgtgtgtgtgtgtgtgtgtgtgtgtgtgtgtgtaacacagaaacagcttcagaaaataagggatagaaagtaatgaagaaagtacttaccccatattgccataaaaatagcaaagaagactgtccctccattatcgaacaaatatgtcacctgagtagaaaacaaacagaaatattagtcatgcaaattgattataataagccagtgaatactgtttgcactcaggtactatgattttttctcaaatagaatcatattattttatagtacagaaatattatatatgaattcctttcatgggtcttgcaacaatttcacatgatttttctcatggggagaggtgaagaaacaacattagccctcttctctcctctcttgattccctttataccccaccatcatttctgattataaataattctaccattctatggaagtatttgtgggtcacagattgtcaaactacttaatgaaagttgtatgaaattagtttttcaggtgaggcattcctagttgcaattcctgttagcaaaacttctaggagtggggaagttggaaaatgcaggattcttccagtgagccagcatttcccatagctaaccctattctcttagtctttcaaaatgtagaatgggtccaataatggctataagatgtaataaatcccatcttaatttgttttaaaagtttcataaatcactgaacacttatgaaacaaagtgttttttaatcagatatcaactgaaacttcataaaggatgcatagttttataatgttattgaatcaaattttaaggcttgtattgtttgattttaataaagtataaattcaattta

SEQ ID NO: 283750 - DNA, 750 bp, Homo sapiens
tagacacacagacacatccaagaagaaaagtcaaatagatagttgaaatccagtgttcccagggtatgtgggctaaatatattttgggcttctatcagcatatagatactagactaactgagatcaggagtcactgcagatagagcaggggtccagaattgaacattgggacattccaaatttagaggttggaagaatgaggaaggaccagtggacatgaagagcagcaaggcagaagtgagatactgaaagatgggaagttcataaggaagaaagtgagcaattcatcaaattctaacatgggattgaaaattgatcacaggaagtggttgcatgaggctggagtaaagggagttgcggacaaggcagcatggtgaccagcagagtgaggaaaggagatgaaatagagaaataaagaccagatgcgtctcagtccgtcacctcagacacatgactcggggctgaagagtggggaagggccctgggtcccagccacatgctatcaccaatgttgctaagcactgcttttaagactcccagggcactgcatgaaaaaacagcaactggccccttccataatcagcaatttgcaatatacagtgtcctacaagatagaatgccacaacagatgattatctggtcaaaaacagtctttgtacaggaataggttaaagcaagagttctttgattattgttttggcagaaaaaggcaaagtgaaaaacaattccagaaaaaaaagttacgaagca

SEQ ID NO: 283751 - DNA, 753 bp, Homo sapiens
  misc_feature (57)..(57): n is a, c, g, or t
gggtgaaatctcctgtcttgaggctcgggagctagtcggtgtactacaggctggcgnatagcgtggtcccgtagcgtataattacgggatcatgctaactagctgatgttggccatgcagcacgctagtaacttaacatgcactcgacggggtcacgtacacgtttctggaattacgttcctcatggcggtccggaacgttcaattaccgaggtctggtcctgcggggactccaagccagactagctgtgactgggggaggagagagcacaaacggattcatcctccttctgccactgcccaacaattgaagaccaccaactgaagagaaacaactgagggtaccaactgagtgcactaaccgaaggcaaccaatgtgggcatccactgaaggccaccaagtgaaggccagttgccctgccaaccagaccacatcctggttcagaggaaacaatcaggtccagaatcccctgcatgcatccccacaatcctggaacttgagagcacaggcatatggctcacaaggccctgccctgccagcagccccgccccacctttcattcatgctggctgctaggaccttttcaggtttctcactgtgatgaagtacctagggcatcatcaccttacaatgaatgatgctaaaattactgaaaccaaatctgcctcatgcagtgtctgagattcatagaaccgccatttctccataatctctgaaacatcaacaaactagaaataagagagatttctgcag

SEQ ID NO: 283752 - DNA, 707 bp, Homo sapiens
gggcattctcctgcttcagcctctggagtagccgtgactacaggcacccgccaccgcgcccggccttaactaggattttctagactatgttccaggagaagtagaattactgcatcacagggcacttcatttttagattacgtatcatggcggcagaccttcaataccaaggagggcctgggggcaacaagcctgagagctgtgactgggggaggagagagcacaaacggattcatcctccttctgccactgcccaacaattgaagaccaccaactgaagagaaacaactgagggtaccaactgagtgcactaaccgaaggcaaccaatgtgggcatccactgaaggccaccaagtgaaggccagttgccctgccaaccagaccacatcctggttcagaggaaacaatcaggtccagaatcccctgcatgcatccccacaatcctggaacttgagagcacaggcatatggctcacaaggccctgccctgccagcagccccgccccacctttcattcatgctggctgctaggaccttttcaggtttctcactgtgatgaagtacctagggcatcatcaccttacaatgaatgatgctaaaattactgaaaccaaatctgcctcatgcagtgtctgagattcatagaaccgccatttctccataatctctgaaacatcaacaaactagaaataagagagatttctgcag

SEQ ID NO: 283753 - DNA, 319 bp, Homo sapiens
taacatgaatgactcagattctgaaggaagaaaaagaatgacaaactatgttccaggagaagtagaattactgcatcacagggcacttcatttttagattacgtatcatggcggcagaccttcaataccaaggtgcatcttctcccgcaagttcttcagcatcctttccagaagcattcggcagccgagaaagcaggctacaccttacctactccttcctgggctaaagatctcagacttagttgcttatcttaatttggggaaaataaattaaggagttcttctatcattaagcacaacataatataatctatttaat

SEQ ID NO: 283754 - DNA, 283 bp, Homo sapiens
ttggaataccttgtctcctccatgtcctctctcatagcatgacagcagggctctgagatggaactttccaagcatatttcttaaaaaatagaatctgcagatctcttaaggccaagctttggaagttgcaacattgtcacctctgctgcattctgtggtcaaagcaagtcataagacaagcacaattcaagaggagggaaagggactacctgtggatgggaggcagagcagataatttgcagctgtctttaatccatcacagctgattgaggcaggtatgaaa

SEQ ID NO: 283755 - DNA, 919 bp, Homo sapiens
gccggacacgagctctgcgaatcactttattgcgcgcgtttcggggagcgggccgtccagggaaggaagcaaagcgggaacgcactgcaggccccatccagaaatagcagatgccaacggaatccaagaataaagtcgtttattatttttccaagaataaagtcgtttattattttcagagcggcgggagtagggctggggaccctagggccgctccagtgggacttccctgaacccggttgtagaggatgatggcgcctttggccgaggggcagagttcagcccacatctccgtctcgggcaatctccgcacgttctgtggggagacaacgagacccaggcattcaagcttgccacttctcctgccagggctgtgcccagaattcctgagcctcagagacctctgcactgtccttagggaggcatgttaaggggctgaacatgtccctggacctttcccttgcactgagggcaaatcttgtgactctggagggaattgtgacccagccaacaccttctgcaggccccagccctggcctccaagcaagatggtttgtcactctgcacctgtgtctccacaaagaagattcctgtagactcgtgggcctcgggtcccccactcaggtagtgcttcctcacctgctcagaagtcaggctgcacctggacaagaacacaagggtggcttagtgggtgaccagcccctgcggggtacctgtggagccacagctgcctcagcccactcctcaccacccaccttcccaagacccaggatcatgtacccgagcctactcactggacatagaactcggcactggctcggccagcactggtctcatttcgggcgatgcccaacagcaggggctggctcagggtgagcagcggcaggttcacctgcggtggagggtggggtggggggag

SEQ ID NO: 283756 - DNA, 323 bp, Homo sapiens
cctcccaaagtgctgggattacaggcgtgagccactgcagagagattctctacgtgggttctagtcgtggctctggcatttacttgtgggacctctctgaactgcaaactcctagtgagttgagctagattttgtggcggggtcatcaccaacagccctagcgcaaggaagcaggaagtccccaaccaatcccatagccaccctaccccaacgtagggaatctgaacgccaagaaggggctggggtggccagtaaccgaaatcaggtgtccagttctcagccctccccaggcatttaatacatagaactaacccttccgtccc

SEQ ID NO: 283757 - DNA, 1372 bp, Homo sapiens
ggtattctctgttgtacaaattaagggtggacaaggggggttccaagcacctttaggttcatactccatgtgccctttttagggaagctgttggagaaaatactccagcaaaatgaaggagtacacaaaccagagaatgacatgaatccagcaaataggatccaacacaggcaatattccagctatggagctagctttaaaaaggaacagtaaaaatattaatcggttagctgggtggaatggcccatgcctgtagtcccagctactcaggaggctcagcagcaggacgacttgagcccaagagttccagaccagcctggccaccttagtgagatcccttctcttaaaaataataacttattgccagatttggggcatttggaaataagttcattgaagataaagcaaaagtaaaaaaaaaaaaaacaaggggaaagggttggttaggcaatcattctagggcagaaagaagtacaggataggaagagcataatacactgtttttctcaacaaggagcagtatgtacacagtcataatgatgtgactgcttagcccctaaatatggtaactactctgggacaatatgggaggaaaagtgaagattgtgatggtgtaagagctaaatcctcatctgtcatatccagaaatcactatataatatataataatgaaatgactaagttatgtgaggaaaaaaacagaagacattgctaaaagagttaaaagtcattgctctggagaattaggagtgatggggcaggggactgttaggatgcattataaactgaaaagcctttttaaaattttatgtattaatatatgcattcacttgaaaaactaaaaaaaaaacaataatttggaaaaacccatgaaggtaactaacggaaggaaaaactaagagaatgaaaagtatttgcctctggaaagaacaactggcaggactgttgttttcattgtaagacttttggagccatttaattgtacttaaccattttcatctatttctttaataagaacaattccatcttaataaagagttacacttgttaataaacacacaaaaagacgaaaaaaaaaacaaaacaagagcaaacacaagcaacaaacaacaagagacaaaagggagggacggaaaagaaaaagcacccaggagggggcaacaagataggcgagtaccccagaatctgtgagacaaaagggggcccaaaaagaggccgaaaaaaaaagaaagacaaagacagaggaaaacacacagcgtccccacgagacaaacatggccaaagagaggaccctgcgagaaacaacccacaacaagcaggagaggacaaaaaatgcgggaaaacaacacaaaaaagaacatgacaccgccac

SEQ ID NO: 283758 - DNA, 1158 bp, Homo sapiens
ggtattctctgttgtacaaattaagggtggacaaggggggttccaagcacctttaggttcatactccatgtgccctttttagggaagctgttggagaaaatactccagcaaaatgaaggagtacacaaaccagagaatgacatgaatccagcaaataggatccaacacaggcaatattccagctatggagctagctttaaaaaggaacagtaaaaatattaatcggttagctgggtggaatggcccatgcctgtagtcccagctactcaggaggctcagcagcaggacgacttgagcccaagagttccagaccagcctggccaccttagtgagatcccttctcttaaaaataataatactctgggacaatatgggaggaaaagtgaagattgtgatggtgtaagagctaaatcctcatctgtcatatccagaaatcactatataatatataataatgaaatgactaagttatgtgaggaaaaaaacagaagacattgctaaaagagttaaaagtcattgctctggagaattaggagtgatggggcaggggactgttaggatgcattataaactgaaaagcctttttaaaattttatgtattaatatatgcattcacttgaaaaactaaaaaaaaaacaataatttggaaaaacccatgaaggtaactaacggaaggaaaaactaagagaatgaaaagtatttgcctctggaaagaacaactggcaggactgttgttttcattgtaagacttttggagccatttaattgtacttaaccattttcatctatttctttaataagaacaattccatcttaataaagagttacacttgttaataaacacacaaaaagacgaaaaaaaaaacaaaacaagagcaaacacaagcaacaaacaacaagagacaaaagggagggacggaaaagaaaaagcacccaggagggggcaacaagataggcgagtaccccagaatctgtgagacaaaagggggcccaaaaagaggccgaaaaaaaaagaaagacaaagacagaggaaaacacacagcgtccccacgagacaaacatggccaaagagaggaccctgcgagaaacaacccacaacaagcaggagaggacaaaaaatgcgggaaaacaacacaaaaaagaacatgacaccgccac

SEQ ID NO: 283759 - DNA, 795 bp, Homo sapiens
ttataagtagcaggatattctgatggagtttgactttggttttgggcccacggagtttcagatgcctttgagaaatgaatgaagtagagagaaaataaaagaaaaactagccaggcacagtggctcacacctgtaatcccagcgctttgggaggctaaggcaggcagatcacttgagaccagcttgggcaacatggcaaagccccatctctacaaaaaacacaaaaattagctgggcattgtggcgcacacctgtattcccatctactcaggaagctgagatggaagaattaattgagcccacgagttcaaggctgcagtgagtcgtgattgtgccactgcactccagccggggtgacagaagagaccttgtctcgaaaaggaatctgaaaacaatggaaccatgccttcataattctggaaagttattttcaactgataaatctatattcacccaaataatcaagggtgaaggtaaaataatacatttttagacaagcaaagactcaggggttacctccatgtgccctttttagggaagctgttggagaaaatactccagcaaaatgaaggagtacacaaaccagagaatgacatgaatccagcaaataggatccaacacaggcaatattccagctatggagctagctttaaaaaggaacagtaaaaatattaatcggttagctgggtggaatggcccatgcctgtagtcccagctactcaggaggctcagcagcaggacgacttgagcccaagagttccagaccagcctggccaccttagtgagatcccttct

SEQ ID NO: 283760 - DNA, 1707 bp, Homo sapiens
caggaaggattcagacaactctgcctgggagtgagggctctgctcagcggcctagacctgggcacaacggagcaggccactccgtttctcatcacagacctgaaggcagatggcctgggcgtcgggcttcctctgctctctggcggggcgattttcacggtcaccaggctgcggacaggctgtgggggtggcgggcggtccaaagccaccgcttcacgtaggccaggggagccttggagaaatcaggcctgatgttgctcagcagcggcagcctgttgggaaagcacctccaggcctcggggaccatctctctcaggacgcggatgcgggcggggaccatctctctctggatgcagatgcgggtgtagtcccagctgggaggagtggtgcggaggggccggatgcggacccagtgcttcctgtggaagtaggtgaccttgcagttctcctggacctgggagctgaggaagggcctggactgcagaacccagtgcttttgggcggggcgcagctttctggcaagcggcttgggccttccagtagacactgggctgccagaagtttccgaaatctgcggtcaaggccagagatcaaatgtcagggctcagtgactagcgacggttggcatcaaaatgttggaaagtgcacaaggcgccgtgtgccaggtacggtctgtccaccaactgttgcatggggcaggaggccacggccaggccacagctttgccgcgcgcagctgcagaaggggcaagtagcgccccatgctgtctggaggaccaaggaggctcaagcctgtccttcccactcatggtcccagacacttagctctgggcagaggggcctggcagctgtctctgcttttgtacctgacctttaaaggcagaacatagaagaatttctgccaggtcctgaaaactgcagatacctgttgacagaagggtgctctctttgatcagtgtgaaaatgatcacaatacacttggaggctcttttaaggaaaaacaaatcatttgctcatattcgtctaggatgactgttaatatcactttttgcaattttgctcttaagaaaacggtgaaagccatcaggatttatgttttagtacctgtaatgctgattttatgttgaccctcataattttcagtgttcacacagccatatatacataatcttctctaaacactaatgccatttctgtcctttcatttctattggtaatcctggagtagagtgaggcacattttccactaatagctgaaaagatctaacttcaaaaacaaagaatccaaaggctgcttagtaactgtagtgcctaagtttagagtctgttcaaggtggtgtgaaaagttttttggggggggggcatttccctcaaaagcacgtggagaaggaacctattgaccctctggaatgccagaatcgggaagagacaaaaaagtcgcaaccaattgaagattgggcaatagatttggcccagactgaggcagatgggtgaatagtaaaaacaataatttggaaaaacccatgaaggtaactaacggaaggaaaaactaagagaatgaaaagtatttgcctctggaaagaacaactggcaggactgttgttttcattgtaagacttttggagccatttaattgtacttaaccattttcatctatttctttaataagaacaattccatcttaataaagagttacacttgttaataa

SEQ ID NO: 283761 - DNA, 651 bp, Homo sapiens
ttttcttaaaggcaagagtctcgctttgtggcccaggctggagggcagtggcaccatctcagctcactgcaacctccgcctcccaggttcaagagattatcgtgcctcagcctcccgagtagctgggactacaggcatgaaccaccacacctggcccctgcatagttcttaacaaatccatctttgagtcttttttccatgctgggcactgtcctagatgctttatgtaagttaattcattatgctgctgagaggtagcagagttcctaatttactgcttactagctataagagcttagataaattatttaacttctctgtgcctcagtttcctcaagtttgaggaaatgggaataacagcagtatctgccttaagcgttgctttttgaggactaaaaggtatttggtaagggtttagaaaagcacatagcaagtattcaatatatgttagctatactgattaaatataatcaaccgtgagatagattttcccccacttagagaaaaggaaagtatttgggaaggttaagcaagttttccaaggtcattcaaacggttacatggcattgttaaataggtttgcaacttggaactgagtatctgaaacctggattctcccatttcttcaaggctacactgctgaaatcagga

SEQ ID NO: 283762 - DNA, 8744 bp, Homo sapiens
cagacggaagccgaacgagttcctcggcggctgcaggatgggggactccaaagtgaaagtggcggtgcggatacgacccatgaaccggcgagagactgacttgcataccaaatgtgtggtggatgtggatgcaaacaaggttattcttaatcctgtaaatacgaatctttccaaaggagatgcccggggccagccgaaggtgtttgcttatgatcattgtttctggtctatggatgaatctgtcaaagaaaagtatgcaggtcaagatattgttttcaagtgccttggagagaatatcctgcagaatgcttttgatggctacaatgcatgtatctttgcctatggacagactggctctggaaaatcttataccatgatgggcacagctgaccaacctggattaatcccaagactttgcagtggactctttgaacgaactcagaaagaggaaaatgaagaacagagttttaaagtagaagtgtcctacatggaaatttataatgaaaaagttcgagaccttcttgatcccaaaggaagccgtcagacgttgaaagtcagagagcatagtgtgttgggaccttatgtcgacggactttctaaactggctgtcacaagctacaaggatattgagtcgttgatgtctgagggtaacaaatctcgcacagttgctgcaaccaacatgaacgaggagagtagccgatcccatgcagttttcaaaatcaccctcacacatactctctacgatgtgaagtctgggacatctggagagaaagtgggcaaactcagcctggtggatttagctggcagtgaacgagcaacgaagacaggcgctgcaggggacaggctgaaggaagggagcaacattaacaagtccctcacaaccctcggtctggttatctcagctcttgcagatcagagtgctggcaaaaacaagaataaatttgttccatatcgtgactcagttctcacttggctgctcaaagacagcctcgggggtaacagcaagaccgccatggtggctactgtgagtcctgcagctgataactatgatgaaaccctctcaactctgcggtatgcagatcgagccaagcacattgtaaaccacgctgtggtgaatgaggaccctaatgcccgaattatccgggatctccgggaagaagttgagaaactccgggagcagctgaccaaagcagaggcaatgaaatctccagagctaaaggaccggctggaagaatctgagaagctaatccaggaaatgactgtgacctgggaggagaaattaaggaaaacggaggagattgcacaggaacgacagaaacagcttgagagtcttggaatatctcttcagtcttcgggaatcaaagttggggatgataaatgcttccttgtgaatctgaatgctgacccagctctgaatgagcttctggtgtactatttaaaggaacatacattgatagggtcagcaaattcccaagatatccaactgtgcggcatgggaattcttcctgaacactgtattatagacatcacgtcagaaggccaggttatgctgactcctcagaagaacaccagaacatttgtaaatgggtcatctgtctccagtccaatacagctacaccatggggacaggatattatggggaaacaatcatttcttcagactcaatttgcctaaaaagaaaaagaaagcagaacgagaggatgaggaccaggatccctccatgaagaacgagaatagttctgagcagctggatgtagacggagactcctccagcgaggtgtccagtgaagttaactttaattacgaatacgcacagatggaggtcaccatgaaggccctgggcagcaatgatccgatgcagtccatattaaacagcctagaacaacagcatgaagaagaaaaacgatctgcactggagcgccagaggcttatgtatgagcacgaattggagcagctccggagaaggctgtctcctgagaagcagaactgccggagcatggacaggttttctttccactcgcccagcgctcagcaacgcttaagacagtgggctgaggagagagaagcaacgttgaataacagcctgatgaggctgagggaacaaattgttaaggccaatctattggtgagagaagctaattacattgctgaggagctggataaaagaacagaatacaaagttaccctacagattccagcctccagcctggatgccaacaggaagcgaggctctcttcttagtgagcctgcaatccaggtgagaagaaaaggaaaaggaaagcagatttggtctttggaaaaactggacaacaggctgttggatatgagagacctttatcaggagtggaaagagtgtgaagaagataacccagtaatacgatcatacttcaaacgtgctgatccattctatgatgagcaggaaaatctcagtctcattggggtggccaatgtcttcctcgagtcacttttctatgatgtgaagttacaatacgctgttcccatcatcaaccagaaaggagaggtggcaggtcggctgcacgtggaggtgatgcgactcagtggtgatgttggggagaggatcgcaggaggcgatgaggtggcagaggtcccctttgagaaggagacccaggagaacaaactggtgtgcatggttaaaatcctgcaagctactgggttgccacagcatctgtcccactttgtgttctgcaaatacagcttctgggatcaacaggagccggtgattgtcgctcctgaagtggacacctcctcctcttccgtcagcaaggagccgcactgcatggttgtctttgatcattgcaatgagttttctgttaacatcaccgaagactttatcgagcatctttccgaaggagcattggcaattgaagtatatggacataaaataaacgatccccggaaaaaccccgccctgtgggatttgggaatcatccaagcaaagacacgtagtcttcgggacagatggagtgaagtgaccaggaaattggaattctgggttcaaatcttggaacagaatgagaatggtgaatactgccctgtagaagtgatttctgcaaaggatgtcccaacaggaggaatcttccagctccggcaggggcagtcccggagagttcaagtcgaagtgaagtcagtgcaggaatctgggactttaccactgatggaagaatgtatactgtctgttggcattggatgtgtcaaagttagaccgctcagagcccccagaacacatgagaccttccatgaggaagaggaagacatggacagctaccaggatcgagatttagagagacttcgtagaaaatggctaaatgcattaacaaaacgtcaggagtacttggatcaacaattgcaaaagcttgtcagtaaacgtgataaaacagaggatgatgctgaccgtgaagcgcagcttctggagatgcggttgaccctaactgaggagaggaacgcggtgatggtcccctctgctggcagtggtattccaggggccccagcagaatggaccccagtacctgggatggagacacacattcctgttatattcctggacttaaatgctgatgatttcagctctcaggataatcttgatgacccagaagctggtggatgggatgcgaccttgactggggaagaagaagaggagttctttgaattgcagattgtgaagcagcatgatggggaggtgaaagcagaagcctcctgggactccgcggtgcatggctgccctcagctcagcaggggcacgcccgtggacgagcggttgttcctgatcgtgcgcgtgacggtccagctcagccaccctgctgacatgcaactggtgttacgcaagagaatctgtgtcaatgttcacggccgccagggttttgcacagagtctcctaaaaaagatgtctcatcgaagttctattcctggctgtggagtgacttttgaaattgtctccaatattccagaggatgcccagggagtggaagaacgggaagcattagcaagaatggcagccaatgttgaaaacccagcttctgctgactcggaggcttatattgaaaagtacctcaggagcgtgctggctgtagaaaacctcctgactttagatcgtctgcgccaggaagttgcagtgaaggaacagttaacaggaaaaggaaagttgagcaggaggagtatcagttctccaaatgtgaacagattgtctggaagccgacaagatctcattccatcatacagtctaggcagcaacaagggccggtgggaaagtcagcaggatgtatcccaaaccacagtttccagaggaatagctcctgcccccgccctctctgtttctccccaaaataaccattctccagatccaggactcagtaaccttgcagcatcctacttgaatcctgtcaaatccttcgtgccgcaaatgccaaagctcctcaagtctctctttcccgtccgcgatgagaagaggggcaagcggccgtctcccctcgcacaccagcccgtgccccgcatcatggtgcagtcagccagcccggacatcagggtgaccaggatggaggaggctcagccggagatgggccctgacgtgctggtgcagacgatgggggccccggccttgaagatctgcgacaaacctgccaaagtgccttccccaccgcctgtcatagctgtcacagcggtcaccccggctccggaggcacaggacgggccccccagccccctgagtgaagcctctagcgggtacttctcccacagcgtctccaccgcgaccctgtcggacgccctgggccccggcctggacgctgcggccccgccggggtccatgcccaccgcccctgaggccgagcccgaggcgcccatcagccaccccccaccgcccacggccgtccccgccgaggagccccctggcccccagcagctcgtgagccccggtcgggagcgccccgacctcgaggccccggcgcccggctccccgttccgcgtccggagggtgcgggcctcggagttgcgctccttctcgcgcatgctggctggggaccccggctgctccccgggggccgaggggaatgcgccggccccgggcgccgggggacaggccctggcctctgattccgaggaagctgacgaggtcccggagtggctccgagagggcgagttcgtcaccgtgggcgcccacaaaacgggcgtggtgagatacgtggggcctgccgacttccaagagggcacgtgggtcggcgtggagctcgacctgccctcaggtaagaatgacggttccatcggcgggaagcagtacttcaggtgtaaccctggctacgggctgctggtcaggcccagccgggtccgcagggccacgggccctgtgcggcggcgcagcacaggactccggctgggtgcccccgaggcccgccggagcgccaccctctcgggctccgccaccaacctggcctcgctgacagctgccctggccaaggccgacaggagccacaagaaccctgagaaccggaaatcctgggccagctgagccgctgccttagggcgaacttttctgggggtgcccggccccttttgagccctgccagtgacagccctgaggagccaggagcccggtggccccttccccaggggcagggcgatgaatgctttttgcacgacacagggctggtgacctccctgggcctctggaagctttgtttcttctgtacccgggtaaagtgggggcctcaactgtgcctcctccggtggatggaaggttctgggtgcccgcaggggctgggggatgctaggactgagaccctgggtggtgcagcgcctggtgatcttgctgtgtgcctgtgcctggggccttatgttgctctttctatcatttccattctggtggccccactaatgtcttaacctaaaccataattgtaaccagtgcctttcctccccactggagggcaagcccccccacccacccaggatgtcctggctcactccgcaagccccccagcctcccaccctggtcccagtttcccgcaaagtgcctctgggggaccccccagcctcccaccctggtcccaggttccacaagtgcctctggagggccctgggctctggcagatggtcctggtgccccagacgggggccgagggcctgagcccccccatccctcctctgccagggtttcttagcggtttctctgtggatgttttggcatctttagacacctggaaagtctcttatgtttgccgtttattcccttcacagaaggcttggaatgtatttatttatatttattttttcaaaatccgaaatcatttgcgagccgcaatcgtcgtctgcctgtgtgggggggcccagggcctgccttgcacgttgcagcctctctggccattgcagagctgctggcctcctgcccaggtggagggtcctggggacggcagaggataaagccccctcctcacatccctctattgcggatccacagtggccttactcttaacttggatgagagcaaaaacctgggagaatgatgtgcttctgtagtcggtgacaaaggaagaggcattgctactttatttggtgcacttttggtttctaggaaggtctttgggtcattttaacttctcggcaactcccagactctcagagtgtggggctggggcctggcggctgggctggtgcagggagtgtgctggttagtctccagaccctcacagcagccacgcccccaggcccaccgtgcatggtgtgggcgggacagccggaagcttccggggtggcctccacctcctggctggggcacttatgctcccagagcctttggtgccaggtttgtgggatgggggttagcgtctatgtgtggaaggccaccaatctagggacaggagtcctgggtcaagattcacacagccacccttggagctggtttctagttctcacatttagtcaacatctagaaagcgctgcggaaggctctggttctctagggacttgaaggcgccaacagagtagtctccatggtgggcctgtcccagccctggctgcgaggacaggttgtctttctctccccagttggcgagggacacgaaggctgcggccgggctggcagagggcccggcccctggggggaggcactcctccagggctctccctgtccttagccgattttgagggaaccctgtggcacctgtccctggatgaagagctgtcacctctgccttgccctttaactcaacccgcttcccagcacagcggctttctttttaaaacctgtttcactgagaagtttgtttttgggtccgctggtgtcactatggcctgggtgagaggccagcactgctgctgccctgaggggaaacgcctgggccgtgtagtggggacgctctgggaatggtggcggacgggcagcgtgggtgggacctggcacttcgtggtggctgagccatccacccagcagcggcctcctgtagcaccatcttgggaaagtcctgggggacgtgtgtgtcgtgctttttaccatcggtttgacttacagtggagtagaacgagccagagttcctgacttgagcaggtggatttgggcccaggccctgttcactcttgcttctcggtgcggactaatgtcagcttgtggctgggaaagagggatgtgcagtgacgtggtcaccaaggcagtgagccccgctgaccccgggccagcacttggcaggcaggaggtgcggtctccagagtggtgggccagggcgggctggcctccgtcttctatcttcttttcttgcctccctgaccagcagactcacctcccaagaacgcctgcccgcccacccgccttaggactcccgatgcgctcctggaaggccccaggagtggcaccttagtgtgggtcggcccgcagatggcacccaaggccgggaagggcagtaactgcacacgcggcgctgtcagagatgggggtgggggatgcttctgggggccctgcctccccattgtgtgcccagaacatccctggccccaccccgccacttccctcgggcccttatgaaggactgaggctccagggtgagaaggctcacttctgccccgggcactgcgtccagcagcagaggggacagggggcaggtgtgtgactgggttcctgggtacccaggcctgaccagagggagcgggagggcagaggtgaggagggggaagatgtttctgggcctaccaaggttcaacaagagaacggagctgggaatgtgactgctggagcctgagaggtggaggagttctgatcccccgttacttcctagcattttctcctcttgccttaaaagttccctgtatgtgaaacgggaagtcctgagagtgtgtgttggtggctgtgcgcacgcacacaagacgggagtcaccctgtgcttcctgcccaagatactgacccattgaacccccaaagcatctttctctccacaaagtccgtggtgccttcctggtgggctgcagacactaatggtgttggggggtcttggaacagcttctctatgtgtggattcgtgtaaatgcgaagagttcacatataaagaagtgactttgattctgtgattatattgatttggtacacagtaaatgggagtttaaaaaatccaaagactctaatgacttgtaaagactctaatgatttgtatcatgtaatgaactaaaccacctgtaattttgtaccgtatgtgtctttccatcaaatgaccaacagcttctcaataaaaccagaccatttctcacctgca

SEQ ID NO: 283763 - DNA, 239 bp, Homo sapiens
ttttagtgcaatggcttggcagagaagaaacagcacaggactcgagtccatacacctgcattttagccctggctctgtcattgaatgtgtttgacctggggaaatttgttcaccatttttgatttcaggtttctcatatgacgtcttcttccaactttaatatgctactcaactttctgttttctcctgtaggacagcctcgggggtaacagcaagttgagtagcatattaaagttgga

SEQ ID NO: 283764 - DNA, 7954 bp, Homo sapiens
ttttagtgcaatggcttggcagagaagaaacagcacaggactcgagtccatacacctgcattttagccctggctctgtcattgaatgtgtttgacctggggaaatttgttcaccatttttgatttcaggtttctcatatgacgtcttcttccaactttaatatgctactcaactttctgttttctcctgtaggacagcctcgggggtaacagcaagaccgccatggtggctactgtgagtcctgcagctgataactatgatgaaaccctctcaactctgcggtatgcagatcgagccaagcacattgtaaaccacgctgtggtgaatgaggaccctaatgcccgaattatccgggatctccgggaagaagttgagaaactccgggagcagctgaccaaagcagaggcaatgaaatctccagagctaaaggaccggctggaagaatctgagaagctaatccaggaaatgactgtgacctgggaggagaaattaaggaaaacggaggagattgcacaggaacgacagaaacagcttgagagtcttggaatatctcttcagtcttcgggaatcaaagttggggatgataaatgcttccttgtgaatctgaatgctgacccagctctgaatgagcttctggtgtactatttaaaggaacatacattgatagggtcagcaaattcccaagatatccaactgtgcggcatgggaattcttcctgaacactgtattatagacatcacgtcagaaggccaggttatgctgactcctcagaagaacaccagaacatttgtaaatgggtcatctgtctccagtccaatacagctacaccatggggacaggatattatggggaaacaatcatttcttcagactcaatttgcctaaaaagaaaaagaaagcagaacgagaggatgaggaccaggatccctccatgaagaacgagaatagttctgagcagctggatgtagacggagactcctccagcgaggtgtccagtgaagttaactttaattacgaatacgcacagatggaggtcaccatgaaggccctgggcagcaatgatccgatgcagtccatattaaacagcctagaacaacagcatgaagaagaaaaacgatctgcactggagcgccagaggcttatgtatgagcacgaattggagcagctccggagaaggctgtctcctgagaagcagaactgccggagcatggacaggttttctttccactcgcccagcgctcagcaacgcttaagacagtgggctgaggagagagaagcaacgttgaataacagcctgatgaggctgagggaacaaattgttaaggccaatctattggtgagagaagctaattacattgctgaggagctggataaaagaacagaatacaaagttaccctacagattccagcctccagcctggatgccaacaggaagcgaggctctcttcttagtgagcctgcaatccaggtgagaagaaaaggaaaaggaaagcagatttggtctttggaaaaactggacaacaggctgttggatatgagagacctttatcaggagtggaaagagtgtgaagaagataacccagtaatacgatcatacttcaaacgtgctgatccattctatgatgagcaggaaaatctcagtctcattggggtggccaatgtcttcctcgagtcacttttctatgatgtgaagttacaatacgctgttcccatcatcaaccagaaaggagaggtggcaggtcggctgcacgtggaggtgatgcgactcagtggtgatgttggggagaggatcgcaggaggcgatgaggtggcagaggtcccctttgagaaggagacccaggagaacaaactggtgtgcatggttaaaatcctgcaagctactgggttgccacagcatctgtcccactttgtgttctgcaaatacagcttctgggatcaacaggagccggtgattgtcgctcctgaagtggacacctcctcctcttccgtcagcaaggagccgcactgcatggttgtctttgatcattgcaatgagttttctgttaacatcaccgaagactttatcgagcatctttccgaaggagcattggcaattgaagtatatggacataaaataaacgatccccggaaaaaccccgccctgtgggatttgggaatcatccaagcaaagacacgtagtcttcgggacagatggagtgaagtgaccaggaaattggaattctgggttcaaatcttggaacagaatgagaatggtgaatactgccctgtagaagtgatttctgcaaaggatgtcccaacaggaggaatcttccagctccggcaggggcagtcccggagagttcaagtcgaagtgaagtcagtgcaggaatctgggactttaccactgatggaagaatgtatactgtctgttggcattggatgtgtcaaagttagaccgctcagagcccccagaacacatgagaccttccatgaggaagaggaagacatggacagctaccaggatcgagatttagagagacttcgtagaaaatggctaaatgcattaacaaaacgtcaggagtacttggatcaacaattgcaaaagcttgtcagtaaacgtgataaaacagaggatgatgctgaccgtgaagcgcagcttctggagatgcggttgaccctaactgaggagaggaacgcggtgatggtcccctctgctggcagtggtattccaggggccccagcagaatggaccccagtacctgggatggagacacacattcctgttatattcctggacttaaatgctgatgatttcagctctcaggataatcttgatgacccagaagctggtggatgggatgcgaccttgactggggaagaagaagaggagttctttgaattgcagattgtgaagcagcatgatggggaggtgaaagcagaagcctcctgggactccgcggtgcatggctgccctcagctcagcaggggcacgcccgtggacgagcggttgttcctgatcgtgcgcgtgacggtccagctcagccaccctgctgacatgcaactggtgttacgcaagagaatctgtgtcaatgttcacggccgccagggttttgcacagagtctcctaaaaaagatgtctcatcgaagttctattcctggctgtggagtgacttttgaaattgtctccaatattccagaggatgcccagggagtggaagaacgggaagcattagcaagaatggcagccaatgttgaaaacccagcttctgctgactcggaggcttatattgaaaagtacctcaggagcgtgctggctgtagaaaacctcctgactttagatcgtctgcgccaggaagttgcagtgaaggaacagttaacaggaaaaggaaagttgagcaggaggagtatcagttctccaaatgtgaacagattgtctggaagccgacaagatctcattccatcatacagtctaggcagcaacaagggccggtgggaaagtcagcaggatgtatcccaaaccacagtttccagaggaatagctcctgcccccgccctctctgtttctccccaaaataaccattctccagatccaggactcagtaaccttgcagcatcctacttgaatcctgtcaaatccttcgtgccgcaaatgccaaagctcctcaagtctctctttcccgtccgcgatgagaagaggggcaagcggccgtctcccctcgcacaccagcccgtgccccgcatcatggtgcagtcagccagcccggacatcagggtgaccaggatggaggaggctcagccggagatgggccctgacgtgctggtgcagacgatgggggccccggccttgaagatctgcgacaaacctgccaaagtgccttccccaccgcctgtcatagctgtcacagcggtcaccccggctccggaggcacaggacgggccccccagccccctgagtgaagcctctagcgggtacttctcccacagcgtctccaccgcgaccctgtcggacgccctgggccccggcctggacgctgcggccccgccggggtccatgcccaccgcccctgaggccgagcccgaggcgcccatcagccaccccccaccgcccacggccgtccccgccgaggagccccctggcccccagcagctcgtgagccccggtcgggagcgccccgacctcgaggccccggcgcccggctccccgttccgcgtccggagggtgcgggcctcggagttgcgctccttctcgcgcatgctggctggggaccccggctgctccccgggggccgaggggaatgcgccggccccgggcgccgggggacaggccctggcctctgattccgaggaagctgacgaggtcccggagtggctccgagagggcgagttcgtcaccgtgggcgcccacaaaacgggcgtggtgagatacgtggggcctgccgacttccaagagggcacgtgggtcggcgtggagctcgacctgccctcaggtaagaatgacggttccatcggcgggaagcagtacttcaggtgtaaccctggctacgggctgctggtcaggcccagccgggtccgcagggccacgggccctgtgcggcggcgcagcacaggactccggctgggtgcccccgaggcccgccggagcgccaccctctcgggctccgccaccaacctggcctcgctgacagctgccctggccaaggccgacaggagccacaagaaccctgagaaccggaaatcctgggccagctgagccgctgccttagggcgaacttttctgggggtgcccggccccttttgagccctgccagtgacagccctgaggagccaggagcccggtggccccttccccaggggcagggcgatgaatgctttttgcacgacacagggctggtgacctccctgggcctctggaagctttgtttcttctgtacccgggtaaagtgggggcctcaactgtgcctcctccggtggatggaaggttctgggtgcccgcaggggctgggggatgctaggactgagaccctgggtggtgcagcgcctggtgatcttgctgtgtgcctgtgcctggggccttatgttgctctttctatcatttccattctggtggccccactaatgtcttaacctaaaccataattgtaaccagtgcctttcctccccactggagggcaagcccccccacccacccaggatgtcctggctcactccgcaagccccccagcctcccaccctggtcccagtttcccgcaaagtgcctctgggggaccccccagcctcccaccctggtcccaggttccacaagtgcctctggagggccctgggctctggcagatggtcctggtgccccagacgggggccgagggcctgagcccccccatccctcctctgccagggtttcttagcggtttctctgtggatgttttggcatctttagacacctggaaagtctcttatgtttgccgtttattcccttcacagaaggcttggaatgtatttatttatatttattttttcaaaatccgaaatcatttgcgagccgcaatcgtcgtctgcctgtgtgggggggcccagggcctgccttgcacgttgcagcctctctggccattgcagagctgctggcctcctgcccaggtggagggtcctggggacggcagaggataaagccccctcctcacatccctctattgcggatccacagtggccttactcttaacttggatgagagcaaaaacctgggagaatgatgtgcttctgtagtcggtgacaaaggaagaggcattgctactttatttggtgcacttttggtttctaggaaggtctttgggtcattttaacttctcggcaactcccagactctcagagtgtggggctggggcctggcggctgggctggtgcagggagtgtgctggttagtctccagaccctcacagcagccacgcccccaggcccaccgtgcatggtgtgggcgggacagccggaagcttccggggtggcctccacctcctggctggggcacttatgctcccagagcctttggtgccaggtttgtgggatgggggttagcgtctatgtgtggaaggccaccaatctagggacaggagtcctgggtcaagattcacacagccacccttggagctggtttctagttctcacatttagtcaacatctagaaagcgctgcggaaggctctggttctctagggacttgaaggcgccaacagagtagtctccatggtgggcctgtcccagccctggctgcgaggacaggttgtctttctctccccagttggcgagggacacgaaggctgcggccgggctggcagagggcccggcccctggggggaggcactcctccagggctctccctgtccttagccgattttgagggaaccctgtggcacctgtccctggatgaagagctgtcacctctgccttgccctttaactcaacccgcttcccagcacagcggctttctttttaaaacctgtttcactgagaagtttgtttttgggtccgctggtgtcactatggcctgggtgagaggccagcactgctgctgccctgaggggaaacgcctgggccgtgtagtggggacgctctgggaatggtggcggacgggcagcgtgggtgggacctggcacttcgtggtggctgagccatccacccagcagcggcctcctgtagcaccatcttgggaaagtcctgggggacgtgtgtgtcgtgctttttaccatcggtttgacttacagtggagtagaacgagccagagttcctgacttgagcaggtggatttgggcccaggccctgttcactcttgcttctcggtgcggactaatgtcagcttgtggctgggaaagagggatgtgcagtgacgtggtcaccaaggcagtgagccccgctgaccccgggccagcacttggcaggcaggaggtgcggtctccagagtggtgggccagggcgggctggcctccgtcttctatcttcttttcttgcctccctgaccagcagactcacctcccaagaacgcctgcccgcccacccgccttaggactcccgatgcgctcctggaaggccccaggagtggcaccttagtgtgggtcggcccgcagatggcacccaaggccgggaagggcagtaactgcacacgcggcgctgtcagagatgggggtgggggatgcttctgggggccctgcctccccattgtgtgcccagaacatccctggccccaccccgccacttccctcgggcccttatgaaggactgaggctccagggtgagaaggctcacttctgccccgggcactgcgtccagcagcagaggggacagggggcaggtgtgtgactgggttcctgggtacccaggcctgaccagagggagcgggagggcagaggtgaggagggggaagatgtttctgggcctaccaaggttcaacaagagaacggagctgggaatgtgactgctggagcctgagaggtggaggagttctgatcccccgttacttcctagcattttctcctcttgccttaaaagttccctgtatgtgaaacgggaagtcctgagagtgtgtgttggtggctgtgcgcacgcacacaagacgggagtcaccctgtgcttcctgcccaagatactgacccattgaacccccaaagcatctttctctccacaaagtccgtggtgccttcctggtgggctgcagacactaatggtgttggggggtcttggaacagcttctctatgtgtggattcgtgtaaatgcgaagagttcacatataaagaagtgactttgattctgtgattatattgatttggtacacagtaaatgggagtttaaaaaatccaaagactctaatgacttgtaaagactctaatgatttgtatcatgtaatgaactaaaccacctgtaattttgtaccgtatgtgtctttccatcaaatgaccaacagcttctcaataaaaccagaccatttctcacctgca

SEQ ID NO: 283765 - DNA, 9240 bp, Homo sapiens
cagacggaagccgaacgagttcctcggcggctgcaggatgggggactccaaagtgaaagtggcggtgcggatacgacccatgaaccggcgagagactgacttgcataccaaatgtgtggtggatgtggatgcaaacaaggttattcttaatcctgtaaatacgaatctttccaaaggagatgcccggggccagccgaaggtgtttgcttatgatcattgtttctggtctatggatgaatctgtcaaagaaaagtatgcaggtcaagatattgttttcaagtgccttggagagaatatcctgcagaatgcttttgatggctacaatgcatgtatctttgcctatggacagactggctctggaaaatcttataccatgatgggcacagctgaccaacctggattaatcccaagactttgcagtggactctttgaacgaactcagaaagaggaaaatgaagaacagagttttaaagtagaagtgtcctacatggaaatttataatgaaaaagttcgagaccttcttgatcccaaaggaagccgtcagacgttgaaagtcagagagcatagtgtgttgggaccttatgtcgacggactttctaaactggctgtcacaagctacaaggatattgagtcgttgatgtctgagggtaacaaatctcgcacagttgctgcaaccaacatgaacgaggagagtagccgatcccatgcagttttcaaaatcaccctcacacatactctctacgatgtgaagtctgggacatctggagagaaagtgggcaaactcagcctggtggatttagctggcagtgaacgagcaacgaagacaggcgctgcaggggacaggctgaaggaagggagcaacattaacaagtccctcacaaccctcggtctggttatctcagctcttgcagatcagagtgctggcaaaaacaagaataaatttgttccatatcgtgactcagttctcacttggctgctcaaagacagcctcgggggtaacagcaagaccgccatggtggctactgtgagtcctgcagctgataactatgatgaaaccctctcaactctgcggtatgcagatcgagccaagcacattgtaaaccacgctgtggtgaatgaggaccctaatgcccgaattatccgggatctccgggaagaagttgagaaactccgggagcagctgaccaaagcagaggcaatgaaatctccagagctaaaggaccggctggaagaatctgagaagctaatccaggaaatgactgtgacctgggaggagaaattaaggaaaacggaggagattgcacaggaacgacagaaacagcttgagagtcttggaatatctcttcagtcttcgggaatcaaagttggggatgataaatgcttccttgtgaatctgaatgctgacccagctctgaatgagcttctggtgtactatttaaaggaacatacattgatagggtcagcaaattcccaagatatccaactgtgcggcatgggaattcttcctgaacactgtattatagacatcacgtcagaaggccaggttatgctgactcctcagaagaacaccagaacatttgtaaatgggtcatctgtctccagtccaatacagctacaccatggggacaggatattatggggaaacaatcatttcttcagactcaatttgcctaaaaagaaaaagaaagcagaacgagaggatgaggaccaggatccctccatgaagaacgagaatagttctgagcagctggatgtagacggagactcctccagcgaggtgtccagtgaagttaactttaattacgaatacgcacagatggaggtcaccatgaaggccctgggcagcaatgatccgatgcagtccatattaaacagcctagaacaacagcatgaagaagaaaaacgatctgcactggagcgccagaggcttatgtatgagcacgaattggagcagctccggagaaggctgtctcctgagaagcagaactgccggagcatggacaggttttctttccactcgcccagcgctcagcaacgcttaagacagtgggctgaggagagagaagcaacgttgaataacagcctgatgaggctgagggaacaaattgttaaggccaatctattggtgagagaagctaattacattgctgaggagctggataaaagaacagaatacaaagttaccctacagattccagcctccagcctggatgccaacaggaagcgaggctctcttcttagtgagcctgcaatccaggtgagaagaaaaggaaaaggaaagcagatttggtctttggaaaaactggacaacaggctgttggatatgagagacctttatcaggagtggaaagagtgtgaagaagataacccagtaatacgatcatacttcaaacgtgctgatccattctatgatgagcaggaaaatctcagtctcattggggtggccaatgtcttcctcgagtcacttttctatgatgtgaagttacaatacgctgttcccatcatcaaccagaaaggagaggtggcaggtcggctgcacgtggaggtgatgcgactcagtggtgatgttggggagaggatcgcaggaggcgatgaggtggcagaggtcccctttgagaaggagacccaggagaacaaactggtgtgcatggttaaaatcctgcaagctactgggttgccacagcatctgtcccactttgtgttctgcaaatacagcttctgggatcaacaggagccggtgattgtcgctcctgaagtggacacctcctcctcttccgtcagcaaggagccgcactgcatggttgtctttgatcattgcaatgagttttctgttaacatcaccgaagactttatcgagcatctttccgaaggagcattggcaattgaagtatatggacataaaataaacgatccccggaaaaaccccgccctgtgggatttgggaatcatccaagcaaagacacgtagtcttcgggacagatggagtgaagtgaccaggaaattggaattctgggttcaaatcttggaacagaatgagaatggtgaatactgccctgtagaagtgatttctgcaaaggatgtcccaacaggaggaatcttccagctccggcaggggcagtcccggagagttcaagtcgaagtgaagtcagtgcaggaatctgggactttaccactgatggaagaatgtatactgtctgttggcattggatgtgtcaaagttagaccgctcagagcccccagaacacatgagaccttccatgaggaagaggaagacatggacagctaccaggatcgagatttagagagacttcgtagaaaatggctaaatgcattaacaaaacgtcaggagtacttggatcaacaattgcaaaagcttgtcagtaaacgtgataaaacagaggatgatgctgaccgtgaagcgcagcttctggagatgcggttgaccctaactgaggagaggaacgcggtgatggtcccctctgctggcagtggtattccaggggccccagcagaatggaccccagtacctgggatggagacacacattcctgttatattcctggacttaaatgctgatgatttcagctctcaggataatcttgatgacccagaagctggtggatgggatgcgaccttgactggggaagaagaagaggagttctttgaattgcagattgtgaagcagcatgatggggaggtgaaagcagaagcctcctgggactccgcggtgcatggctgccctcagctcagcaggggcacgcccgtggacgagcggttgttcctgatcgtgcgcgtgacggtccagctcagccaccctgctgacatgcaactggtgttacgcaagagaatctgtgtcaatgttcacggccgccagggttttgcacagagtctcctaaaaaagatgtctcatcgaagttctattcctggctgtggagtgacttttgaaattgtctccaatattccagaggatgcccagggagtggaagaacgggaagcattagcaagaatggcagccaatgttgaaaacccagcttctgctgactcggaggcttatattgaaaagtacctcaggagcgtgctggctgtagaaaacctcctgactttagatcgtctgcgccaggaagttgcagtgaaggaacagttaacaggaaaaggaaagttgagcaggaggagtatcagttctccaaatgtgaacagattgtctggaagccgacaagatctcattccatcatacagtctaggcagcaacaagggccggtgggaaagtcagcaggatgtatcccaaaccacagtttccagaggaatagctcctgcccccgccctctctgtttctccccaaaataaccattctccagatccaggactcagtaaccttgcagcatcctacttgaatcctgtcaaatccttcgtgccgcaaatgccaaagctcctcaagtctctctttcccgtccgcgatgagaagaggggcaagcggccgtctcccctcgcacaccagcccgtgccccgcatcatggtgcagtcagccagcccggacatcagggtgaccaggatggaggaggctcagccggagatgggccctgacgtgctggtgcagacgatgggggccccggccttgaagatctgcgacaaacctgccaaagtgccttccccaccgcctgtcatagctgtcacagcggtcaccccggctccggaggcacaggacgggccccccagccccctgagtgaagcctctagcgggtacttctcccacagcgtctccaccgcgaccctgtcggacgccctgggccccggcctggacgctgcggccccgccggggtccatgcccaccgcccctgaggccgagcccgaggcgcccatcagccaccccccaccgcccacggccgtccccgccgaggagccccctggcccccagcagctcgtgagccccggtcgggagcgccccgacctcgaggccccggcgcccggctccccgttccgcgtccggagggtgcgggcctcggagttgcgctccttctcgcgcatgctggctggggaccccggctgctccccgggggccgaggggaatgcgccggccccgggcgccgggggacaggccctggcctctgattccgaggaagctgacgaggtcccggagtggctccgagagggcgagttcgtcaccgtgggcgcccacaaaacgggcgtggtgagatacgtggggcctgccgacttccaagagggcacgtgggtcggcgtggagctcgacctgccctcaggtaagaatgacggttccatcggcgggaagcagtacttcaggtgtaaccctggctacgggctgctggtcaggcccagccgggtccgcagggccacgggccctgtgcggcggcgcagcacaggactccggctgggtgcccccgaggcccgccggagcgccaccctctcgggctccgccaccaacctggcctcgctgacagctgccctggccaaggccgacaggagccacaagaaccctgagaaccggaaatcctgggccagctgagccgctgccttagggcgaacttttctgggggtgcccggccccttttgagccctgccagtgacagccctgaggagccaggagcccggtggccccttccccaggggcagggcgatgaatgctttttgcacgacacagggctggtgacctccctgggcctctggaagctttgtttcttctgtacccgggtaaagtgggggcctcaactgtgcctcctccggtggatggaaggttctgggtgcccgcaggggctgggggatgctaggactgagaccctgggtggtgcagcgcctggtgatcttgctgtgtgcctgtgcctggggccttatgttgctctttctatcatttccattctggtggccccactaatgtcttaacctaaaccataattgtaaccagtgcctttcctccccactggagggcaagcccccccacccacccaggatgtcctggctcactccgcaagccccccagcctcccaccctggtcccagtttcccgcaaagtgcctctgggggaccccccagcctcccaccctggtcccaggttccacaagtgcctctggagggccctgggctctggcagatggtcctggtgccccagacgggggccgagggcctgagcccccccatccctcctctgccagggtttcttagcggtttctctgtggatgttttggcatctttagacacctggaaagtctcttatgtttgccgtttattcccttcacagaaggcttggaatgtatttatttatatttattttttcaaaatccgaaatcatttgcgagccgcaatcgtcgtctgcctgtgtgggggggcccagggcctgccttgcacgttgcagcctctctggccattgcagagctgctggcctcctgcccaggtggagggtcctggggacggcagaggataaagccccctcctcacatccctctattgcggatccacagtggccttactcttaacttggatgagagcaaaaacctgggagaatgatgtgcttctgtagtcggtgacaaaggaagaggcattgctactttatttggtgcacttttggtttctaggaaggtctttgggtcattttaacttctcggcaactcccagactctcagagtgtggggctggggcctggcggctgggctggtgcagggagtgtgctggttagtctccagaccctcacagcagccacgcccccaggcccaccgtgcatggtgtgggcgggacagccggaagcttccggggtggcctccacctcctggctggggcacttatgctcccagagcctttggtgccaggtttgtgggatgggggttagcgtctatgtgtggaaggccaccaatctagggacaggagtcctgggtcaagattcacacagccacccttggagctggtttctagttctcacatttagtcaacatctagaaagcgctgcggaaggctctggttctctagggacttgaaggcgccaacagagtagtctccatggtgggcctgtcccagccctggctgcgaggacaggttgtctttctctccccagttggcgagggacacgaaggctgcggccgggctggcagagggcccggcccctggggggaggcactcctccagggctctccctgtccttagccgattttgagggaaccctgtggcacctgtccctggatgaagagctgtcacctctgccttgccctttaactcaacccgcttcccagcacagcggctttctttttaaaacctgtttcactgagaagtttgtttttgggtccgctggtgtcactatggcctgggtgagaggccagcactgctgctgccctgaggggaaacgcctgggccgtgtagtggggacgctctgggaatggtggcggacgggcagcgtgggtgggacctggcacttcgtggtggctgagccatccacccagcagcggcctcctgtagcaccatcttgggaaagtcctgggggacgtgtgtgtcgtgctttttaccatcggtttgacttacagtggagtagaacgagccagagttcctgacttgagcaggtggatttgggcccaggccctgttcactcttgcttctcggtgcggactaatgtcagcttgtggctgggaaagagggatgtgcagtgacgtggtcaccaaggcagtgagccccgctgaccccgggccagcacttggcaggcaggaggtgcggtctccagagtggtgggccagggcgggctggcctccgtcttctatcttcttttcttgcctccctgaccagcagactcacctcccaagaacgcctgcccgcccacccgccttaggactcccgatgcgctcctggaaggccccaggagtggcaccttagtgtgggtcggcccgcagatggcacccaaggccgggaagggcagtaactgcacacgcggcgctgtcagagatgggggtgggggatgcttctgggggccctgcctccccattgtgtgcccagaacatccctggccccaccccgccacttccctcgggcccttatgaaggactgaggctccagggtgagaaggctcacttctgccccgggcactgcgtccagcagcagaggggacagggggcaggtgtgtgactgggttcctgggtacccaggcctgaccagagggagcgggagggcagaggtgaggagggggaagatgtttctgggcctaccaaggttcaacaagagaacggagctgggaatgtgactgctggagcctgagaggtggaggagttctgatcccccgttacttcctagcattttctcctcttgccttaaaagttccctgtatgtgaaacgggaagtcctgagagtgtgtgttggtggctgtgcgcacgcacacaagacgggagtcaccctgtgcttcctgcccaagatactgacccattgaacccccaaagcatctttctctccacaaagtccgtggtgccttcctggtgggctgcagacactaatggtgttggggggtcttggaacagcttctctatgtgtggattcgtgtaaatgcgaagagttcacatataaagaagtgactttgattctgtgattatattgatttggtacacagtaaatgggagtttaaaaaatccaaagactctaatgacttgtaaagactctaatgatttgtatcatgtaatgaactaaaccacctgtaattttgtaccgtatgtgtctttccatcaaatgaccaacagcttctcaataaaaccagaccatttctcacctgcaaaaaaaaagaagcaagaatgaaaaaaacaagatggaaaggacgacgacaaaagagagaaggagacggggaaaacacaaaaagaagagaacaaaaaaaaagtgggggggggggcgcaacccacaaaataaggtattaaaaaccaaggtagcttgggcggacgcaccaaaaaaggtaggaagagcgagtgacagacgtgctaacccaaaaagcacagcggcaacagagcgggggcggaccccacaaaaaaaccgcgcggggagcaccatgtgttgcgaaccaaccacaagagggggggatgcatacgtgggaacaaacagagcggcgaggacataaaaaccacccggcggggaggaagacgcagccgaggtcacgctagaccacggagacagaccaagacgaccgaagtctgaagctagacgaagctagccaaacgaagaaggaagaagctgcacagcaatgagacaaacaacatgcagatgagacaagaacacatag

SEQ ID NO: 283766 - DNA, 4622 bp, Homo sapiens
gcaaacagtctgatttaattaggaagttaaataagttgaggtggggtggagtatcagttctccaaatgtgaacagattgtctggaagccgacaagatctcattccatcatacagtctaggcagcaacaagggccggtgggaaagtcagcaggatgtatcccaaaccacagtttccagaggaatagctcctgcccccgccctctctgtttctccccaaaataaccattctccagatccaggactcagtaaccttgcagcatcctacttgaatcctgtcaaatccttcgtgccgcaaatgccaaagctcctcaagtctctctttcccgtccgcgatgagaagaggggcaagcggccgtctcccctcgcacaccagcccgtgccccgcatcatggtgcagtcagccagcccggacatcagggtgaccaggatggaggaggctcagccggagatgggccctgacgtgctggtgcagacgatgggggccccggccttgaagatctgcgacaaacctgccaaagtgccttccccaccgcctgtcatagctgtcacagcggtcaccccggctccggaggcacaggacgggccccccagccccctgagtgaagcctctagcgggtacttctcccacagcgtctccaccgcgaccctgtcggacgccctgggccccggcctggacgctgcggccccgccggggtccatgcccaccgcccctgaggccgagcccgaggcgcccatcagccaccccccaccgcccacggccgtccccgccgaggagccccctggcccccagcagctcgtgagccccggtcgggagcgccccgacctcgaggccccggcgcccggctccccgttccgcgtccggagggtgcgggcctcggagttgcgctccttctcgcgcatgctggctggggaccccggctgctccccgggggccgaggggaatgcgccggccccgggcgccgggggacaggccctggcctctgattccgaggaagctgacgaggtcccggagtggctccgagagggcgagttcgtcaccgtgggcgcccacaaaacgggcgtggtgagatacgtggggcctgccgacttccaagagggcacgtgggtcggcgtggagctcgacctgccctcaggtaagaatgacggttccatcggcgggaagcagtacttcaggtgtaaccctggctacgggctgctggtcaggcccagccgggtccgcagggccacgggccctgtgcggcggcgcagcacaggactccggctgggtgcccccgaggcccgccggagcgccaccctctcgggctccgccaccaacctggcctcgctgacagctgccctggccaaggccgacaggagccacaagaaccctgagaaccggaaatcctgggccagctgagccgctgccttagggcgaacttttctgggggtgcccggccccttttgagccctgccagtgacagccctgaggagccaggagcccggtggccccttccccaggggcagggcgatgaatgctttttgcacgacacagggctggtgacctccctgggcctctggaagctttgtttcttctgtacccgggtaaagtgggggcctcaactgtgcctcctccggtggatggaaggttctgggtgcccgcaggggctgggggatgctaggactgagaccctgggtggtgcagcgcctggtgatcttgctgtgtgcctgtgcctggggccttatgttgctctttctatcatttccattctggtggccccactaatgtcttaacctaaaccataattgtaaccagtgcctttcctccccactggagggcaagcccccccacccacccaggatgtcctggctcactccgcaagccccccagcctcccaccctggtcccagtttcccgcaaagtgcctctgggggaccccccagcctcccaccctggtcccaggttccacaagtgcctctggagggccctgggctctggcagatggtcctggtgccccagacgggggccgagggcctgagcccccccatccctcctctgccagggtttcttagcggtttctctgtggatgttttggcatctttagacacctggaaagtctcttatgtttgccgtttattcccttcacagaaggcttggaatgtatttatttatatttattttttcaaaatccgaaatcatttgcgagccgcaatcgtcgtctgcctgtgtgggggggcccagggcctgccttgcacgttgcagcctctctggccattgcagagctgctggcctcctgcccaggtggagggtcctggggacggcagaggataaagccccctcctcacatccctctattgcggatccacagtggccttactcttaacttggatgagagcaaaaacctgggagaatgatgtgcttctgtagtcggtgacaaaggaagaggcattgctactttatttggtgcacttttggtttctaggaaggtctttgggtcattttaacttctcggcaactcccagactctcagagtgtggggctggggcctggcggctgggctggtgcagggagtgtgctggttagtctccagaccctcacagcagccacgcccccaggcccaccgtgcatggtgtgggcgggacagccggaagcttccggggtggcctccacctcctggctggggcacttatgctcccagagcctttggtgccaggtttgtgggatgggggttagcgtctatgtgtggaaggccaccaatctagggacaggagtcctgggtcaagattcacacagccacccttggagctggtttctagttctcacatttagtcaacatctagaaagcgctgcggaaggctctggttctctagggacttgaaggcgccaacagagtagtctccatggtgggcctgtcccagccctggctgcgaggacaggttgtctttctctccccagttggcgagggacacgaaggctgcggccgggctggcagagggcccggcccctggggggaggcactcctccagggctctccctgtccttagccgattttgagggaaccctgtggcacctgtccctggatgaagagctgtcacctctgccttgccctttaactcaacccgcttcccagcacagcggctttctttttaaaacctgtttcactgagaagtttgtttttgggtccgctggtgtcactatggcctgggtgagaggccagcactgctgctgccctgaggggaaacgcctgggccgtgtagtggggacgctctgggaatggtggcggacgggcagcgtgggtgggacctggcacttcgtggtggctgagccatccacccagcagcggcctcctgtagcaccatcttgggaaagtcctgggggacgtgtgtgtcgtgctttttaccatcggtttgacttacagtggagtagaacgagccagagttcctgacttgagcaggtggatttgggcccaggccctgttcactcttgcttctcggtgcggactaatgtcagcttgtggctgggaaagagggatgtgcagtgacgtggtcaccaaggcagtgagccccgctgaccccgggccagcacttggcaggcaggaggtgcggtctccagagtggtgggccagggcgggctggcctccgtcttctatcttcttttcttgcctccctgaccagcagactcacctcccaagaacgcctgcccgcccacccgccttaggactcccgatgcgctcctggaaggccccaggagtggcaccttagtgtgggtcggcccgcagatggcacccaaggccgggaagggcagtaactgcacacgcggcgctgtcagagatgggggtgggggatgcttctgggggccctgcctccccattgtgtgcccagaacatccctggccccaccccgccacttccctcgggcccttatgaaggactgaggctccagggtgagaaggctcacttctgccccgggcactgcgtccagcagcagaggggacagggggcaggtgtgtgactgggttcctgggtacccaggcctgaccagagggagcgggagggcagaggtgaggagggggaagatgtttctgggcctaccaaggttcaacaagagaacggagctgggaatgtgactgctggagcctgagaggtggaggagttctgatcccccgttacttcctagcattttctcctcttgccttaaaagttccctgtatgtgaaacgggaagtcctgagagtgtgtgttggtggctgtgcgcacgcacacaagacgggagtcaccctgtgcttcctgcccaagatactgacccattgaacccccaaagcatctttctctccacaaagtccgtggtgccttcctggtgggctgcagacactaatggtgttggggggtcttggaacagcttctctatgtgtggattcgtgtaaatgcgaagagttcacatataaagaagtgactttgattctgtgattatattgatttggtacacagtaaatgggagtttaaaaaatccaaagactctaatgacttgtaaagactctaatgatttgtatcatgtaatgaactaaaccacctgtaattttgtaccgtatgtgtctttccatcaaatgaccaacagcttctcaataaaaccagaccatttctcacctgca

SEQ ID NO: 283767 - DNA, 8424 bp, Homo sapiens
cagacggaagccgaacgagttcctcggcggctgcaggatgggggactccaaagtgaaagtggcggtgcggatacgacccatgaaccggcgagagactgacttgcataccaaatgtgtggtggatgtggatgcaaacaaggttattcttaatcctgtaaatacgaatctttccaaaggagatgcccggggccagccgaaggtgtttgcttatgatcattgtttctggtctatggatgaatctgtcaaagaaaagtatgcaggtcaagatattgttttcaagtgccttggagagaatatcctgcagaatgcttttgatggctacaatgcatgtatctttgcctatggacagactggctctggaaaatcttataccatgatgggcacagctgaccaacctggattaatcccaagactttgcagtggactctttgaacgaactcagaaagaggaaaatgaagaacagagttttaaagtagaagtgtcctacatggaaatttataatgaaaaagttcgagaccttcttgatcccaaaggaagccgtcagacgttgaaagtcagagagcatagtgtgttgggaccttatgtcgacggactttctaaactggctgtcacaagctacaaggatattgagtcgttgatgtctgagggtaacaaatctcgcacagttgctgcaaccaacatgaacgaggagagtagccgatcccatgcagttttcaaaatcaccctcacacatactctctacgatgtgaagtctgggacatctggagagaaagtgggcaaactcagcctggtggatttagctggcagtgaacgagcaacgaagacaggcgctgcaggggacaggctgaaggaagggagcaacattaacaagtccctcacaaccctcggtctggttatctcagctcttgcagatcagagtgctggcaaaaacaagaataaatttgttccatatcgtgactcagttctcacttggctgctcaaagacagcctcgggggtaacagcaagaccgccatggtggctactgtgagtcctgcagctgataactatgatgaaaccctctcaactctgcggtatgcagatcgagccaagcacattgtaaaccacgctgtggtgaatgaggaccctaatgcccgaattatccgggatctccgggaagaagttgagaaactccgggagcagctgaccaaagcagaggcaatgaaatctccagagctaaaggaccggctggaagaatctgagaagctaatccaggaaatgactgtgacctgggaggagaaattaaggaaaacggaggagattgcacaggaacgacagaaacagcttgagagtcttggaatatctcttcagtcttcgggaatcaaagttggggatgataaatgcttccttgtgaatctgaatgctgacccagctctgaatgagcttctggtgtactatttaaaggaacatacattgatagggtcagcaaattcccaagatatccaactgtgcggcatgggaattcttcctgaacactgtattatagacatcacgtcagaaggccaggttatgctgactcctcagaagaacaccagaacatttgtaaatgggtcatctgtctccagtccaatacagctacaccatggggacaggatattatggggaaacaatcatttcttcagactcaatttgcctaaaaagaaaaagaaagcagaacgagaggatgaggaccaggatccctccatgaagaacgagaatagttctgagcagctggatgtagacggagactcctccagcgaggtgtccagtgaagttaactttaattacgaatacgcacagatggaggtcaccatgaaggccctgggcagcaatgatccgatgcagtccatattaaacagcctagaacaacagcatgaagaagaaaaacgatctgcactggagcgccagaggcttatgtatgagcacgaattggagcagctccggagaaggctgtctcctgagaagcagaactgccggagcatggacaggttttctttccactcgcccagcgctcagcaacgcttaagacagtgggctgaggagagagaagcaacgttgaataacagcctgatgaggctgagggaacaaattgttaaggccaatctattggtgagagaagctaattacattgctgaggagctggataaaagaacagaatacaaagttaccctacagattccagcctccagcctggatgccaacaggaagcgaggctctcttcttagtgagcctgcaatccaggtgagaagaaaaggaaaaggaaagcagatttggtctttggaaaaactggacaacaggctgttggatatgagagacctttatcaggagtggaaagagtgtgaagaagataacccagtaatacgatcatacttcaaacgtgctgatccattctatgatgagcaggaaaatctcagtctcattggggtggccaatgtcttcctcgagtcacttttctatgatgtgaagttacaatacgctgttcccatcatcaaccagaaaggagaggtggcaggtcggctgcacgtggaggtgatgcgactcagtggtgatgttggggagaggatcgcaggaggcgatgaggtggcagaggtcccctttgagaaggagacccaggagaacaaactggtgtgcatggttaaaatcctgcaagctactgggttgccacagcatctgtcccactttgtgttctgcaaatacagcttctgggatcaacaggagccggtgattgtcgctcctgaagtggacacctcctcctcttccgtcagcaaggagccgcactgcatggttgtctttgatcattgcaatgagttttctgttaacatcaccgaagactttatcgagcatctttccgaaggagcattggcaattgaagtatatggacataaaataaacgatccccggaaaaaccccgccctgtgggatttgggaatcatccaagcaaagacacgtagtcttcgggacagatggagtgaagtgaccaggaaattggaattctgggttcaaatcttggaacagaatgagaatggtgaatactgccctgtagaagtgatttctgcaaaggatgtcccaacaggaggaatcttccagctccggcaggggcagtcccggagagttcaagtcgaagtgaagtcagtgcaggaatctgggactttaccactgatggaagaatgtatactgtctgttggcattggatgtgtcaaagttagaccgctcagagcccccagaacacatgagaccttccatgaggaagaggaagacatggacagctaccaggatcgagatttagagagacttcgtagaaaatggctaaatgcattaacaaaacgtcaggagtacttggatcaacaattgcaaaagcttgtcagtaaacgtgataaaacagaggatgatgctgaccgtgaagcgcagcttctggagatgcggttgaccctaactgaggagaggaacgcggtgatggtcccctctgctggcagtggtattccaggggccccagcagaatggaccccagtacctgggatggagacacacattcctgttatattcctggacttaaatgctgatgatttcagctctcaggataatcttgatgacccagaagctggtggatgggatgcgaccttgactggggaagaagaagaggagttctttgaattgcagattgtgaagcagcatgatggggaggtgaaagcagaagcctcctgggactccgcggtgcatggctgccctcagctcagcaggggcacgcccgtggacgagcggttgttcctgatcgtgcgcgtgacggtccagctcagccaccctgctgacatgcaactggtgttacgcaagagaatctgtgtcaatgttcacggccgccagggttttgcacagagtctcctaaaaaagatgtctcatcgaagttctattcctggctgtggagtgacttttgaaattgtctccaatattccagaggatgcccagggagtggaagaacgggaagcattagcaagaatggcagccaatgttgaaaacccagcttctgctgactcggaggcttatattgaaaagtacctcaggagcgtgctggctgtagaaaacctcctgactttagatcgtctgcgccaggaagttgcagtgaaggaacagttaacaggaaaaggaaagttgagcaggaggagtatcagttctccaaatgtgaacagattgtctggaagccgacaagatctcattccatcatacagtctaggcagcaacaagggccggtgggaaagtcagcaggatgtatcccaaaccacagtttccagaggaatagctcctgcccccgccctctctgtttctccccaaaataaccattctccagatccaggactcagtaaccttgcagcatcctacttgaatcctgtcaaatccttcgtgccgcaaatgccaaagctcctcaagtctctctttcccgtccgcgatgagaagaggggcaagcggccgtctcccctcgcacaccagcccgtgccccgcatcatggtgcagtcagccagcccggacatcagggtgaccaggatggaggaggctcagccggagatgggccctgacgtgctggtgcagacgatgggggccccggccttgaagatctgcgacaaacctgccaaagtgccttccccaccgcctgtcatagctgtcacagcggtcaccccggctccggaggcacaggacgggccccccagccccctgagtgaagcctctagcgggtacttctcccacagcgtctccaccgcgaccctgtcggacgccctgggccccggcctggacgctgcggccccgccggggtccatgcccaccgcccctgaggccgagcccgaggcgcccatcagccaccccccaccgcccacggccgtccccgccgaggagccccctggcccccagcagctcgtgagccccggtcgggagcgccccgacctcgaggccccggcgcccggctccccgttccgcgtccggagggtgcgggcctcggagttgcgctccttctcgcgcatgctggctggggaccccggctgctccccgggggccgaggggaatgcgccggccccgggcgccgggggacaggccctggcctctgattccgaggaagctgacgaggtcccggagtggctccgagagggcgagttcgtcaccgtgggcgcccacaaaacgggcgtggtgagatacgtggggcctgccgacttccaagagggcacgtgggtcggcgtggagctcgacctgccctcaggtaagaatgacggttccatcggcgggaagcagtacttcaggtgtaaccctggctacgggctgctggtcaggcccagccgggtccgcagggccacgggccctgtgcggcggcgcagcacaggactccggctgggtgcccccgaggcccgccggagcgccaccctctcgggctccgccaccaacctggcctcgctgacagctgccctggccaaggccgacaggagccacaagaaccctgagaaccggaaatcctgggccagctgagccgctgccttagggcgaacttttctgggggtgcccggccccttttgagccctgccagtgacagccctgaggagccaggagcccggtggccccttccccaggggcagggcgatgaatgctttttgcacgacacagggctggtgacctccctgggcctctggaagctttgtttcttctgtacccgggtaaagtgggggcctcaactgtgcctcctccggtggatggaaggttctgggtgcccgcaggggctgggggatgctaggactgagaccctgggtggtgcagcgcctggtgatcttgctgtgtgcctgtgcctggggccttatgttgctctttctatcatttccattctggtggccccactaatgtcttaacctaaaccataattgtaaccagtgcctttcctccccactggagggcaagcccccccacccacccaggatgtcctggctcactccgcaagccccccagcctcccaccctggtcccagtttcccgcaaagtgcctctgggggaccccccagcctcccaccctggtcccaggttccacaagtgcctctggagggccctgggctctggcagatggtcctggtgccccagacgggggccgagggcctgagcccccccatccctcctctgccagggtttcttagcggtttctctgtggatgttttggcatctttagacacctggaaagtctcttatgtttgccgtttattcccttcacagaaggcttggaatgtatttatttatatttattttttcaaaatccgaaatcatttgcgagccgcaatcgtcgtctgcctgtgtgggggggcccagggcctgccttgcacgttgcagcctctctggccattgcagagctgctggcctcctgcccaggtggagggtcctggggacggcagaggataaagccccctcctcacatccctctattgcggatccacagtggccttactcttaacttggatgagagcaaaaacctgggagaatgatgtgcttctgtagtcggtgacaaaggaagaggcattgctactttatttggtgcacttttggtttctaggaaggtctttgggtcattttaacttctcggcaactcccagactctcagagtgtggggctggggcctggcggctgggctggtgcagggagtgtgctggttagtctccagaccctcacagcagccacgcccccaggcccaccgtgcatggtgtgggcgggacagccggaagcttccggggtggcctccacctcctggctggggcacttatgctcccagagcctttggtgccaggtttgtgggatgggggttagcgtctatgtgtggaaggccaccaatctagggacaggagtcctgggtcaagattcacacagccacccttggagctggtttctagttctcacatttagtcaacatctagaaagcgctgcggaaggctctggttctctagggacttgaaggcgccaacagagtagtctccatggtgggcctgtcccagccctggctgcgaggacaggttgtctttctctccccagttggcgagggacacgaaggctgcggccgggctggcagagggcccggcccctggggggaggcactcctccagggctctccctgtccttagccgattttgagggaaccctgtggcacctgtccctggatgaagagctgtcacctctgccttgccctttaactcaacccgcttcccagcacagcggctttctttttaaaacctgtttcactgagaagtttgtttttgggtccgctggtgtcactatggcctgggtgagaggccagcactgctgctgccctgaggggaaacgcctgggccgtgtagtggggacgctctgggaatggtggcggacgggcagcgtgggtgggacctggcacttcgtggtggctgagccatccacccagcagcggcctcctgtagcaccatcttgggaaagtcctgggggacgtgtgtgtcgtgctttttaccatcggtttgacttacagtggagtagaacgagccagagttcctgacttgagcaggtggatttgggcccaggccctgttcactcttgcttctcggtgcggactaatgtcagcttgtggctgggaaagagggatgtgcagtgacgtggtcaccaaggcagtgagccccgctgaccccgggccagcacttggcaggcaggaggtgcggtctccagagtggtgggccagggcgggctggcctccgtcttctatcttcttttcttgcctccctgaccagcagactcacctcccaagaacgcctgcccgcccacccgccttaggactcccgatgcgctcctggaaggccccaggagtggcaccttagtgtgggtcggcccgcagatggcacccaaggccgggaagggcagtaactgcacacgcggcgctgtcagagatgggggtgggggatgcttctgggggccctgcctccccattgtgtgcccagaacatccctggccccaccccgccacttccctcgggcccttatgaaggactgaggctccagggtgagaaggctcacttctgccccgggcactgcgtccagcagcagaggggacagggggcaggtgtgtgactgggttcctgggtacccaggcctgaccagagggagcgggagggcagaggtgaggagggggaagatgtttctgggcctaccaaggttcaacaagagaacggagctgggaatgtgactgctggagcctgagaggtggaggagttctgatcccccgttacttcctagcattttctcctcttgccttaaaagttccctgtatgtgaaacgggaagtcctgagagtgtgtgttggtggctgtgcgcacgcacacaagacgggagtcaccctgtgcttcctgcccagagccggggataagatcctgctagagtcacccacc

SEQ ID NO: 283768 - DNA, 6611 bp, Homo sapiens
cagacggaagccgaacgagttcctcggcggctgcaggatgggggactccaaagtgaaagtggcggtgcggatacgacccatgaaccggcgagagactgacttgcataccaaatgtgtggtggatgtggatgcaaacaaggttattcttaatcctgtaaatacgaatctttccaaaggagatgcccggggccagccgaaggtgtttgcttatgatcattgtttctggtctatggatgaatctgtcaaagaaaagtatgcaggtcaagatattgttttcaagtgccttggagagaatatcctgcagaatgcttttgatggctacaatgcatgtatctttgcctatggacagactggctctggaaaatcttataccatgatgggcacagctgaccaacctggattaatcccaagactttgcagtggactctttgaacgaactcagaaagaggaaaatgaagaacagagttttaaagtagaagtgtcctacatggaaatttataatgaaaaagttcgagaccttcttgatcccaaaggaagccgtcagacgttgaaagtcagagagcatagtgtgttgggaccttatgtcgacggactttctaaactggctgtcacaagctacaaggatattgagtcgttgatgtctgagggtaacaaatctcgcacagttgctgcaaccaacatgaacgaggagagtagccgatcccatgcagttttcaaaatcaccctcacacatactctctacgatgtgaagtctgggacatctggagagaaagtgggcaaactcagcctggtggatttagctggcagtgaacgagcaacgaagacaggcgctgcaggggacaggctgaaggaagggagcaacattaacaagtccctcacaaccctcggtctggttatctcagctcttgcagatcagagtgctggcaaaaacaagaataaatttgttccatatcgtgactcagttctcacttggctgctcaaagacagcctcgggggtaacagcaagaccgccatggtggctactgtgagtcctgcagctgataactatgatgaaaccctctcaactctgcggtatgcagatcgagccaagcacattgtaaaccacgctgtggtgaatgaggaccctaatgcccgaattatccgggatctccgggaagaagttgagaaactccgggagcagctgaccaaagcagaggcaatgaaatctccagagctaaaggaccggctggaagaatctgagaagctaatccaggaaatgactgtgacctgggaggagaaattaaggaaaacggaggagattgcacaggaacgacagaaacagcttgagagtcttggaatatctcttcagtcttcgggaatcaaagttggggatgataaatgcttccttgtgaatctgaatgctgacccagctctgaatgagcttctggtgtactatttaaaggaacatacattgatagggtcagcaaattcccaagatatccaactgtgcggcatgggaattcttcctgaacactgtattatagacatcacgtcagaaggccaggttatgctgactcctcagaagaacaccagaacatttgtaaatgggtcatctgtctccagtccaatacagctacaccatggggacaggatattatggggaaacaatcatttcttcagactcaatttgcctaaaaagaaaaagaaagcagaacgagaggatgaggaccaggatccctccatgaagaacgagaatagttctgagcagctggatgtagacggagactcctccagcgaggtgtccagtgaagttaactttaattacgaatacgcacagatggaggtcaccatgaaggccctgggcagcaatgatccgatgcagtccatattaaacagcctagaacaacagcatgaagaagaaaaacgatctgcactggagcgccagaggcttatgtatgagcacgaattggagcagctccggagaaggctgtctcctgagaagcagaactgccggagcatggacaggttttctttccactcgcccagcgctcagcaacgcttaagacagtgggctgaggagagagaagcaacgttgaataacagcctgatgaggctgagggaacaaattgttaaggccaatctattggtgagagaagctaattacattgctgaggagctggataaaagaacagaatacaaagttaccctacagattccagcctccagcctggatgccaacaggaagcgaggctctcttcttagtgagcctgcaatccaggtgagaagaaaaggaaaaggaaagcagatttggtctttggaaaaactggacaacaggctgttggatatgagagacctttatcaggagtggaaagagtgtgaagaagataacccagtaatacgatcatacttcaaacgtgctgatccattctatgatgagcaggaaaatctcagtctcattggggtggccaatgtcttcctcgagtcacttttctatgatgtgaagttacaatacgctgttcccatcatcaaccagaaaggagaggtggcaggtcggctgcacgtggaggtgatgcgactcagtggtgatgttggggagaggatcgcaggaggcgatgaggtggcagaggtcccctttgagaaggagacccaggagaacaaactggtgtgcatggttaaaatcctgcaagctactgggttgccacagcatctgtcccactttgtgttctgcaaatacagcttctgggatcaacaggagccggtgattgtcgctcctgaagtggacacctcctcctcttccgtcagcaaggagccgcactgcatggttgtctttgatcattgcaatgagttttctgttaacatcaccgaagactttatcgagcatctttccgaaggagcattggcaattgaagtatatggacataaaataaacgatccccggaaaaaccccgccctgtgggatttgggaatcatccaagcaaagacacgtagtcttcgggacagatggagtgaagtgaccaggaaattggaattctgggttcaaatcttggaacagaatgagaatggtgaatactgccctgtagaagtgatttctgcaaaggatgtcccaacaggaggaatcttccagctccggcaggggcagtcccggagagttcaagtcgaagtgaagtcagtgcaggaatctgggactttaccactgatggaagaatgtatactgtctgttggcattggatgtgtcaaagttagaccgctcagagcccccagaacacatgagaccttccatgaggaagaggaagacatggacagctaccaggatcgagatttagagagacttcgtagaaaatggctaaatgcattaacaaaacgtcaggagtacttggatcaacaattgcaaaagcttgtcagtaaacgtgataaaacagaggatgatgctgaccgtgaagcgcagcttctggagatgcggttgaccctaactgaggagaggaacgcggtgatggtcccctctgctggcagtggtattccaggggccccagcagaatggaccccagtacctgggatggagacacacattcctgttatattcctggacttaaatgctgatgatttcagctctcaggataatcttgatgacccagaagctggtggatgggatgcgaccttgactggggaagaagaagaggagttctttgaattgcagattgtgaagcagcatgatggggaggtgaaagcagaagcctcctgggactccgcggtgcatggctgccctcagctcagcaggggcacgcccgtggacgagcggttgttcctgatcgtgcgcgtgacggtccagctcagccaccctgctgacatgcaactggtgttacgcaagagaatctgtgtcaatgttcacggccgccagggttttgcacagagtctcctaaaaaagatgtctcatcgaagttctattcctggctgtggagtgacttttgaaattgtctccaatattccagaggatgcccagggagtggaagaacgggaagcattagcaagaatggcagccaatgttgaaaacccagcttctgctgactcggaggcttatattgaaaagtacctcaggagcgtgctggctgtagaaaacctcctgactttagatcgtctgcgccaggaagttgcagtgaaggaacagttaacaggaaaaggaaagttgagcaggaggagtatcagttctccaaatgtgaacagattgtctggaagccgacaagatctcattccatcatacagtctaggcagcaacaagggccggtgggaaagtcagcaggatgtatcccaaaccacagtttccagaggaatagctcctgcccccgccctctctgtttctccccaaaataaccattctccagatccaggactcagtaaccttgcagcatcctacttgaatcctgtcaaatccttcgtgccgcaaatgccaaagctcctcaagtctctctttcccgtccgcgatgagaagaggggcaagcggccgtctcccctcgcacaccagcccgtgccccgcatcatggtgcagtcagccagcccggacatcagggtgaccaggatggaggaggctcagccggagatgggccctgacgtgctggtgcagacgatgggggccccggccttgaagatctgcgacaaacctgccaaagtgccttccccaccgcctgtcatagctgtcacagcggtcaccccggctccggaggcacaggacgggccccccagccccctgagtgaagcctctagcgggtacttctcccacagcgtctccaccgcgaccctgtcggacgccctgggccccggcctggacgctgcggccccgccggggtccatgcccaccgcccctgaggccgagcccgaggcgcccatcagccaccccccaccgcccacggccgtccccgccgaggagccccctggcccccagcagctcgtgagccccggtcgggagcgccccgacctcgaggccccggcgcccggctccccgttccgcgtccggagggtgcgggcctcggagttgcgctccttctcgcgcatgctggctggggaccccggctgctccccgggggccgaggggaatgcgccggccccgggcgccgggggacaggccctggcctctgattccgaggaagctgacgaggtcccggagtggctccgagagggcgagttcgtcaccgtgggcgcccacaaaacgggcgtggtgagatacgtggggcctgccgacttccaagagggcacgtgggtcggcgtggagctcgacctgccctcaggtaagaatgacggttccatcggcgggaagcagtacttcaggtgtaaccctggctacgggctgctggtcaggcccagccgggtccgcagggccacgggccctgtgcggcggcgcagcacaggactccggctgggtgcccccgaggcccgccggagcgccaccctctcgggctccgccaccaacctggcctcgctgacagctgccctggccaaggccgacaggagccacaagaaccctgagaaccggaaatcctgggccagctgagccgctgccttagggcgaacttttctgggggtgcccggccccttttgagccctgccagtgacagccctgaggagccaggagcccggtggccccttccccaggggcagggcgatgaatgctttttgcacgacacagggctggtgacctccctgggcctctggaagctttgtttcttctgtacccgggtaaagtgggggcctcaactgtgcctcctccggtggatggaaggttctgggtgcccgcaggggctgggggatgctaggactgagaccctgggtggtgcagcgcctggtgatcttgctgtgtgcctgtgcctggggccttatgttgctctttctatcatttccattctggtggccccactaatgtcttaacctaaaccataattgtaaccagtgcctttcctccccactggagggcaagcccccccacccacccaggatgtcctggctcactccgcaagccccccagcctcccaccctggtcccagtttcccgcaaagtgcctctgggggaccccccagcctcccaccctggtcccaggttccacaagtgcctctggagggccctgggctctggcagatggtcctggtgccccagacgggggccgagggcctgagcccccccatccctcctctgccagggtttcttagcggtttctctgtggatgttttggcatctttagacacctggaaagtctcttatgtttgccgtttattcccttcacagaaggcttggaatgtatttatttatatttattttttcaaaatccgaaatcatttgcgagccgcaatcgtcgtctgcctgtgtgggggggcccagggcctgccttgcacgttgcagcctctctggccattgcagagctgctggcctcctgcccaggtggagggtcctggggacggcagaggataaagccccctcctcacatccctctattgcggatccacagtggccttactcttaacttggatgagagcaaaaacctgggagaatgatgtgcttctgtagtcggtgacaaaggaagaggcattgctactttatttggtgcacttttggtttctaggaaggtctacctgtaagatcctgtagagtca

SEQ ID NO: 283769 - DNA, 1406 bp, Homo sapiens
atagaggatccctctctttcagtcgctctgggaatggtggcggacgggcagcgtgggtgggacctggcacttcgtggtggctgagccatccacccagcagcggcctcctgtagcaccatcttgggaaagtcctgggggacgtgtgtgtcgtgctttttaccatcggtttgacttacagtggagtagaacgagccagagttcctgacttgagcaggtggatttgggcccaggccctgttcactcttgcttctcggtgcggactaatgtcagcttgtggctgggaaagagggatgtgcagtgacgtggtcaccaaggcagtgagccccgctgaccccgggccagcacttggcaggcaggaggtgcggtctccagagtggtgggccagggcgggctggcctccgtcttctatcttcttttcttgcctccctgaccagcagactcacctcccaagaacgcctgcccgcccacccgccttaggactcccgatgcgctcctggaaggccccaggagtggcaccttagtgtgggtcggcccgcagatggcacccaaggccgggaagggcagtaactgcacacgcggcgctgtcagagatgggggtgggggatgcttctgggggccctgcctccccattgtgtgcccagaacatccctggccccaccccgccacttccctcgggcccttatgaaggactgaggctccagggtgagaaggctcacttctgccccgggcactgcgtccagcagcagaggggacagggggcaggtgtgtgactgggttcctgggtacccaggcctgaccagagggagcgggagggcagaggtgaggagggggaagatgtttctgggcctaccaaggttcaacaagagaacggagctgggaatgtgactgctggagcctgagaggtggaggagttctgatcccccgttacttcctagcattttctcctcttgccttaaaagttccctgtatgtgaaacgggaagtcctgagagtgtgtgttggtggctgtgcgcacgcacacaagacgggagtcaccctgtgcttcctgcccaagatactgacccattgaacccccaaagcatctttctctccacaaagtccgtggtgccttcctggtgggctgcagacactaatggtgttggggggtcttggaacagcttctctatgtgtggattcgtgtaaatgcgaagagttcacatataaagaagtgactttgattctgtgattatattgatttggtacacagtaaatgggagtttaaaaaatccaaagactctaatgacttgtaaagactctaatgatttgtatcatgtaatgaactaaaccacctgtaattttgtaccgtatgtgtctttccatcaaatgaccaacagcttctcaataaaaccagaccatttctcacctgca

SEQ ID NO: 283770 - DNA, 1406 bp, Homo sapiens
cagacggaagccgaacgagttcctcggcggctgcaggatgggggactccaaagtgaaagtggcggtgcggatacgacccatgaaccggcgagagactgacttgcataccaaatgtgtggtggatgtggatgcaaacaaggttattcttaatcctgtaaatacgaatctttccaaaggagatgcccggggccagccgaaggtgtttgcttatgatcattgtttctggtctatggatgaatctgtcaaagaaaagtatgcaggtcaagatattgttttcaagtgccttggagagaatatcctgcagaatgcttttgatggctacaatgcatgtatctttgcctatggacagactggctctggaaaatcttataccatgatgggcacagctgaccaacctggattaatcccaagactttgcagtggactctttgaacgaactcagaaagaggaaaatgaagaacagagttttaaagtagaagtgtcctacatggaaatttataatgaaaaagttcgagaccttcttgatcccaaaggaagccgtcagacgttgaaagtcagagagcatagtgtgttgggaccttatgtcgacggactttctaaactggctgtcacaagctacaaggatattgagtcgttgatgtctgagggtaacaaatctcgcacagttgctgcaaccaacatgaacgaggagagtagccgatcccatgcagttttcaaaatcaccctcacacatactctctacgatgtgaagtctgggacatctggagagaaagtgggcaaactcagcctggtggatttagctggcagtgaacgagcaacgaagacaggcgctgcaggggacaggctgaaggaagggagcaacattaacaagtccctcacaaccctcggtctggttatctcagctcttgcagatcagagtgctggcaaaaacaagaataaatttgttccatatcgtgactcagttctcacttggctgctcaaagtaagtttgttttttttcccttcctggcatacttttggtggttggcaagaaggaagaaaaaagagtagactgttaatcccctttccaggtatcatttcctctatcggtgtgcaaatgtataattattaggctcttatggtaatgacatttttgatggaataaacataggttttttcctagcaattcacatcctagcttactagaacctggatgcagtggggttgctggacgcacacggaatcacacgattgcttctggagatttaggggagtagagaaagggcctcctgctaatctgaccactgtgtgagtcatggaggaggagcctctgctggcctcacactcagctggccaccctggccttccacagactccttttgttgggctaacattttggagcttgttttctgtttaactttgggaca

SEQ ID NO: 283771 - DNA, 8844 bp, Homo sapiens
cagacggaagccgaacgagttcctcggcggctgcaggatgggggactccaaagtgaaagtggcggtgcggatacgacccatgaaccggcgagatttgactgtaaggagccagctgatacaatatggtcagattccattaagcagtggttttaagaaactctcatggacctctgggcctgaggaagtgaagagagactgacttgcataccaaatgtgtggtggatgtggatgcaaacaaggttattcttaatcctgtaaatacgaatctttccaaaggagatgcccggggccagccgaaggtgtttgcttatgatcattgtttctggtctatggatgaatctgtcaaagaaaagtatgcaggtcaagatattgttttcaagtgccttggagagaatatcctgcagaatgcttttgatggctacaatgcatgtatctttgcctatggacagactggctctggaaaatcttataccatgatgggcacagctgaccaacctggattaatcccaagactttgcagtggactctttgaacgaactcagaaagaggaaaatgaagaacagagttttaaagtagaagtgtcctacatggaaatttataatgaaaaagttcgagaccttcttgatcccaaaggaagccgtcagacgttgaaagtcagagagcatagtgtgttgggaccttatgtcgacggactttctaaactggctgtcacaagctacaaggatattgagtcgttgatgtctgagggtaacaaatctcgcacagttgctgcaaccaacatgaacgaggagagtagccgatcccatgcagttttcaaaatcaccctcacacatactctctacgatgtgaagtctgggacatctggagagaaagtgggcaaactcagcctggtggatttagctggcagtgaacgagcaacgaagacaggcgctgcaggggacaggctgaaggaagggagcaacattaacaagtccctcacaaccctcggtctggttatctcagctcttgcagatcagagtgctggcaaaaacaagaataaatttgttccatatcgtgactcagttctcacttggctgctcaaagacagcctcgggggtaacagcaagaccgccatggtggctactgtgagtcctgcagctgataactatgatgaaaccctctcaactctgcggtatgcagatcgagccaagcacattgtaaaccacgctgtggtgaatgaggaccctaatgcccgaattatccgggatctccgggaagaagttgagaaactccgggagcagctgaccaaagcagaggcaatgaaatctccagagctaaaggaccggctggaagaatctgagaagctaatccaggaaatgactgtgacctgggaggagaaattaaggaaaacggaggagattgcacaggaacgacagaaacagcttgagagtcttggaatatctcttcagtcttcgggaatcaaagttggggatgataaatgcttccttgtgaatctgaatgctgacccagctctgaatgagcttctggtgtactatttaaaggaacatacattgatagggtcagcaaattcccaagatatccaactgtgcggcatgggaattcttcctgaacactgtattatagacatcacgtcagaaggccaggttatgctgactcctcagaagaacaccagaacatttgtaaatgggtcatctgtctccagtccaatacagctacaccatggggacaggatattatggggaaacaatcatttcttcagactcaatttgcctaaaaagaaaaagaaagcagaacgagaggatgaggaccaggatccctccatgaagaacgagaatagttctgagcagctggatgtagacggagactcctccagcgaggtgtccagtgaagttaactttaattacgaatacgcacagatggaggtcaccatgaaggccctgggcagcaatgatccgatgcagtccatattaaacagcctagaacaacagcatgaagaagaaaaacgatctgcactggagcgccagaggcttatgtatgagcacgaattggagcagctccggagaaggctgtctcctgagaagcagaactgccggagcatggacaggttttctttccactcgcccagcgctcagcaacgcttaagacagtgggctgaggagagagaagcaacgttgaataacagcctgatgaggctgagggaacaaattgttaaggccaatctattggtgagagaagctaattacattgctgaggagctggataaaagaacagaatacaaagttaccctacagattccagcctccagcctggatgccaacaggaagcgaggctctcttcttagtgagcctgcaatccaggtgagaagaaaaggaaaaggaaagcagatttggtctttggaaaaactggacaacaggctgttggatatgagagacctttatcaggagtggaaagagtgtgaagaagataacccagtaatacgatcatacttcaaacgtgctgatccattctatgatgagcaggaaaatctcagtctcattggggtggccaatgtcttcctcgagtcacttttctatgatgtgaagttacaatacgctgttcccatcatcaaccagaaaggagaggtggcaggtcggctgcacgtggaggtgatgcgactcagtggtgatgttggggagaggatcgcaggaggcgatgaggtggcagaggtcccctttgagaaggagacccaggagaacaaactggtgtgcatggttaaaatcctgcaagctactgggttgccacagcatctgtcccactttgtgttctgcaaatacagcttctgggatcaacaggagccggtgattgtcgctcctgaagtggacacctcctcctcttccgtcagcaaggagccgcactgcatggttgtctttgatcattgcaatgagttttctgttaacatcaccgaagactttatcgagcatctttccgaaggagcattggcaattgaagtatatggacataaaataaacgatccccggaaaaaccccgccctgtgggatttgggaatcatccaagcaaagacacgtagtcttcgggacagatggagtgaagtgaccaggaaattggaattctgggttcaaatcttggaacagaatgagaatggtgaatactgccctgtagaagtgatttctgcaaaggatgtcccaacaggaggaatcttccagctccggcaggggcagtcccggagagttcaagtcgaagtgaagtcagtgcaggaatctgggactttaccactgatggaagaatgtatactgtctgttggcattggatgtgtcaaagttagaccgctcagagcccccagaacacatgagaccttccatgaggaagaggaagacatggacagctaccaggatcgagatttagagagacttcgtagaaaatggctaaatgcattaacaaaacgtcaggagtacttggatcaacaattgcaaaagcttgtcagtaaacgtgataaaacagaggatgatgctgaccgtgaagcgcagcttctggagatgcggttgaccctaactgaggagaggaacgcggtgatggtcccctctgctggcagtggtattccaggggccccagcagaatggaccccagtacctgggatggagacacacattcctgttatattcctggacttaaatgctgatgatttcagctctcaggataatcttgatgacccagaagctggtggatgggatgcgaccttgactggggaagaagaagaggagttctttgaattgcagattgtgaagcagcatgatggggaggtgaaagcagaagcctcctgggactccgcggtgcatggctgccctcagctcagcaggggcacgcccgtggacgagcggttgttcctgatcgtgcgcgtgacggtccagctcagccaccctgctgacatgcaactggtgttacgcaagagaatctgtgtcaatgttcacggccgccagggttttgcacagagtctcctaaaaaagatgtctcatcgaagttctattcctggctgtggagtgacttttgaaattgtctccaatattccagaggatgcccagggagtggaagaacgggaagcattagcaagaatggcagccaatgttgaaaacccagcttctgctgactcggaggcttatattgaaaagtacctcaggagcgtgctggctgtagaaaacctcctgactttagatcgtctgcgccaggaagttgcagtgaaggaacagttaacaggaaaaggaaagttgagcaggaggagtatcagttctccaaatgtgaacagattgtctggaagccgacaagatctcattccatcatacagtctaggcagcaacaagggccggtgggaaagtcagcaggatgtatcccaaaccacagtttccagaggaatagctcctgcccccgccctctctgtttctccccaaaataaccattctccagatccaggactcagtaaccttgcagcatcctacttgaatcctgtcaaatccttcgtgccgcaaatgccaaagctcctcaagtctctctttcccgtccgcgatgagaagaggggcaagcggccgtctcccctcgcacaccagcccgtgccccgcatcatggtgcagtcagccagcccggacatcagggtgaccaggatggaggaggctcagccggagatgggccctgacgtgctggtgcagacgatgggggccccggccttgaagatctgcgacaaacctgccaaagtgccttccccaccgcctgtcatagctgtcacagcggtcaccccggctccggaggcacaggacgggccccccagccccctgagtgaagcctctagcgggtacttctcccacagcgtctccaccgcgaccctgtcggacgccctgggccccggcctggacgctgcggccccgccggggtccatgcccaccgcccctgaggccgagcccgaggcgcccatcagccaccccccaccgcccacggccgtccccgccgaggagccccctggcccccagcagctcgtgagccccggtcgggagcgccccgacctcgaggccccggcgcccggctccccgttccgcgtccggagggtgcgggcctcggagttgcgctccttctcgcgcatgctggctggggaccccggctgctccccgggggccgaggggaatgcgccggccccgggcgccgggggacaggccctggcctctgattccgaggaagctgacgaggtcccggagtggctccgagagggcgagttcgtcaccgtgggcgcccacaaaacgggcgtggtgagatacgtggggcctgccgacttccaagagggcacgtgggtcggcgtggagctcgacctgccctcaggtaagaatgacggttccatcggcgggaagcagtacttcaggtgtaaccctggctacgggctgctggtcaggcccagccgggtccgcagggccacgggccctgtgcggcggcgcagcacaggactccggctgggtgcccccgaggcccgccggagcgccaccctctcgggctccgccaccaacctggcctcgctgacagctgccctggccaaggccgacaggagccacaagaaccctgagaaccggaaatcctgggccagctgagccgctgccttagggcgaacttttctgggggtgcccggccccttttgagccctgccagtgacagccctgaggagccaggagcccggtggccccttccccaggggcagggcgatgaatgctttttgcacgacacagggctggtgacctccctgggcctctggaagctttgtttcttctgtacccgggtaaagtgggggcctcaactgtgcctcctccggtggatggaaggttctgggtgcccgcaggggctgggggatgctaggactgagaccctgggtggtgcagcgcctggtgatcttgctgtgtgcctgtgcctggggccttatgttgctctttctatcatttccattctggtggccccactaatgtcttaacctaaaccataattgtaaccagtgcctttcctccccactggagggcaagcccccccacccacccaggatgtcctggctcactccgcaagccccccagcctcccaccctggtcccagtttcccgcaaagtgcctctgggggaccccccagcctcccaccctggtcccaggttccacaagtgcctctggagggccctgggctctggcagatggtcctggtgccccagacgggggccgagggcctgagcccccccatccctcctctgccagggtttcttagcggtttctctgtggatgttttggcatctttagacacctggaaagtctcttatgtttgccgtttattcccttcacagaaggcttggaatgtatttatttatatttattttttcaaaatccgaaatcatttgcgagccgcaatcgtcgtctgcctgtgtgggggggcccagggcctgccttgcacgttgcagcctctctggccattgcagagctgctggcctcctgcccaggtggagggtcctggggacggcagaggataaagccccctcctcacatccctctattgcggatccacagtggccttactcttaacttggatgagagcaaaaacctgggagaatgatgtgcttctgtagtcggtgacaaaggaagaggcattgctactttatttggtgcacttttggtttctaggaaggtctttgggtcattttaacttctcggcaactcccagactctcagagtgtggggctggggcctggcggctgggctggtgcagggagtgtgctggttagtctccagaccctcacagcagccacgcccccaggcccaccgtgcatggtgtgggcgggacagccggaagcttccggggtggcctccacctcctggctggggcacttatgctcccagagcctttggtgccaggtttgtgggatgggggttagcgtctatgtgtggaaggccaccaatctagggacaggagtcctgggtcaagattcacacagccacccttggagctggtttctagttctcacatttagtcaacatctagaaagcgctgcggaaggctctggttctctagggacttgaaggcgccaacagagtagtctccatggtgggcctgtcccagccctggctgcgaggacaggttgtctttctctccccagttggcgagggacacgaaggctgcggccgggctggcagagggcccggcccctggggggaggcactcctccagggctctccctgtccttagccgattttgagggaaccctgtggcacctgtccctggatgaagagctgtcacctctgccttgccctttaactcaacccgcttcccagcacagcggctttctttttaaaacctgtttcactgagaagtttgtttttgggtccgctggtgtcactatggcctgggtgagaggccagcactgctgctgccctgaggggaaacgcctgggccgtgtagtggggacgctctgggaatggtggcggacgggcagcgtgggtgggacctggcacttcgtggtggctgagccatccacccagcagcggcctcctgtagcaccatcttgggaaagtcctgggggacgtgtgtgtcgtgctttttaccatcggtttgacttacagtggagtagaacgagccagagttcctgacttgagcaggtggatttgggcccaggccctgttcactcttgcttctcggtgcggactaatgtcagcttgtggctgggaaagagggatgtgcagtgacgtggtcaccaaggcagtgagccccgctgaccccgggccagcacttggcaggcaggaggtgcggtctccagagtggtgggccagggcgggctggcctccgtcttctatcttcttttcttgcctccctgaccagcagactcacctcccaagaacgcctgcccgcccacccgccttaggactcccgatgcgctcctggaaggccccaggagtggcaccttagtgtgggtcggcccgcagatggcacccaaggccgggaagggcagtaactgcacacgcggcgctgtcagagatgggggtgggggatgcttctgggggccctgcctccccattgtgtgcccagaacatccctggccccaccccgccacttccctcgggcccttatgaaggactgaggctccagggtgagaaggctcacttctgccccgggcactgcgtccagcagcagaggggacagggggcaggtgtgtgactgggttcctgggtacccaggcctgaccagagggagcgggagggcagaggtgaggagggggaagatgtttctgggcctaccaaggttcaacaagagaacggagctgggaatgtgactgctggagcctgagaggtggaggagttctgatcccccgttacttcctagcattttctcctcttgccttaaaagttccctgtatgtgaaacgggaagtcctgagagtgtgtgttggtggctgtgcgcacgcacacaagacgggagtcaccctgtgcttcctgcccaagatactgacccattgaacccccaaagcatctttctctccacaaagtccgtggtgccttcctggtgggctgcagacactaatggtgttggggggtcttggaacagcttctctatgtgtggattcgtgtaaatgcgaagagttcacatataaagaagtgactttgattctgtgattatattgatttggtacacagtaaatgggagtttaaaaaatccaaagactctaatgacttgtaaagactctaatgatttgtatcatgtaatgaactaaaccacctgtaattttgtaccgtatgtgtctttccatcaaatgaccaacagcttctcaataaaaccagaccatttctcacctgca

SEQ ID NO: 283772 - DNA, 5358 bp, Homo sapiens
gactctagagttatccacctgctggcccttacgcgcagcttctggagatgcgtttgaccctaactgaggagtgtaacgcggtgatggtcccctctgctggcagtgggattccagtggccccagcagaatgccccccagtacctgggatggagacacacattcctgttatattcctggacttaaatgctgatgatttcagctctcaggataatcttgatgacccagaagctggtggatgggatgcgaccttgactggggaagaagaagaggagttctttgaattgcagattgtgaagcagcatgatggggaggtgaaagcagaagcctcctgggactccgcggtgcatggctgccctcagctcagcaggggcacgcccgtggacgagcggttgttcctgatcgtgcgcgtgacggtccagctcagccaccctgctgacatgcaactggtgttacgcaagagaatctgtgtcaatgttcacggccgccagggttttgcacagagtctcctaaaaaagatgtctcatcgaagttctattcctggctgtggagtgacttttgaaattgtctccaatattccagaggatgcccagggagtggaagaacgggaagcattagcaagaatggcagccaatgttgaaaacccagcttctgctgactcggaggcttatattgaaaagtacctcaggagcgtgctggctgtagaaaacctcctgactttagatcgtctgcgccaggaagttgcagtgaaggaacagttaacaggaaaaggaaagttgagcaggaggagtatcagttctccaaatgtgaacagattgtctggaagccgacaagatctcattccatcatacagtctaggcagcaacaagggccggtgggaaagtcagcaggatgtatcccaaaccacagtttccagaggaatagctcctgcccccgccctctctgtttctccccaaaataaccattctccagatccaggactcagtaaccttgcagcatcctacttgaatcctgtcaaatccttcgtgccgcaaatgccaaagctcctcaagtctctctttcccgtccgcgatgagaagaggggcaagcggccgtctcccctcgcacaccagcccgtgccccgcatcatggtgcagtcagccagcccggacatcagggtgaccaggatggaggaggctcagccggagatgggccctgacgtgctggtgcagacgatgggggccccggccttgaagatctgcgacaaacctgccaaagtgccttccccaccgcctgtcatagctgtcacagcggtcaccccggctccggaggcacaggacgggccccccagccccctgagtgaagcctctagcgggtacttctcccacagcgtctccaccgcgaccctgtcggacgccctgggccccggcctggacgctgcggccccgccggggtccatgcccaccgcccctgaggccgagcccgaggcgcccatcagccaccccccaccgcccacggccgtccccgccgaggagccccctggcccccagcagctcgtgagccccggtcgggagcgccccgacctcgaggccccggcgcccggctccccgttccgcgtccggagggtgcgggcctcggagttgcgctccttctcgcgcatgctggctggggaccccggctgctccccgggggccgaggggaatgcgccggccccgggcgccgggggacaggccctggcctctgattccgaggaagctgacgaggtcccggagtggctccgagagggcgagttcgtcaccgtgggcgcccacaaaacgggcgtggtgagatacgtggggcctgccgacttccaagagggcacgtgggtcggcgtggagctcgacctgccctcaggtaagaatgacggttccatcggcgggaagcagtacttcaggtgtaaccctggctacgggctgctggtcaggcccagccgggtccgcagggccacgggccctgtgcggcggcgcagcacaggactccggctgggtgcccccgaggcccgccggagcgccaccctctcgggctccgccaccaacctggcctcgctgacagctgccctggccaaggccgacaggagccacaagaaccctgagaaccggaaatcctgggccagctgagccgctgccttagggcgaacttttctgggggtgcccggccccttttgagccctgccagtgacagccctgaggagccaggagcccggtggccccttccccaggggcagggcgatgaatgctttttgcacgacacagggctggtgacctccctgggcctctggaagctttgtttcttctgtacccgggtaaagtgggggcctcaactgtgcctcctccggtggatggaaggttctgggtgcccgcaggggctgggggatgctaggactgagaccctgggtggtgcagcgcctggtgatcttgctgtgtgcctgtgcctggggccttatgttgctctttctatcatttccattctggtggccccactaatgtcttaacctaaaccataattgtaaccagtgcctttcctccccactggagggcaagcccccccacccacccaggatgtcctggctcactccgcaagccccccagcctcccaccctggtcccagtttcccgcaaagtgcctctgggggaccccccagcctcccaccctggtcccaggttccacaagtgcctctggagggccctgggctctggcagatggtcctggtgccccagacgggggccgagggcctgagcccccccatccctcctctgccagggtttcttagcggtttctctgtggatgttttggcatctttagacacctggaaagtctcttatgtttgccgtttattcccttcacagaaggcttggaatgtatttatttatatttattttttcaaaatccgaaatcatttgcgagccgcaatcgtcgtctgcctgtgtgggggggcccagggcctgccttgcacgttgcagcctctctggccattgcagagctgctggcctcctgcccaggtggagggtcctggggacggcagaggataaagccccctcctcacatccctctattgcggatccacagtggccttactcttaacttggatgagagcaaaaacctgggagaatgatgtgcttctgtagtcggtgacaaaggaagaggcattgctactttatttggtgcacttttggtttctaggaaggtctttgggtcattttaacttctcggcaactcccagactctcagagtgtggggctggggcctggcggctgggctggtgcagggagtgtgctggttagtctccagaccctcacagcagccacgcccccaggcccaccgtgcatggtgtgggcgggacagccggaagcttccggggtggcctccacctcctggctggggcacttatgctcccagagcctttggtgccaggtttgtgggatgggggttagcgtctatgtgtggaaggccaccaatctagggacaggagtcctgggtcaagattcacacagccacccttggagctggtttctagttctcacatttagtcaacatctagaaagcgctgcggaaggctctggttctctagggacttgaaggcgccaacagagtagtctccatggtgggcctgtcccagccctggctgcgaggacaggttgtctttctctccccagttggcgagggacacgaaggctgcggccgggctggcagagggcccggcccctggggggaggcactcctccagggctctccctgtccttagccgattttgagggaaccctgtggcacctgtccctggatgaagagctgtcacctctgccttgccctttaactcaacccgcttcccagcacagcggctttctttttaaaacctgtttcactgagaagtttgtttttgggtccgctggtgtcactatggcctgggtgagaggccagcactgctgctgccctgaggggaaacgcctgggccgtgtagtggggacgctctgggaatggtggcggacgggcagcgtgggtgggacctggcacttcgtggtggctgagccatccacccagcagcggcctcctgtagcaccatcttgggaaagtcctgggggacgtgtgtgtcgtgctttttaccatcggtttgacttacagtggagtagaacgagccagagttcctgacttgagcaggtggatttgggcccaggccctgttcactcttgcttctcggtgcggactaatgtcagcttgtggctgggaaagagggatgtgcagtgacgtggtcaccaaggcagtgagccccgctgaccccgggccagcacttggcaggcaggaggtgcggtctccagagtggtgggccagggcgggctggcctccgtcttctatcttcttttcttgcctccctgaccagcagactcacctcccaagaacgcctgcccgcccacccgccttaggactcccgatgcgctcctggaaggccccaggagtggcaccttagtgtgggtcggcccgcagatggcacccaaggccgggaagggcagtaactgcacacgcggcgctgtcagagatgggggtgggggatgcttctgggggccctgcctccccattgtgtgcccagaacatccctggccccaccccgccacttccctcgggcccttatgaaggactgaggctccagggtgagaaggctcacttctgccccgggcactgcgtccagcagcagaggggacagggggcaggtgtgtgactgggttcctgggtacccaggcctgaccagagggagcgggagggcagaggtgaggagggggaagatgtttctgggcctaccaaggttcaacaagagaacggagctgggaatgtgactgctggagcctgagaggtggaggagttctgatcccccgttacttcctagcattttctcctcttgccttaaaagttccctgtatgtgaaacgggaagtcctgagagtgtgtgttggtggctgtgcgcacgcacacaagacgggagtcaccctgtgcttcctgcccaagatactgacccattgaacccccaaagcatctttctctccacaaagtccgtggtgccttcctggtgggctgcagacactaatggtgttggggggtcttggaacagcttctctatgtgtggattcgtgtaaatgcgaagagttcacatataaagaagtgactttgattctgtgattatattgatttggtacacagtaaatgggagtttaaaaaatccaaagactctaatgacttgtaaagactctaatgatttgtatcatgtaatgaactaaaccacctgtaattttgtaccgtatgtgtctttccatcaaatgaccaacagcttctcaataaaaccagaccatttctcacctgca

SEQ ID NO: 283773 - DNA, 8699 bp, Homo sapiens
cagacggaagccgaacgagttcctcggcggctgcaggatgggggactccaaagtgaaagtggcggtgcggatacgacccatgaaccggcgagagactgacttgcataccaaatgtgtggtggatgtggatgcaaacaaggttattcttaatcctgtaaatacgaatctttccaaaggagatgcccggggccagccgaaggtgtttgcttatgatcattgtttctggtctatggatgaatctgtcaaagaaaagtatgcaggtcaagatattgttttcaagtgccttggagagaatatcctgcagaatgcttttgatggctacaatgcatgtatctttgcctatggacagactggctctggaaaatcttataccatgatgggcacagctgaccaacctggattaatcccaagactttgcagtggactctttgaacgaactcagaaagaggaaaatgaagaacagagttttaaagtagaagtgtcctacatggaaatttataatgaaaaagttcgagaccttcttgatcccaaaggaagccgtcagacgttgaaagtcagagagcatagtgtgttgggaccttatgtcgacggactttctaaactggctgtcacaagctacaaggatattgagtcgttgatgtctgagggtaacaaatctcgcacagttgctgcaaccaacatgaacgaggagagtagccgatcccatgcagttttcaaaatcaccctcacacatactctctacgatgtgaagtctgggacatctggagagaaagtgggcaaactcagcctggtggatttagctggcagtgaacgagcaacgaagacaggcgctgcaggggacaggctgaaggaagggagcaacattaacaagtccctcacaaccctcggtctggttatctcagctcttgcagatcagagtgctggcaaaaacaagaataaatttgttccatatcgtgactcagttctcacttggctgctcaaagacagcctcgggggtaacagcaagaccgccatggtggctactgtgagtcctgcagctgataactatgatgaaaccctctcaactctgcggtatgcagatcgagccaagcacattgtaaaccacgctgtggtgaatgaggaccctaatgcccgaattatccgggatctccgggaagaagttgagaaactccgggagcagctgaccaaagcagaggcaatgaaatctccagagctaaaggaccggctggaagaatctgagaagctaatccaggaaatgactgtgacctgggaggagaaattaaggaaaacggaggagattgcacaggaacgacagaaacagcttgagagtcttggaatatctcttcagtcttcgggaatcaaagttggggatgataaatgcttccttgtgaatctgaatgctgacccagctctgaatgagcttctggtgtactatttaaaggaacatacattgatagggtcagcaaattcccaagatatccaactgtgcggcatgggaattcttcctgaacactgtattatagacatcacgtcagaaggccaggttatgctgactcctcagaagaacaccagaacatttgtaaatgggtcatctgtctccagtccaatacagctacaccatggggacaggatattatggggaaacaatcatttcttcagactcaatttgcctaaaaagaaaaagaaagcagaacgagaggatgaggaccaggatccctccatgaagaacgagaatagttctgagcagctggatgtagacggagactcctccagcgaggtgtccagtgaagttaactttaattacgaatacgcacagatggaggtcaccatgaaggccctgggcagcaatgatccgatgcagtccatattaaacagcctagaacaacagcatgaagaagaaaaacgatctgcactggagcgccagaggcttatgtatgagcacgaattggagcagctccggagaaggctgtctcctgagaagcagaactgccggagcatggacaggttttctttccactcgcccagcgctcagcaacgcttaagacagtgggctgaggagagagaagcaacgttgaataacagcctgatgaggctgagggaacaaattgttaaggccaatctattggtgagagaagctaattacattgctgaggagctggataaaagaacagaatacaaagttaccctacagattccagcctccagcctggatgccaacaggaagcgaggctctcttcttagtgagcctgcaatccaggtgagaagaaaaggaaaaggaaagcagatttggtctttggaaaaactggacaacaggctgttggatatgagagacctttatcaggagtggaaagagtgtgaagaagataacccagtaatacgatcatacttcaaacgtgctgatccattctatgatgagcaggaaaatctcagtctcattggggtggccaatgtcttcctcgagtcacttttctatgatgtgaagttacaatacgctgttcccatcatcaaccagaaaggagaggtggcaggtcggctgcacgtggaggtgatgcgactcagtggtgatgttggggagaggatcgcaggaggcgatgaggtggcagaggtcccctttgagaaggagacccaggagaacaaactggtgtgcatggttaaaatcctgcaagctactgggttgccacagcatctgtcccactttgtgttctgcaaatacagcttctgggatcaacaggagccggtgattgtcgctcctgaagtggacacctcctcctcttccgtcagcaaggagccgcactgcatggttgtctttgatcattgcaatgagttttctgttaacatcaccgaagactttatcgagcatctttccgaaggagcattggcaattgaagtatatggacataaaataaacgatccccggaaaaaccccgccctgtgggatttgggaatcatccaagcaaagacacgtagtcttcgggacagatggagtgaagtgaccaggaaattggaattctgggttcaaatcttggaacagaatgagaatggtgaatactgccctgtagaagtgatttctgcaaaggatgtcccaacaggaggaatcttccagctccggcaggggcagtcccggagagttcaagtcgaagtgaagtcagtgcaggaatctgggactttaccactgatggaagaatgtatactgtctgttggcattggatgtgtcaaagttagaccgctcagagcccccagaacacatgagaccttccatgaggaagaggaagacatggacagctaccaggatcgagatttagagagacttcgtagaaaatggctaaatgcattaacaaaacgtcaggagtacttggatcaacaattgcaaaagcttgtcagtaaacgtgataaaacagaggatgatgctgaccgtgaagcgcagcttctggagatgcggttgaccctaactgaggagaggaacgcggtgatggtcccctctgctggcagtggtattccaggggccccagcagaatggaccccagtacctgggatggagacacacattcctgttatattcctggacttaaatgctgatgatttcagctctcaggataatcttgatgacccagaagctggtggatgggatgcgaccttgactggggaagaagaagaggagttctttgaattgcagattgtgaagcagcatgatggggaggtgaaagcagaagcctcctgggactccgcggtgcatggctgccctcagctcagcaggggcacgcccgtggacgagcggttgttcctgatcgtgcgcgtgacggtccagctcagccaccctgctgacatgcaactggtgttacgcaagagaatctgtgtcaatgttcacggccgccagggttttgcacagagtctcctaaaaaagatgtctcatcgaagttctattcctggctgtggagtgacttttgaaattgtctccaatattccagaggatgcccagggagtggaagaacgggaagcattagcaagaatggcagccaatgttgaaaacccagcttctgctgactcggaggcttatattgaaaagtacctcaggagcgtgctggctgtagaaaacctcctgactttagatcgtctgcgccaggaagttgcagtgaaggaacagttaacaggaaaaggaaagttgagcaggaggagtatcagttctccaaatgtgaacagattgtctggaagccgacaagatctcattccatcatacagtctaggcagcaacaagggccggtgggaaagtcagcaggatgtatcccaaaccacagtttccagaggaatagctcctgcccccgccctctctgtttctccccaaaataaccattctccagatccaggactcagtaaccttgcagcatcctacttgaatcctgtcaaatccttcgtgccgcaaatgccaaagctcctcaagtctctctttcccgtccgcgatgagaagaggggcaagcggccgtctcccctcgcacaccagcccgtgccccgcatcatggtgcagtcagccagcccggacatcagggtgaccaggatggaggaggctcagccggagatgggccctgacgtgctggtgcagacgatgggggccccggccttgaagatctgcgacaaacctgccaaagtgccttccccaccgcctgtcatagctgtcacagcggtcaccccggctccggaggcacaggacgggccccccagccccctgagtgaagcctctagcgggtacttctcccacagcgtctccaccgcgaccctgtcggacgccctgggccccggcctggacgctgcggccccgccggggtccatgcccaccgcccctgaggccgagcccgaggcgcccatcagccaccccccaccgcccacggccgtccccgccgaggagccccctggcccccagcagctcgtgagccccggtcgggagcgccccgacctcgaggccccggcgcccggctccccgttccgcgtccggagggtgcgggcctcggagttgcgctccttctcgcgcatgctggctggggaccccggctgctccccgggggccgaggggaatgcgccggccccgggcgccgggggacaggccctggcctctgattccgaggaagctgacgaggtcccggagtggctccgagagggcgagttcgtcaccgtgggcgcccacaaaacgggcgtggtgagatacgtggggcctgccgacttccaagagggcacgtgggtcggcgtggagctcgacctgccctcaggtaagaatgacggttccatcggcgggaagcagtacttcaggtgtaaccctggctacgggctgctggtcaggcccagccgggtccgcagggccacgggccctgtgcggcggcgcagcacaggactccggctgggtgcccccgaggcccgccggagcgccaccctctcgggctccgccaccaacctggcctcgctgacagctgccctggccaaggccgacaggagccacaagaaccctgagaaccggaaatcctgggccagctgagccgctgccttagggcgaacttttctgggggtgcccggccccttttgagccctgccagtgacagccctgaggagccaggagcccggtggccccttccccaggggcagggcgatgaatgctttttgcacgacacagggctggtgacctccctgggcctctggaagctttgtttcttctgtacccgggtaaagtgggggcctcaactgtgcctcctccggtggatggaaggttctgggtgcccgcaggggctgggggatgctaggactgagaccctgggtggtgcagcgcctggtgatcttgctgtgtgcctgtgcctggggccttatgttgctctttctatcatttccattctggtggccccactaatgtcttaacctaaaccataattgtaaccagtgcctttcctccccactggagggcaagcccccccacccacccaggatgtcctggctcactccgcaagccccccagcctcccaccctggtcccagtttcccgcaaagtgcctctgggggaccccccagcctcccaccctggtcccaggttccacaagtgcctctggagggccctgggctctggcagatggtcctggtgccccagacgggggccgagggcctgagcccccccatccctcctctgccagggtttcttagcggtttctctgtggatgttttggcatctttagacacctggaaagtctcttatgtttgccgtttattcccttcacagaaggcttggaatgtatttatttatatttattttttcaaaatccgaaatcatttgcgagccgcaatcgtcgtctgcctgtgtgggggggcccagggcctgccttgcacgttgcagcctctctggccattgcagagctgctggcctcctgcccaggtggagggtcctggggacggcagaggataaagccccctcctcacatccctctattgcggatccacagtggccttactcttaacttggatgagagcaaaaacctgggagaatgatgtgcttctgtagtcggtgacaaaggaagaggcattgctactttatttggtgcacttttggtttctaggaaggtctttgggtcattttaacttctcggcaactcccagactctcagagtgtggggctggggcctggcggctgggctggtgcagggagtgtgctggttagtctccagaccctcacagcagccacgcccccaggcccaccgtgcatggtgtgggcgggacagccggaagcttccggggtggcctccacctcctggctggggcacttatgctcccagagcctttggtgccaggtttgtgggatgggggttagcgtctatgtgtggaaggccaccaatctagggacaggagtcctgggtcaagattcacacagccacccttggagctggtttctagttctcacatttagtcaacatctagaaagcgctgcggaaggctctggttctctagggacttgaaggcgccaacagagtagtctccatggtgggcctgtcccagccctggctgcgaggacaggttgtctttctctccccagttggcgagggacacgaaggctgcggccgggctggcagagggcccggcccctggggggaggcactcctccagggctctccctgtccttagccgattttgagggaaccctgtggcacctgtccctggatgaagagctgtcacctctgccttgccctttaactcaacccgcttcccagcacagcggctttctttttaaaacctgtttcactgagaagtttgtttttgggtccgctggtgtcactatggcctgggtgagaggccagcactgctgctgccctgaggggaaacgcctgggccgtgtagtggggacgctctgggaatggtggcggacgggcagcgtgggtgggacctggcacttcgtggtggctgagccatccacccagcagcggcctcctgtagcaccatcttgggaaagtcctgggggacgtgtgtgtcgtgctttttaccatcggtttgacttacagtggagtagaacgagccagagttcctgacttgagcaggtggatttgggcccaggccctgttcactcttgcttctcggtgcggactaatgtcagcttgtggctgggaaagagggatgtgcagtgacgtggtcaccaaggcagtgagccccgctgaccccgggccagcacttggcaggcaggaggtgcggtctccagagtggtgggccagggcgggctggcctccgtcttctatcttcttttcttgcctccctgaccagcagactcacctcccaagaacgcctgcccgcccacccgccttaggactcccgatgcgctcctggaaggccccaggagtggcaccttagtgtgggtcggcccgcagatggcacccaaggccgggaagggcagtaactgcacacgcggcgctgtcagagatgggggtgggggatgcttctgggggccctgcctccccattgtgtgcccagaacatccctggccccaccccgccacttccctcgggcccttatgaaggactgaggctccagggtgagaaggctcacttctgccccgggcactgcgtccagcagcagaggggacagggggcaggtgtgtgactgggttcctgggtacccaggcctgaccagagggagcgggagggcagaggtgaggagggggaagatgtttctgggcctaccaaggttcaacaagagaacggagctgggaatgtgactgctggagcctgagaggtggaggagttctgatcccccgttacttcctagcattttctcctcttgccttaaaagttccctgtatgtgaaacgggaagtcctgagagtgtgtgttggtggctgtgcgcacgcacacaagacgggagtcaccctgtgcttcctgcccaagatactgacccattgaacccccaaagcatctttctctccacaaagtccgtggtgccttcctggtgggctgcagacactaatggtgttggggggtcttggaacagcttctctatgtgtggattcgtgtaaatgcgaagagttcacatataaagaagtgactttgattctgtgattatattgatttggtacacagtaaatgggagtttaaaaaatccaaagactctaatgacttgtaaagactctaatgatttgtatcatgtaatgaactaaaccacctctttatttttgccccggtttgttgtcttttca

SEQ ID NO: 283774 - DNA, 8153 bp, Homo sapiens
cagacggaagccgaacgagttcctcggcggctgcaggatgggggactccaaagtgaaagtggcggtgcggatacgacccatgaaccggcgagagactgacttgcataccaaatgtgtggtggatgtggatgcaaacaaggttattcttaatcctgtaaatacgaatctttccaaaggagatgcccggggccagccgaaggtgtttgcttatgatcattgtttctggtctatggatgaatctgtcaaagaaaagtatgcaggtcaagatattgttttcaagtgccttggagagaatatcctgcagaatgcttttgatggctacaatgcatgtatctttgcctatggacagactggctctggaaaatcttataccatgatgggcacagctgaccaacctggattaatcccaagactttgcagtggactctttgaacgaactcagaaagaggaaaatgaagaacagagttttaaagtagaagtgtcctacatggaaatttataatgaaaaagttcgagaccttcttgatcccaaaggaagccgtcagacgttgaaagtcagagagcatagtgtgttgggaccttatgtcgacggactttctaaactggctgtcacaagctacaaggatattgagtcgttgatgtctgagggtaacaaatctcgcacagttgctgcaaccaacatgaacgaggagagtagccgatcccatgcagttttcaaaatcaccctcacacatactctctacgatgtgaagtctgggacatctggagagaaagtgggcaaactcagcctggtggatttagctggcagtgaacgagcaacgaagacaggcgctgcaggggacaggctgaaggaagggagcaacattaacaagtccctcacaaccctcggtctggttatctcagctcttgcagatcagagtgctggcaaaaacaagaataaatttgttccatatcgtgactcagttctcacttggctgctcaaagacagcctcgggggtaacagcaagaccgccatggtggctactgtgagtcctgcagctgataactatgatgaaaccctctcaactctgcggtatgcagatcgagccaagcacattgtaaaccacgctgtggtgaatgaggaccctaatgcccgaattatccgggatctccgggaagaagttgagaaactccgggagcagctgaccaaagcagaggcaatgaaatctccagagctaaaggaccggctggaagaatctgagaagctaatccaggaaatgactgtgacctgggaggagaaattaaggaaaacggaggagattgcacaggaacgacagaaacagcttgagagtcttggaatatctcttcagtcttcgggaatcaaagttggggatgataaatgcttccttgtgaatctgaatgctgacccagctctgaatgagcttctggtgtactatttaaaggaacatacattgatagggtcagcaaattcccaagatatccaactgtgcggcatgggaattcttcctgaacactgtattatagacatcacgtcagaaggccaggttatgctgactcctcagaagaacaccagaacatttgtaaatgggtcatctgtctccagtccaatacagctacaccatggggacaggatattatggggaaacaatcatttcttcagactcaatttgcctaaaaagaaaaagaaagcagaacgagaggatgaggaccaggatccctccatgaagaacgagaatagttctgagcagctggatgtagacggagactcctccagcgaggtgtccagtgaagttaactttaattacgaatacgcacagatggaggtcaccatgaaggccctgggcagcaatgatccgatgcagtccatattaaacagcctagaacaacagcatgaagaagaaaaacgatctgcactggagcgccagaggcttatgtatgagcacgaattggagcagctccggagaaggctgtctcctgagaagcagaactgccggagcatggacaggttttctttccactcgcccagcgctcagcaacgcttaagacagtgggctgaggagagagaagcaacgttgaataacagcctgatgaggctgagggaacaaattgttaaggccaatctattggtgagagaagctaattacattgctgaggagctggataaaagaacagaatacaaagttaccctacagattccagcctccagcctggatgccaacaggaagcgaggctctcttcttagtgagcctgcaatccaggtgagaagaaaaggaaaaggaaagcagatttggtctttggaaaaactggacaacaggctgttggatatgagagacctttatcaggagtggaaagagtgtgaagaagataacccagtaatacgatcatacttcaaacgtgctgatccattctatgatgagcaggaaaatctcagtctcattggggtggccaatgtcttcctcgagtcacttttctatgatgtgaagttacaatacgctgttcccatcatcaaccagaaaggagaggtggcaggtcggctgcacgtggaggtgatgcgactcagtggtgatgttggggagaggatcgcaggaggcgatgaggtggcagaggtcccctttgagaaggagacccaggagaacaaactggtgtgcatggttaaaatcctgcaagctactgggttgccacagcatctgtcccactttgtgttctgcaaatacagcttctgggatcaacaggagccggtgattgtcgctcctgaagtggacacctcctcctcttccgtcagcaaggagccgcactgcatggttgtctttgatcattgcaatgagttttctgttaacatcaccgaagactttatcgagcatctttccgaaggagcattggcaattgaagtatatggacataaaataaacgatccccggaaaaaccccgccctgtgggatttgggaatcatccaagcaaagacacgtagtcttcgggacagatggagtgaagtgaccaggaaattggaattctgggttcaaatcttggaacagaatgagaatggtgaatactgccctgtagaagtgatttctgcaaaggatgtcccaacaggaggaatcttccagctccggcaggggcagtcccggagagttcaagtcgaagtgaagtcagtgcaggaatctgggactttaccactgatggaagaatgtatactgtctgttggcattggatgtgtcaaagttagaccgctcagagcccccagaacacatgagaccttccatgaggaagaggaagacatggacagctaccaggatcgagatttagagagacttcgtagaaaatggctaaatgcattaacaaaacgtcaggagtacttggatcaacaattgcaaaagcttgtcagtaaacgtgataaaacagaggatgatgctgaccgtgaagcgcagcttctggagatgcggttgaccctaactgaggagaggaacgcggtgatggtcccctctgctggcagtggtattccaggggccccagcagaatggaccccagtacctgggatggagacacacattcctgttatattcctggacttaaatgctgatgatttcagctctcaggataatcttgatgacccagaagctggtggatgggatgcgaccttgactggggaagaagaagaggagttctttgaattgcagattgtgaagcagcatgatggggaggtgaaagcagaagcctcctgggactccgcggtgcatggctgccctcagctcagcaggggcacgcccgtggacgagcggttgttcctgatcgtgcgcgtgacggtccagctcagccaccctgctgacatgcaactggtgttacgcaagagaatctgtgtcaatgttcacggccgccagggttttgcacagagtctcctaaaaaagatgtctcatcgaagttctattcctggctgtggagtgacttttgaaattgtctccaatattccagaggatgcccagggagtggaagaacgggaagcattagcaagaatggcagccaatgttgaaaacccagcttctgctgactcggaggcttatattgaaaagtacctcaggagcgtgctggctgtagaaaacctcctgactttagatcgtctgcgccaggaagttgcagtgaaggaacagttaacaggaaaaggaaagttgagcaggaggagtatcagttctccaaatgtgaacagattgtctggaagccgacaagatctcattccatcatacagtctaggcagcaacaagggccggtgggaaagtcagcaggatgtatcccaaaccacagtttccagaggaatagctcctgcccccgccctctctgtttctccccaaaataaccattctccagatccaggactcagtaaccttgcagcatcctacttgaatcctgtcaaatccttcgtgccgcaaatgccaaagctcctcaagtctctctttcccgtccgcgatgagaagaggggcaagcggccgtctcccctcgcacaccagcccgtgccccgcatcatggtgcagtcagccagcccggacatcagggtgaccaggatggaggaggctcagccggagatgggccctgacgtgctggtgcagacgatgggggccccggccttgaagatctgcgacaaacctgccaaagtgccttccccaccgcctgtcatagctgtcacagcggtcaccccggctccggaggcacaggacgggccccccagccccctgagtgaagcctctagcgggtacttctcccacagcgtctccaccgcgaccctgtcggacgccctgggccccggcctggacgctgcggccccgccggggtccatgcccaccgcccctgaggccgagcccgaggcgcccatcagccaccccccaccgcccacggccgtccccgccgaggagccccctggcccccagcagctcgtgagccccggtcgggagcgccccgacctcgaggccccggcgcccggctccccgttccgcgtccggagggtgcgggcctcggagttgcgctccttctcgcgcatgctggctggggaccccggctgctccccgggggccgaggggaatgcgccggccccgggcgccgggggacaggccctggcctctgattccgaggaagctgacgaggtcccggagtggctccgagagggcgagttcgtcaccgtgggcgcccacaaaacgggcgtggtgagatacgtggggcctgccgacttccaagagggcacgtgggtcggcgtggagctcgacctgccctcaggtaagaatgacggttccatcggcgggaagcagtacttcaggtgtaaccctggctacgggctgctggtcaggcccagccgggtccgcagggccacgggccctgtgcggcggcgcagcacaggactccggctgggtgcccccgaggcccgccggagcgccaccctctcgggctccgccaccaacctggcctcgctgacagctgccctggccaaggccgacaggagccacaagaaccctgagaaccggaaatcctgggccagctgagccgctgccttagggcgaacttttctgggggtgcccggccccttttgagccctgccagtgacagccctgaggagccaggagcccggtggccccttccccaggggcagggcgatgaatgctttttgcacgacacagggctggtgacctccctgggcctctggaagctttgtttcttctgtacccgggtaaagtgggggcctcaactgtgcctcctccggtggatggaaggttctgggtgcccgcaggggctgggggatgctaggactgagaccctgggtggtgcagcgcctggtgatcttgctgtgtgcctgtgcctggggccttatgttgctctttctatcatttccattctggtggccccactaatgtcttaacctaaaccataattgtaaccagtgcctttcctccccactggagggcaagcccccccacccacccaggatgtcctggctcactccgcaagccccccagcctcccaccctggtcccagtttcccgcaaagtgcctctgggggaccccccagcctcccaccctggtcccaggttccacaagtgcctctggagggccctgggctctggcagatggtcctggtgccccagacgggggccgagggcctgagcccccccatccctcctctgccagggtttcttagcggtttctctgtggatgttttggcatctttagacacctggaaagtctcttatgtttgccgtttattcccttcacagaaggcttggaatgtatttatttatatttattttttcaaaatccgaaatcatttgcgagccgcaatcgtcgtctgcctgtgtgggggggcccagggcctgccttgcacgttgcagcctctctggccattgcagagctgctggcctcctgcccaggtggagggtcctggggacggcagaggataaagccccctcctcacatccctctattgcggatccacagtggccttactcttaacttggatgagagcaaaaacctgggagaatgatgtgcttctgtagtcggtgacaaaggaagaggcattgctactttatttggtgcacttttggtttctaggaaggtctttgggtcattttaacttctcggcaactcccagactctcagagtgtggggctggggcctggcggctgggctggtgcagggagtgtgctggttagtctccagaccctcacagcagccacgcccccaggcccaccgtgcatggtgtgggcgggacagccggaagcttccggggtggcctccacctcctggctggggcacttatgctcccagagcctttggtgccaggtttgtgggatgggggttagcgtctatgtgtggaaggccaccaatctagggacaggagtcctgggtcaagattcacacagccacccttggagctggtttctagttctcacatttagtcaacatctagaaagcgctgcggaaggctctggttctctagggacttgaaggcgccaacagagtagtctccatggtgggcctgtcccagccctggctgcgaggacaggttgtctttctctccccagttggcgagggacacgaaggctgcggccgggctggcagagggcccggcccctggggggaggcactcctccagggctctccctgtccttagccgattttgagggaaccctgtggcacctgtccctggatgaagagctgtcacctctgccttgccctttaactcaacccgcttcccagcacagcggctttctttttaaaacctgtttcactgagaagtttgtttttgggtccgctggtgtcactatggcctgggtgagaggccagcactgctgctgccctgaggggaaacgcctgggccgtgtagtggggacgctctgggaatggtggcggacgggcagcgtgggtgggacctggcacttcgtggtggctgagccatccacccagcagcggcctcctgtagcaccatcttgggaaagtcctgggggacgtgtgtgtcgtgctttttaccatcggtttgacttacagtggagtagaacgagccagagttcctgacttgagcaggtggatttgggcccaggccctgttcactcttgcttctcggtgcggactaatgtcagcttgtggctgggaaagagggatgtgcagtgacgtggtcaccaaggcagtgagccccgctgaccccgggccagcacttggcaggcaggaggtgcggtctccagagtggtgggccagggcgggctggcctccgtcttctatcttcttttcttgcctccctgaccagcagactcacctcccaagaacgcctgcccgcccacccgccttaggactcccgatgcgctcctggaaggccccaggagtggcaccttcctggtgggctgcagacactaatggtgttggggggtcttggaacagcttctctatgtgtggattcgtgtaaatgcgaagagttcacatataaagaagtgactttgattctgtgattatattgatttggtacacagtaaatgggagtttaaaaaatccaaagactctaatgacttgtaaagactctaatgatttgtatcatgtaatgaactaaaccacctgtaattttgtaccgtatgtgtctttccatcaaatgaccaacagcttctcaataaaaccagaccatttctcacctgca

SEQ ID NO: 283775 - DNA, 1385 bp, Homo sapiens
cagacggaagccgaacgagttcctcggcggctgcaggatgggggactccaaagtgaaagtggcggtgcggatacgacccatgaaccggcgagagactgacttgcataccaaatgtgtggtggatgtggatgcaaacaaggttattcttaatcctgtaaatacgaatctttccaaaggagatgcccggggccagccgaaggtgtttgcttatgatcattgtttctggtctatggatgaatctgtcaaagaaaagtatgcaggtcaagatattgttttcaagtgccttggagagaatatcctgcagaatgcttttgatggctacaatgcatgtatctttgcctatggacagactggctctggaaaatcttataccatgatgggcacagctgaccaacctggattaatcccaagactttgcagtggactctttgaacgaactcagaaagaggaaaatgaagaacagagttttaaagtagaagtgtcctacatggaaatttataatgaaaaagttcgagaccttcttgatcccaaaggaagccgtcagacgttgaaagtcagagagcatagtgtgttgggaccttatgtcgacggactttctaaactggctgtcacaagctacaaggatattgagtcgttgatgtctgagggtaacaaatctcgcacagttgctgcaaccaacatgaacgaggagagtagccgatcccatgcagttttcaaaatcaccctcacacatactctctacgatgtgaagtctgggacatctggagagaaagtgggcaaactcagcctggtggatttagctggcagtgaacgagcaacgaagacaggcgctgcaggggacaggctgaaggaagggagcaacattaacaagtccctcacaaccctcggtctggttatctcagctcttgcagatcagagtgctggcaaaaacaagaataaatttgttccatatcgtgactcagttctcacttggctgctcaaagacagcctcgggggtaacagcaagaccgccatggtggctactgtgagtcctgcagctgataactatgatgaaaccctctcaactctgcggtatgcagatcgagccaagcacattgtaaaccacgctgtggtgaatgaggaccctaatgcccgaattatccgggatctccgggaagaagttgagaaactccgggagcagctgaccaaagcagaggcaatgaaatctccagagctaaaggaccggctggaagaatctgagaagctaatccaggaaatgactgtgacctgggaggagaaattaaggaaaacggaggagattgcacaggacgaccagaacagctcgagagtcttggaatatctcttcagtcttcggtcgtttgacgatcctccagagtaccttacac

SEQ ID NO: 283776 - DNA, 267 bp, Homo sapiens
ttcaacctgtgagccaaacatttgaccttggacgacagcaaagtttagccacagattatccttgtagagctgcaagacctcaagaaagccgggctagtcaagtgaagcagtgggagtggaaaaggagcaaagaaatctgtaactggttgtgattccatgaactttttgaaatccccttgtattggcttccttccctcttctgtcttacttctctactccctacaagtgttttctgggatcacctccaaataaactacttgcaatcta

SEQ ID NO: 283777 - DNA, 399 bp, Homo sapiens
ggcgcaggcagggaccacgcggccggcgtgggggcggcgccacccgcagcagaaagccccggcgtggaccgcgtggcgtaggaaagcgctcccctcgcccccagccgcagagggcttgggcagcatcgggcgcggccccgggagagtgcgtccgcggcgccagcggctgcagggtgacctgtttcgggcggggacactcaccagaagaacacgcgtgagcagaggctagtcaagtgaagcagtgggagtggaaaaggagcaaagaaatctgtaactggttgtgattccatgaactttttgaaatccccttgtattggcttccttccctcttctgtcttacttctctactccctacaagtgttttctgggatcacctccaaataaactacttgcaatcta

SEQ ID NO: 283778 - DNA, 963 bp, Homo sapiens
  misc_feature (32)..(32): n is a, c, g, or t
acgagggggctacttggtacaaaagtccaagnagcactagatgctaggagctgggttagagggataagtgaaatgaatatgactatttgaattaccactatcagttttagtatcttgaggcttcaagaactgctctacctagcaccaccaccttccctaaggacataagtacgtactctagactgaaaggttctactatacaccatctaatctgatcattccccggttcctcattacttacgagagaaaaatccaaatttcttattttagcattcaaggcactttacatgcagggctctacttccaagctggggcatgtggttccagagaaagagaggatacctcaggacagtatgatacatcttacctaatgtagaagaagagcaacaggccatgtgtgatggtaaatggcagctgacacttgcgacagtatcaagaaggcactaaggaatggtgagaaggatgacttgccctttctaaagtggcatctcagcttgagtctgcagaatgccttgcaaatccagctcagtactgctagataatccatattgacaagagaagctaaagattcagattttctatgtgaagtttcctggttttaaaatgttagcaacaaattccaaatttttacagaacactgtacaggccagaaagaacaatctgtgtgctaccagtttacaattagctatgcttcttcctcctcagacctggcatgccctttccacccccttgcctttgctcttagtaccccgtgtacactccaacctcttccacctacaaatttctaaatgcacagttcaaatgttagttcttcagattcctgtctctgtaataacacttgcccctttgtataacagttctcatgtatatcttcctattagaccatgagctcctgtggtagaaattgtgtattcattactgtatccctagtgtgcagtaaaggatcacagtagatatctgctg

SEQ ID NO: 283779 - DNA, 1771 bp, Homo sapiens
ctcccttttttttttaaacagcagaaacagtttattaaaatagaaatcttatgtagaacctttatgcataaaaaagattcaagctgcttcacttgaaaacaggaagcagcaccaaatccccccatactcaactccaacccttgcttgtctcaaggcacctacatagaaacccagagtgtctcagaagaacagctggagcgctacagcctgctctcttctgctgtccccactgcccccggctaggatcacctcctacaagattcctgcacagcctactgacttttctccctgctcaccctcttccatccctctaacccagctcctagcatctagtgcttcttggacttttgtaccaagtaggccccaacagtaaggagagaggtctggggataagtgaaatgaatatgactatttgaattaccactatcagttttagtatcttgaggcttcaagaactgctctacctagcaccaccaccttccctaaggacataagtacgtactctagactgaaaggttctactatacaccatctaatctgatcattccccggttcctcattacttacgagagaaaaatccaaatttcttattttagcattcaaggcactttacatgcagggctctacttccaagctggggcatgtggttccagagaaagagaggatacctcaggacagtatgatacatcttacctaatggtaagtaatttaaaatattaaatttatattaaataggtaatatggtgttaaaatgcaacacctacgtgaatttgtaaggcaaaacagtacttcaaagaaatgtatatgcagtgagacatttctagctttatttccagatccctttcaacccaggtaccatttaatctctgtaattaggtgtactctggtggaacactcaccattttttagatgaggaaacagggtcagaaaggtcaagtgacctatccaaggtcacacaactagcaagcagttaagctagacttttactgtaggcagtctgcctccagtcccgctcctaaccactgtactgtattatctcctcaaatgcattagaatcttcacttccataaagaaatatgctctttgtttttttcttttggaacacaaggtttagtccatcactcactcacttttccacttttgataagatgtaaatattgagaactatttctcttctccagtagaagaagagcaacaggccatgtgtgatggtaaatggcagctgacacttgcgacagtatcaagaaggcactaaggaatggtgagaaggatgacttgccctttctaaagtggcatctcagcttgagtctgcagaatgccttgcaaatccagctcagtactgctagataatccatattgacaagagaagctaaagattcagattttctatgtgaagtttcctggttttaaaatgttagcaacaaattccaaatttttacagaacactgtacaggccagaaagaacaatctgtgtgctaccagtttacaattagctatgcttcttcctcctcagacctggcatgccctttccacccccttgcctttgctcttagtaccccgtgtacactccaacctcttccacctacaaatttctaaatgcacagttcaaatgttagttcttcagattcctgtctctgtaataacacttgcccctttgtataacagttctcatgtatatcttcctattagaccatgagctcctgtggtagaaattgtgtattcattactgtatccctagtgtgcagtaaaggatcacagtagatatctgctg

SEQ ID NO: 283780 - DNA, 1289 bp, Homo sapiens
ctcccttttttttttaaacagcagaaacagtttattaaaatagaaatcttatgtagaacctttatgcataaaaaagattcaagctgcttcacttgaaaacaggaagcagcaccaaatccccccatactcaactccaacccttgcttgtctcaaggcacctacatagaaacccagagtgtctcagaagaacagctggagcgctacagcctgctctcttctgctgtccccactgcccccggctaggatcacctcctacaagattcctgcacagcctactgacttttctccctgctcaccctcttccatccctctaacccagctcctagcatctagtgcttcttggacttttgtaccaagtaggccccaacagtaaggagagaggtctggggataagtgaaatgaatatgactatttgaattaccactatcagttttagtatcttgaggcttcaagaactgctctacctagcaccaccaccttccctaaggacataagtacgtactctagactgaaaggttctactatacaccatctaatctgatcattccccggttcctcattacttacgagagaaaaatccaaatttcttattttagcattcaaggcactttacatgcagggctctacttccaagctggggcatgtggttccagagaaagagaggatacctcaggacagtatgatacatcttacctaatgtagaagaagagcaacaggccatgtgtgatggtaaatggcagctgacacttgcgacagtatcaagaaggcactaaggaatggtgagaaggatgacttgccctttctaaagtggcatctcagcttgagtctgcagaatgccttgcaaatccagctcagtactgctagataatccatattgacaagagaagctaaagattcagattttctatgtgaagtttcctggttttaaaatgttagcaacaaattccaaatttttacagaacactgtacaggccagaaagaacaatctgtgtgctaccagtttacaattagctatgcttcttcctcctcagacctggcatgccctttccacccccttgcctttgctcttagtaccccgtgtacactccaacctcttccacctacaaatttctaaatgcacagttcaaatgttagttcttcagattcctgtctctgtaataacacttgcccctttgtataacagttctcatgtatatcttcctattagaccatgagctcctgtggtagaaattgtgtattcattactgtatccctagtgtgcagtaaaggatcacagtagatatctgctg

SEQ ID NO: 283781 - DNA, 1040 bp, Homo sapiens
gtaaactgaaaagcgctttgcagtctaagatagtccattagagtaaatgaagccatgaagtccagcggacaccgggagtggggagtggggaagcccggcactccgggagaccgggccagggaaggagggtctggaccggacccagcccctgcccggggagcgagctccggagctgccctacgaggtcaaaacgtagcagtggcggagacccgcaggggcgcccgaacgccaccctcggcccctccccgctccagaggccccgccccgtcacgtgcccgcggttcgcgtcacacccggaagcaggggcccgagcggagccggccgcgatgagcggggagccggggcagacgtccgtagcgccccctcccgaggaggtcgagccgggcagtggggtccgcatcgtggtggagtactgtgaaccctgcggcttcgaggcgacctacctggagctggccagtgctgtgaaggagcagtatccgggcatcgagatcgagtcgcgcctcgggggcacaggtgcctttgagatagagataaatggacagctggtgttctccaagctggagaatgggggctttccctatgagaaagatctcattgaggccatccgaagagccagtaatggagaaaccctagaaaagatcaccaacagccgtcctccctgcgtcatcctgtgactgcacaggactctgggttcctgctctgttctggggtccaaaccttggtctccctttggtcctgctgggagctccccctgcctctttcccctacttagctccttagcaaagagaccctggcctccactttgccctttgggtacaaagaaggaatagaagattccgtggccttgggggcaggagagagacactctccatgaacacttctccagccacctcatacccccttcccagggtaagtgcccacgaaagcccagtccactcttcgcctcggtaatacctgtctgatgccacagattttatttattctcccctaacccagggcaatgtcagctattggcagtaaagtggcgctacaaacactaa

SEQ ID NO: 283782 - DNA, 1092 bp, Homo sapiens
gtaaactgaaaagcgctttgcagtctaagatagtccattagagtaaatgaagccatgaagtccagcggacaccgggagtggggagtggggaagcccggcactccgggagaccgggccagggaaggagggtctggaccggacccagcccctgcccggggagcgagctccggagctgccctacgaggtcaaaacgtagcagtggcggagacccgcaggggcgcccgaacgccaccctcggcccctccccgctccagaggccccgccccgtcacgtgcccgcggttcgcgtcacacccggaagcaggggcccgagcggagccggccgcgatgagcggggagccggggcagacgtccgtagcgccccctcccgaggaggtcgagccgggcagtggggtccgcatcgtggtggagtactgtgaaccctgcggcttcgaggcgacctacctggagctggccagtgctgtgaaggagcagtatccgggcatcgagatcgagtcgcgcctcgggggcacaggtgcctttgagatagagataaatggacagctggtgttctccaagctggagaatgggggctttccctatgagaaagatctcattgaggccatccgaagagccagtaatggagaaaccctagaaaagatcaccaacagccgtcctccctgcgtcatcctgtgactgcacaggactctgggttcctgctctgttctggggtccaaaccttggtctccctttggtcctgctgggagctccccctgcctctttcccctacttagctccttagcaaagagaccctggcctccactttgccctttgggtacaaagaaggaatagaagattccgtggccttgggggcaggagagagacactctccatgaacacttctccagccacctcatacccccttcccagggtaagtgcccacgaaagcccagtccactcttcgcctcggtaatacctgtctgatgccacagattttatttattctcccctaacccagggcaatgtcagctattggcagtaaagtggcgctacaaacactaaaaaagacaaaaaaaaattctccagggctggatcgggccataaggggctgaac

SEQ ID NO: 283783 - DNA, 1155 bp, Homo sapiens
gtaaactgaaaagcgctttgcagtctaagatagtccattagagtaaatgaagccatgaagtccagcggacaccgggagtggggagtggggaagcccggcactccgggagaccgggccagggaaggagggtctggaccggacccagcccctgcccggggagcgagctccggagctgccctacgaggtcaaaacgtagcagtggcggagacccgcaggggcgcccgaacgccaccctcggcccctccccgctccagaggccccgccccgtcacgtgcccgcggttcgcgtcacacccggaagcaggggcccgagcggagccggccgcgatgagcggggagccggggcagacgtccgtagcgccccctcccgaggaggtcgagccgggcagtggggtccgcatcgtggtggagtactggtgagcggccccggctggaggacccgcaccctggtcccgcgggccggacggaggtgggtccacgggaggccccacccccgaatccccagcccagccccatctcttgactccccagtgaaccctgcggcttcgaggcgacctacctggagctggccagtgctgtgaaggagcagtatccgggcatcgagatcgagtcgcgcctcgggggcacaggtgcctttgagatagagataaatggacagctggtgttctccaagctggagaatgggggctttccctatgagaaagatctcattgaggccatccgaagagccagtaatggagaaaccctagaaaagatcaccaacagccgtcctccctgcgtcatcctgtgactgcacaggactctgggttcctgctctgttctggggtccaaaccttggtctccctttggtcctgctgggagctccccctgcctctttcccctacttagctccttagcaaagagaccctggcctccactttgccctttgggtacaaagaaggaatagaagattccgtggccttgggggcaggagagagacactctccatgaacacttctccagccacctcatacccccttcccagggtaagtgcccacgaaagcccagtccactcttcgcctcggtaatacctgtctgatgccacagattttatttattctcccctaacccagggcaatgtcagctattggcagtaaagtggcgctacaaacactaa

SEQ ID NO: 283784 - DNA, 1119 bp, Homo sapiens
gtaaactgaaaagcgctttgcagtctaagatagtccattagagtaaatgaagccatgaagtccagcggacaccgggagtggggagtggggaagcccggcactccgggagaccgggccagggaaggagggtctggaccggacccagcccctgcccggggagcgagctccggagctgccctacgaggtcaaaacgtagcagtggcggagacccgcaggggcgcccgaacgccaccctcggcccctccccgctccagaggccccgccccgtcacgtgcccgcggttcgcgtcacacccggaagcaggggcccgagcggagccggccgcgatgagcggggagccggggcagacgtccgtagcgccccctcccgaggaggtcgagccgggcagtggggtccgcatcgtggtggagtactgtgaaccctgcggcttcgaggcgacctacctggagctggccagtgctgtgaaggagcagtatccgggcatcgagatcgagtcgcgcctcgggggcacaggtgcctttgagatagagataaatggacagctggtgttctccaagctggagaatgggggctttccctatgagaaagatgtgagtatttacagcgttgggaggacctcttggtcaccctaccccaacagtgcatcatcctgtcattccactcctctagctcattgaggccatccgaagagccagtaatggagaaaccctagaaaagatcaccaacagccgtcctccctgcgtcatcctgtgactgcacaggactctgggttcctgctctgttctggggtccaaaccttggtctccctttggtcctgctgggagctccccctgcctctttcccctacttagctccttagcaaagagaccctggcctccactttgccctttgggtacaaagaaggaatagaagattccgtggccttgggggcaggagagagacactctccatgaacacttctccagccacctcatacccccttcccagggtaagtgcccacgaaagcccagtccactcttcgcctcggtaatacctgtctgatgccacagattttatttattctcccctaacccagggcaatgtcagctattggcagtaaagtggcgctacaaacactaa

SEQ ID NO: 283785 - DNA, 1234 bp, Homo sapiens
gtaaactgaaaagcgctttgcagtctaagatagtccattagagtaaatgaagccatgaagtccagcggacaccgggagtggggagtggggaagcccggcactccgggagaccgggccagggaaggagggtctggaccggacccagcccctgcccggggagcgagctccggagctgccctacgaggtcaaaacgtagcagtggcggagacccgcaggggcgcccgaacgccaccctcggcccctccccgctccagaggccccgccccgtcacgtgcccgcggttcgcgtcacacccggaagcaggggcccgagcggagccggccgcgatgagcggggagccggggcagacgtccgtagcgccccctcccgaggaggtcgagccgggcagtggggtccgcatcgtggtggagtactggtgagcggccccggctggaggacccgcaccctggtcccgcgggccggacggaggtgggtccacgggaggccccacccccgaatccccagcccagccccatctcttgactccccagtgaaccctgcggcttcgaggcgacctacctggagctggccagtgctgtgaaggagcagtatccgggcatcgagatcgagtcgcgcctcgggggcacaggtgcctttgagatagagataaatggacagctggtgttctccaagctggagaatgggggctttccctatgagaaagatgtgagtatttacagcgttgggaggacctcttggtcaccctaccccaacagtgcatcatcctgtcattccactcctctagctcattgaggccatccgaagagccagtaatggagaaaccctagaaaagatcaccaacagccgtcctccctgcgtcatcctgtgactgcacaggactctgggttcctgctctgttctggggtccaaaccttggtctccctttggtcctgctgggagctccccctgcctctttcccctacttagctccttagcaaagagaccctggcctccactttgccctttgggtacaaagaaggaatagaagattccgtggccttgggggcaggagagagacactctccatgaacacttctccagccacctcatacccccttcccagggtaagtgcccacgaaagcccagtccactcttcgcctcggtaatacctgtctgatgccacagattttatttattctcccctaacccagggcaatgtcagctattggcagtaaagtggcgctacaaacactaa

SEQ ID NO: 283786 - DNA, 462 bp, Homo sapiens
cggagggcgttgatggcccggaggcgttgaatggccagtaatggagaaaccctagaaaagatcaccaacagccgtcctccctgcgtcatcctgtgactgcacaggactctgggttcctgctctgttctggggtccaaaccttggtctccctttggtcctgctgggagctccccctgcctctttcccctacttagctccttagcaaagagaccctggcctccactttgccctttgggtacaaagaaggaatagaagattccgtggccttgggggcaggagagagacactctccatgaacacttctccagccacctcatacccccttcccagggtaagtgcccacgaaagcccagtccactcttcgcctcggtaatacctgtctgatgccacagattttatttattctcccctaacccagggcaatgtcagctattggcagtaaagtggcgctacaaacactaa

SEQ ID NO: 283787 - DNA, 251 bp, Homo sapiens
ggtacaaagaaggaatagaagattccgtggccttgggggcaggagagagacactctccatgaacacttctccagccacctcatacccccttcccagggtaagtgcccacgaaagcccagtccactcttcgcctcggtaatacctgtctgatgccacagattttatttattctcccctaacccagggcaatgtcagctattggcagtaaagtggcgctacaaacactaaatgctaactagtgtgtgttttta

SEQ ID NO: 283788 - DNA, 851 bp, Homo sapiens
cggggagccggggcagacgtccgtagcgccccctcccgaggaggtcgagccgggcagtggggtccgcatcgtggtggagtactggtgagcggccccggctggaggacccgcaccctggtcccgcgggccggacggaggtgggtccacgggaggccccacccccgaatccccagcccagccccatctcttgactccccagtgaaccctgcggcttcgaggcgacctacctggagctggccagtgctgtgaaggagcagtatccgggcatcgagatcgagtcgcgcctcgggggcacaggtgaggctcgcagaacacctgctgggtcagtctgtgctctgaatcccagctctcccgctttctagttctgacattggctgctttatgtaaagtgcccgcagtgcctggcacatggtaaaatgtccggccaacatgagttcccttccataggtcagggggtgtcacagaggcctgtggggaaaaacctattagactgcaatcgtgtagggttggaggggagggagtcctttattgagtgttgcgaggggcacacaggcgaggcctccctcaggttccctggagttgacccagggttggggaattgcttaaggagctacaaatgggtctccagtgggattgatgggggacttgaaggcgggggacccctttggaggaactcctgacttctgcctatgttctcagtgtaccatttatctgttgatttcttaccaggtgcctttgagatagagataaatggacagctggtgttctccaagctggagaatgggggctttccctatgagaaagatgtgagtatttacagcgttgggaggacctcttggtcaccctacccc

SEQ ID NO: 283789 - DNA, 1250 bp, Homo sapiens
gtaaactgaaaagcgctttgcagtctaagatagtccattagagtaaatgaagccatgaagtccagcggacaccgggagtggggagtggggaagcccggcactccgggagaccgggccagggaaggagggtctggaccggacccagcccctgcccggggagcgagctccggagctgccctacgaggtcaaaacgtagcagtggcggagacccgcaggggcgcccgaacgccaccctcggcccctccccgctccagaggccccgccccgtcacgtgcccgcggttcgcgtcacacccggaagcaggggcccgagcggagccggccgcgatgagcggggagccggggcagacgtccgtagcgccccctcccgaggaggtcgagccgggcagtggggtccgcatcgtggtggagtactgtgaaccctgcggcttcgaggcgacctacctggagctggccagtgctgtgaaggagcagtatccgggcatcgagatcgagtcgcgcctcgggggcacaggtgcctttgagatagagataaatggacagctggtgttctccaagctggagaatgggggctttccctatgagaaagatctcattgaggccatccgaagagccagtaatggagaaaccctagaaaagatcaccaacagccgtcctccctgcgtcatcctgtgactgcacaggactctgggttcctgctctgttctggggtccaaaccttggtctccctttggtcctgctgggagctccccctgcctctttcccctacttagctccttagcaaagagaccctggcctccactttgccctttgggtacaaagaaggaatagaagattccgtggccttgggggcaggagagagacactctccatgaacacttctccagccacctcatacccccttcccagggtaagtgcccacgaaagcccagtccactcttcgcctcggtaatacctgtctgatgccacagattttatttattctcccctaacccagggcaatgtcagctattggcagtaaagtggcgctacaaacactaaaaaaaaaaaaaagcaagcaaaaaaacacccaaaagaaacacacaacaggggggcggggcaaaaatcccgggggggcccattagcccccgttttggaaagggcccaagaaggggaaaacgagggggcggggaaccacggggggggacgcccgcgggtcggggggccctcgggggggcgggaccccggaggccggaaaaacaggtgtgcacc

SEQ ID NO: 283790 - DNA, 769 bp, Homo sapiens
  misc_feature (43)..(43): n is a, c, g, or t
tgggtaattggattctcacccctccgccctacgcactgcactncgactcttagagatccccggggagccggggcagacgtccgtagcgccccctcccgaggaggtcgagccgggcagtggggtccgcatcgtggtggagtactgtgaaccctgcggcttcgaggcgacctacctggagctggccagtgctgtgaaggagcagtatccgggcatcgagatcgagtcgcgcctcgggggcacaggtgcctttgagatagagataaatggacagctggtgttctccaagctggagaatgggggctttccctatgagaaagatctcattgaggccatccgaagagccagtaatggagaaaccctagaaaagatcaccaacagccgtcctccctgcgtcatcctgtgactgcacaggactctgggttcctgctctgttctggggtccaaaccttggtctccctttggtcctgctgggagctccccctgcctctttcccctacttagctccttagcaaagagaccctggcctccactttgccctttgggtacaaagaaggaatagaagattccgtggccttgggggcaggagagagacactctccatgaacacttctccagccacctcatacccccttcccagggtaagtgcccacgaaagcccagtccactcttcgcctcggtaatacctgtctgatgccacagattttatttattctcccctaacccagggcaatgtcagctattggcagtaaagtggcgctacaaacactaa

SEQ ID NO: 283791 - DNA, 685 bp, Homo sapiens
  misc_feature (9)..(9): n is a, c, g, or t
gggcgtacnctatcgtcgacccagcgcgctccgggggtccgcagtcggcggtggagtctgtgaaccctgcggcttcgaggcgacctacctggagctggccagtgctgtgaaggagcagtatccgggcatcgagatcgagtcgcgcctcgggggcacaggtgcctttgagatagagataaatggacagctggtgttctccaagctggagaatgggggctttccctatgagaaagatctcattgaggccatccgaagagccagtaatggagaaaccctagaaaagatcaccaacagccgtcctccctgcgtcatcctgtgactgcacaggactctgggttcctgctctgttctggggtccaaaccttggtctccctttggtcctgctgggagctccccctgcctctttcccctacttagctccttagcaaagagaccctggcctccactttgccctttgggtacaaagaaggaatagaagattccgtggccttgggggcaggagagagacactctccatgaacacttctccagccacctcatacccccttcccagggtaagtgcccacgaaagcccagtccactcttcgcctcggtaatacctgtctgatgccacagattttatttattctcccctaacccagggcaatgtcagctattggcagtaaagtggcgctacaaacactaa

SEQ ID NO: 283792 - DNA, 3135 bp, Homo sapiens
  misc_feature (315)..(315): n is a, c, g, or t
  misc_feature (967)..(967): n is a, c, g, or t
cgggtgccatgcagctttctctaatttgctctcagttcctggctatgaattgctaaactatcagtctcgcgctcaccgcccggctgaggaggtgaaagtttctccccaggaagataaaccgcaaaagacatatattgtgcatgatttgcgccttttctttggctttttctttctttcttcacccccccacccacttttttttttttttttttcaaaaagcagagagggaaaaacggagagtgaaggagcgaggaggcgagcgtgagagaaaggagagagagagaaaagaaagggcgaggggctagtggaggaagnaaggaggggcgcgctgcgcgaggcggagagagggcgaagcagtcgcggcactggcgctcacattcctctatgctacaaatccaggaggaagtttttttttagggggctgagatgctccatgcctttaaaagggcagccttgacgcgcggccctctcggcagagactgagcggcgagaaagtgcgagccgggccggcagaatctgcctggcgggcgctggagcctgcgttactcgcggcccgcagccgtccggctactttgcgtttggcccggccagcgccgcgcggcgcgcgcgcgccattgcctgcaggctaggacttcgcgaggtgggtcgactcaccctccctcctcctcttcttcctcctcttcctcctcctcttgttcctcctcctcctcccgattttccctcctcggctggcgagggtggggggggcgggggaggccggggctcgccccgagcagccacgatgctcctggacgccggcccccagtacccagcgatcggcgtgaccacctttggcgcgtcccgccaccactccgcgggcgacgtggccgaacgagacgtgggcctgggcatcaacccgttcgccgacggcatgggcgccttcaagctcaaccccagttcgcacgagctggcttcggccggccagacngccttcacgtcgcaggcgccaggctacgcggctgctgcggccctgggccatcaccatcacccgggccacgtcggctcctattccagcgcagccttcaactccacgcgggactttctgttccgcaaccggggttttggcgacgcggcggcggcagccagcgcacagcacagcctctttgctgcatcggccgggggcttcgggggcccacacggccacacggacgccgcgggccacctcctcttccccgggcttcacgagcaggctgccggccacgcgtcgcctaacgtggtcaacgggcagatgaggctcggcttctcgggggacatgtacccgcgaccggagcagtacggccaggtgaccagcccgcgttcggagcactatgctgcgccgcagctgcacggctacgggcccatgaacgtgaacatggccgcgcatcacggcgccggcgccttcttccgctacatgcgccaacccatcaagcaagagctcatctgcaagtggatcgagcccgagcagctggccaaccccaaaaagtcgtgcaacaaaactttcagcaccatgcacgagctagttacgcacgtcaccgtggagcacgtaggtggcccggagcagagtaatcacatctgcttctgggaggagtgtccgcgcgagggcaagcccttcaaagccaaatacaaactggttaaccacatccgcgtgcacacgggcgagaagccctttccctgccccttccctggctgtggcaaggtcttcgcgcgctccgagaatttaaagatccacaaaaggacgcacacaggggagaagcccttcaagtgcgagtttgagggctgtgaccggcgcttcgctaacagcagcgaccgcaagaagcacatgcacgtgcacacgagcgacaagccctatctttgcaagatgtgcgacaagtcctacacgcatcccagttcgctgcgcaaacacatgaaggtccacgaatcctcctcgcagggctcgcagccttcgccggccgccagctctggctacgaatcctccacgcctcccaccatcgtgtctccctccacagacaacccgaccacaagctccttatcgccctcctcctccgcagtccaccacacagccggccacagtgcgctctcttccaattttaacgaatggtacgtttaaaatcagaaacaaaacatcgaacaaaaccctatttaagagactgatcacacacgtatacacaacattactgaaagaaccctgcgaatcaaaacaacccccacacagaccccgcaatcctcttttaaaaaatctgccaatagacccaggacgagtaagagaggaagcatcaaccttttaaaaatttcctttcgctttcattatttttctttttttggcaaaggcttggtacccaaggtgcggtagggggtcgagggggaggaggccacctgaccaaatgccgccaaccccgagggccagtttcttgtcgaattggtacgggctctctggggcttcggcttctttttttctttgttttcttgtaaatacagaattattagcttaaaactgtactgttgaattctgtaaatagttatatctcggttggagcgggtgggtgggattgtggcgttgtggtctttgcattgggggaggggggagggaccggatgggcggggggagggggagggggaggggtgggcggccgaaagccaactgtttgtactgaatggcaagaatgttctagtaaatgtgtaccaaaatgtgaattactttgtacgattacagtctccacgtcgacctaacccaatattattggtattaatgtgctttttttgtataaagtgcaaacatttcgtcccaaagtctaagtactttagtgcagtaaaatgttgtttcatgtcctgtcaagaattcgtatagtacgagcctggatctgcgtgtcaaactgttccatttgtttatgtaaagtgatattaaaaaagatataaactataactgtccgttacttttggcaaaagatacaaccacataatgtatataattcctagtttccatatttatccgcatgtaaagggccggtttatccatgttacagctcttcaatatttatggctagaagaactcgtatgtacactttagtttccagaactgtttggtaacctttcgtaccttattaaagattcttaaatctc

SEQ ID NO: 283793 - DNA, 1041 bp, Homo sapiens
tgcactgcgccctgggtgggtgggtgaatgtgaagaggcggcgttgggctaggcccctgcagcccgctcggagcgtcctaggcccggggctgcgctgtgaaagacccagattctcatcccagaggcccagcagtcctgaaaggcctcctctccgaccctgagccgggtccgccgaacaaagttcggaagctcgggctagctgggccagcgccattttctcgcacttgtggctggatctggttgtcccggcgactgcgccccggcgcggtctcttttcctctacctcggatccccagcactgactcgccctcagacgccggggaaggtgtggtgagctcccggccccggccgaggggtccctggagaggagctgggtggcggtggccaggccgagcgcggttgctggcccgcgcctccctccccgaggcaccattgttccgggatcgctgtgaccgccacaaagtgaatcctttcggtgcggacagtcgccttcaaagccaggccccggattcaggtcagggagaatctcagctcctgagaaatttgctcctgtttgccgcttctgctactcgaggaaatgaaacgccattaatatttgaaaaggcaattattttcctgttgaatcgagaactgtcttcatgaataatttgtagtgaggtctattgccatttgagaaatattttttttccctctctctctctctctctctctctcactctctctctcttctttttatgactaggagggggatttgagggaaatgcccgagcaggccagactctgtagttcgttgttggtcgtgtttgtttgtttgtttgtttttgtttgttgtttcccccaccccccaccgctaatgaatcaggaccgcgaaccgaaagaacgcacaaaattctgtcctgaaaacacgaaaacctgagccagccgtggcgcactgaacttgcttctctgctgtaggtcgactgtgctaagaatttaaccattttctgcttcacagaattcaaacagtgggccggcaaagagctgtaaaagtttgtttgttta

SEQ ID NO: 283794 - DNA, 2987 bp, Homo sapiens
  misc_feature (93)..(93): n is a, c, g, or t
  misc_feature (448)..(448): n is a, c, g, or t
agggggctgagatgctccatgcctttccccgggcagccttgacgcgcggccctctcggcagagactgagcggcgaggggctagtggaggaagnaaggaggggcgcgctgcgcgaggcggagagagggcgaagcagtcgcggcactggcgctcacattcctcttcctcctcctcttgttcctcctcctcctcccgattttccctcctcggctggcgagggtggggggggcgggggaggccggggctcgccccgagcagccacgatgctcctggacgccggcccccagtacccagcgatcggcgtgaccacctttggcgcgtcccgccaccactccgcgggcgacgtggccgaacgagacgtgggcctgggcatcaacccgttcgccgacggcatgggcgccttcaagctcaaccccagttcgcacgagctggcttcggccggccagacngccttcacgtcgcaggcgccaggctacgcggctgctgcggccctgggccatcaccatcacccgggccacgtcggctcctattccagcgcagccttcaactccacgcgggactttctgttccgcaaccggggttttggcgacgcggcggcggcagccagcgcacagcacagcctctttgctgcatcggccgggggcttcgggggcccacacggccacacggacgccgcgggccacctcctcttccccgggcttcacgagcaggctgccggccacgcgtcgcctaacgtggtcaacgggcagatgaggctcggcttctcgggggacatgtacccgcgaccggagcagtacggccaggtgaccagcccgcgttcggagcactatgctgcgccgcagctgcacggctacgggcccatgaacgtgaacatggccgcgcatcacggcgccggcgccttcttccgctacatgcgccaacccatcaagcaagagctcatctgcaagtggatcgagcccgagcagctggccaaccccaaaaagtcgtgcaacaaaactttcagcaccatgcacgagctagttacgcacgtcaccgtggagcacgtaggtggcccggagcagagtaatcacatctgcttctgggaggagtgtccgcgcgagggcaagcccttcaaagccaaatacaaactggttaaccacatccgcgtgcacacgggcgagaagccctttccctgccccttccctggctgtggcaaggtcttcgcgcgctccgagaatttaaagatccacaaaaggacgcacacaggggagaagcccttcaagtgcgagtttgagggctgtgaccggcgcttcgctaacagcagcgaccgcaagaagcacatgcacgtgcacacgagcgacaagccctatctttgcaagatgtgcgacaagtcctacacgcatcccagttcgctgcgcaaacacatgaaggtccacgaatcctcctcgcagggctcgcagccttcgccggccgccagctctggctacgaatcctccacgcctcccaccatcgtgtctccctccacagacaacccgaccacaagctccttatcgccctcctcctccgcagtccaccacacagccggccacagtgcgctctcttccaattttaacgaatggtacgtttaaaatcagaaacaaaacatcgaacaaaaccctatttaagagactgatcacacacgtatacacaacattactgaaagaaccctgcgaatcaaaacaacccccacacagaccccgcaatcctcttttaaaaaatctgccaatagacccaggacgagtaagagaggaagcatcaaccttttaaaaatttcctttcgctttcattatttttctttttttggcaaaggcttggtacccaaggtgcggtagggggtcgagggggaggaggccacctgaccaaatgccgccaaccccgagggccagtttcttgtcgaattggtacgggctctctggggcttcggcttctttttttctttgttttcttgtaaatacagaattattagcttaaaactgtactgttgaattctgtaaatagttatatctcggttggagcgggtgggtgggattgtggcgttgtggtctttgcattgggggaggggggagggaccggatgggcggggggagggggagggggaggggtgggcggccgaaagccaactgtttgtactgaatggcaagaatgttctagtaaatgtgtaccaaaatgtgaattactttgtacgattacagtctccacgtcgacctaacccaatattattggtattaatgtgctttttttgtataaagtgcaaacatttcgtcccaaagtctaagtactttagtgcagtaaaatgttgtttcatgtcctgtcaagaattcgtatagtacgagcctggatctgcgtgtcaaactgttccatttgtttatgtaaagtgatattaaaaaagatataaactataactgtccgttacttttggcaaaagatacaaccacataatgtatataattcctagtttccatatttatccgcatgtaaagggccggtttatccatgttacagctcttcaatatttatggctagaagaactcgtatgtacactttagtttccagaactgtttggtaacctttcgtaccttattaaagattcttaaatctccgtgattgtggtaggaatttcttcttcacccaccagcaacctgctgcctcttctgccagtcttaaagggtctccagaaaagctctccagtctcccttgccttccctttctgtcactgcaggtcgtataaacgtgataaatgaatgctaccctgctggctctccgagagagtgtaattagtatttatatcaaaatttatgaaacaaattttcggccgcagtataatttaaatgacctttgcagatgtagaataacaaccataaaaataacaggaatagattgcacaggcgacatcaatattaatgtagacgaattgtcagaagctcaggggctcgctctgcaacattgcaaatgaacttgcagccgagggtt

SEQ ID NO: 283795 - DNA, 1236 bp, Homo sapiens
tcgcgtgtgcttgcgcaaacacatgaaggtccacgaatcctcctcgcagggctcgcagccttcgccggccgccagctctggctacgaatcctccacgcctcccaccatcgtgtctccctccacagacaacccgaccacaagctccttatcgccctcctcctccgcagtccaccacacagccggccacagtgcgctctcttccaattttaacgaatggtacgtttaaaatcagaaacaaaacatcgaacaaaaccctatttaagagactgatcacacacgtatacacaacattactgaaagaaccctgcgaatcaaaacaacccccacacagaccccgcaatcctcttttaaaaaatctgccaatagacccaggacgagtaagagaggaagcatcaaccttttaaaaatttcctttcgctttcattatttttctttttttggcaaaggcttggtacccaaggtgcggtagggggtcgagggggaggaggccacctgaccaaatgccgccaaccccgagggccagtttcttgtcgaattggtacgggctctctggggcttcggcttctttttttctttgttttcttgtaaatacagaattattagcttaaaactgtactgttgaattctgtaaatagttatatctcggttggagcgggtgggtgggattgtggcgttgtggtctttgcattgggggaggggggagggaccggatgggcggggggagggggagggggaggggtgggcggccgaaagccaactgtttgtactgaatggcaagaatgttctagtaaatgtgtaccaaaatgtgaattactttgtacgattacagtctccacgtcgacctaacccaatattattggtattaatgtgctttttttgtataaagtgcaaacatttcgtcccaaagtctaagtactttagtgcagtaaaatgttgtttcatgtcctgtcaagaattcgtatagtacgagcctggatctgcgtgtcaaactgttccatttgtttatgtaaagtgatattaaaaaagatataaactataactgtccgttacttttggcaaaagatacaaccacataatgtatataattcctagtttccatatttatccgcatgtaaagggccggtttatccatgttacagctcttcaatatttatggctagaagaactcgtatgtacactttagtttccagaactgtttggtaacctttcgtaccttattaaagattcttaaatctc

SEQ ID NO: 283796 - DNA, 2616 bp, Homo sapiens
  misc_feature (93)..(93): n is a, c, g, or t
  misc_feature (448)..(448): n is a, c, g, or t
agggggctgagatgctccatgcctttccccgggcagccttgacgcgcggccctctcggcagagactgagcggcgaggggctagtggaggaagnaaggaggggcgcgctgcgcgaggcggagagagggcgaagcagtcgcggcactggcgctcacattcctcttcctcctcctcttgttcctcctcctcctcccgattttccctcctcggctggcgagggtggggggggcgggggaggccggggctcgccccgagcagccacgatgctcctggacgccggcccccagtacccagcgatcggcgtgaccacctttggcgcgtcccgccaccactccgcgggcgacgtggccgaacgagacgtgggcctgggcatcaacccgttcgccgacggcatgggcgccttcaagctcaaccccagttcgcacgagctggcttcggccggccagacngccttcacgtcgcaggcgccaggctacgcggctgctgcggccctgggccatcaccatcacccgggccacgtcggctcctattccagcgcagccttcaactccacgcgggactttctgttccgcaaccggggttttggcgacgcggcggcggcagccagcgcacagcacagcctctttgctgcatcggccgggggcttcgggggcccacacggccacacggacgccgcgggccacctcctcttccccgggcttcacgagcaggctgccggccacgcgtcgcctaacgtggtcaacgggcagatgaggctcggcttctcgggggacatgtacccgcgaccggagcagtacggccaggtgaccagcccgcgttcggagcactatgctgcgccgcagctgcacggctacgggcccatgaacgtgaacatggccgcgcatcacggcgccggcgccttcttccgctacatgcgccaacccatcaagcaagagctcatctgcaagtggatcgagcccgagcagctggccaaccccaaaaagtcgtgcaacaaaactttcagcaccatgcacgagctagttacgcacgtcaccgtggagcacgtaggtggcccggagcagagtaatcacatctgcttctgggaggagtgtccgcgcgagggcaagcccttcaaagccaaatacaaactggttaaccacatccgcgtgcacacgggcgagaagccctttccctgccccttccctggctgtggcaaggtcttcgcgcgctccgagaatttaaagatccacaaaaggacgcacacaggggagaagcccttcaagtgcgagtttgagggctgtgaccggcgcttcgctaacagcagcgaccgcaagaagcacatgcacgtgcacacgagcgacaagccctatctttgcaagatgtgcgacaagtcctacacgcatcccagttcgctgcgcaaacacatgaaggtccacgaatcctcctcgcagggctcgcagccttcgccggccgccagctctggctacgaatcctccacgcctcccaccatcgtgtctccctccacagacaacccgaccacaagctccttatcgccctcctcctccgcagtccaccacacagccggccacagtgcgctctcttccaattttaacgaatggtacgtttaaaatcagaaacaaaacatcgaacaaaaccctatttaagagactgatcacacacgtatacacaacattactgaaagaaccctgcgaatcaaaacaacccccacacagaccccgcaatcctcttttaaaaaatctgccaatagacccaggacgagtaagagaggaagcatcaaccttttaaaaatttcctttcgctttcattatttttctttttttggcaaaggcttggtacccaaggtgcggtagggggtcgagggggaggaggccacctgaccaaatgccgccaaccccgagggccagtttcttgtcgaattggtacgggctctctggggcttcggcttctttttttctttgttttcttgtaaatacagaattattagcttaaaactgtactgttgaattctgtaaatagttatatctcggttggagcgggtgggtgggattgtggcgttgtggtctttgcattgggggaggggggagggaccggatgggcggggggagggggagggggaggggtgggcggccgaaagccaactgtttgtactgaatggcaagaatgttctagtaaatgtgtaccaaaatgtgaattactttgtacgattacagtctccacgtcgacctaacccaatattattggtattaatgtgctttttttgtataaagtgcaaacatttcgtcccaaagtctaagtactttagtgcagtaaaatgttgtttcatgtcctgtcaagaattcgtatagtacgagcctggatctgcgtgtcaaactgttccatttgtttatgtaaagtgatattaaaaaagatataaactataactgtccgttacttttggcaaaagatacaaccacataatgtatataattcctagtttccatatttatccgcatgtaaagggccggtttatccatgttacagctcttcaatatttatggctagaagaactcgtatgtacactttagtttccagaactgtttggtaacctttcgtaccttattaaagattcttaaatctc

SEQ ID NO: 283797 - DNA, 1886 bp, Homo sapiens
tgcactgcgccctgggtgggtgggtgaatgtgaagaggcggcgttgggctaggcccctgcagcccgctcggagcgtcctaggcccggggctgcgctgtgaaagacccagattctcatcccagaggcccagcagtcctgaaaggcctcctctccgaccctgagccgggtccgccgaacaaagttcggaagctcgggctagctgggccagcgccattttctcgcacttgtggctggatctggttgtcccggcgactgcgccccggcgcggtctcttttcctctacctcggatccccagcactgactcgccctcagacgccggggaaggtgtggtgagctcccggccccggccgaggggtccctggagaggagctgggtggcggtggccaggccgagcgcggttgctggcccgcgcctccctccccgaggcaccattgttccgggatcgctgtgaccgccacaaagtgaatcctttcggtgcggacagtcgccttcaaagccaggccccggattcaggggagaagcccttcaagtgcgagtttgagggctgtgaccggcgcttcgctaacagcagcgaccgcaagaagcacatgcacgtgcacacgagcgacaagccctatctttgcaagatgtgcgacaagtcctacacgcatcccagttcgctgcgcaaacacatgaaggtccacgaatcctcctcgcagggctcgcagccttcgccggccgccagctctggctacgaatcctccacgcctcccaccatcgtgtctccctccacagacaacccgaccacaagctccttatcgccctcctcctccgcagtccaccacacagccggccacagtgcgctctcttccaattttaacgaatggtacgtttaaaatcagaaacaaaacatcgaacaaaaccctatttaagagactgatcacacacgtatacacaacattactgaaagaaccctgcgaatcaaaacaacccccacacagaccccgcaatcctcttttaaaaaatctgccaatagacccaggacgagtaagagaggaagcatcaaccttttaaaaatttcctttcgctttcattatttttctttttttggcaaaggcttggtacccaaggtgcggtagggggtcgagggggaggaggccacctgaccaaatgccgccaaccccgagggccagtttcttgtcgaattggtacgggctctctggggcttcggcttctttttttctttgttttcttgtaaatacagaattattagcttaaaactgtactgttgaattctgtaaatagttatatctcggttggagcgggtgggtgggattgtggcgttgtggtctttgcattgggggaggggggagggaccggatgggcggggggagggggagggggaggggtgggcggccgaaagccaactgtttgtactgaatggcaagaatgttctagtaaatgtgtaccaaaatgtgaattactttgtacgattacagtctccacgtcgacctaacccaatattattggtattaatgtgctttttttgtataaagtgcaaacatttcgtcccaaagtctaagtactttagtgcagtaaaatgttgtttcatgtcctgtcaagaattcgtatagtacgagcctggatctgcgtgtcaaactgttccatttgtttatgtaaagtgatattaaaaaagatataaactataactgtccgttacttttggcaaaagatacaaccacataatgtatataattcctagtttccatatttatccgcatgtaaagggccggtttatccatgttacagctcttcaatatttatggctagaagaactcgtatgtacactttagtttccagaactgtttggtaacctttcgtaccttattaaagattcttaaatctc

SEQ ID NO: 283798 - DNA, 632 bp, Homo sapiens
ggaataaataggtaaaagaatgttcatatgttaagagttaataccatcaatagaaagtggactagtaagcgtacaggacaataggtgaaccaatttattaaataataagaaaaggaataattaaaataagtaagaaataaatagagatagagaaaaaaagaagagagagagagagagagagagagagagagagagagagctcgtgccgaattcggcacgagcccatgtttgcaatcaaagatgataaaatagattcttatttttcccccacccccgaaaatgttcaataatgtcccatgtaaaacctgctacaaatggcagcttatacatagcaatggtaaaatcatcatctggatttaggaattgctcttgtcatacccccaagtttctaagatttaagattctccttactactatcctacgtttaaatatctttgaaagtttgtattaaatgtgaattttaagaaataatatttatatttctgtaaatgtaaactgtgaagatagttataaactgaagcagatacctggaaccacctaaagaacttccatttatggaggatttttttgccccttgtgtttggaattataaaatataggtaaaagtacgtaattaaataatgtttttggta

SEQ ID NO: 283799 - DNA, 829 bp, Homo sapiens
taggaaataagtcagcaccgaagcagtggttaagccggagggctcggaagaacggcaccttttctttctcgaaaaagttatatgggggctgaatgagcttctggaggcttgtttaccgttttttattgtcacacagaaaaagaaactgccttgtctcccttccgggaattctctctttaagactgttcttacgtctgttgctagattatcgtccaaaagtgttaatgcccaagtgactgacatcaactccaagggattggaattgaggaagactgttactacagttgagactcagaacttggaaggcctgcatcatgatggccaattctgccataagccctgtcctccaggtgaaaggaaagctagggactgcacagtcaatggggatgaaccagactgcgtgccctgccaagaagggaaggagtacacagacaaagcccatttttcttccaaatgcagaagatgtagattgtgtgatgaaggacatggcttagaagtggaaataaactgcacccggacccagaataccaagtgcagatgtaaaccaaactttttttgtaactctactgtatgtgaacactgtgacccttgcaccaaatgtgaacatggaatcatcaaggaatgcacactcaccagcaacaccaagtgcaaagaggaaggatccagatctaacttggggtggctttgtcttcttcttttgccaattccactaattgtttgggtgaagagaaaggaagtacagaaaacatgcagaaagcacagaaaggaaaaccaaggttctcatgaatctccaaccttaaatcctatggagtcttgctccatagcccag

SEQ ID NO: 283800 - DNA, 2406 bp, Homo sapiens
agccctccccaacccgggcgttccccagcgaggcttccttcccatcctcctgaccaccggggcttttcgtgagctcgtctctgatctcgcgcaagagtgacacacaggtgttcaaagacgcttctggggagtgagggaagcggtttacgagtgacttggctggagcctcaggggcgggcactggcacggaacacaccctgaggccagccctggctgcccaggcggagctgcctcttctcccgcgggttggtggacccgctcagtacggagttggggaagctctttcacttcggaggattgctcaacaaccatgctgggcatctggaccctcctacctctggttcttacgtctgttgctagattatcgtccaaaagtgttaatgcccaagtgactgacatcaactccaagggattggaattgaggaagactgttactacagttgagactcagaacttggaaggcctgcatcatgatggccaattctgccataagccctgtcctccagatgtgaacatggaatcatcaaggaatgcacactcaccagcaacaccaagtgcaaagaggaaggatccagatctaacttggggtggctttgtcttcttcttttgccaattccactaattgtttgggtgaagagaaaggaagtacagaaaacatgcagaaagcacagaaaggaaaaccaaggttctcatgaatctccaaccttaaatcctgaaacagtggcaataaatttatctgatgttgacttgagtaaatatatcaccactattgctggagtcatgacactaagtcaagttaaaggctttgttcgaaagaatggtgtcaatgaagccaaaatagatgagatcaagaatgacaatgtccaagacacagcagaacagaaagttcaactgcttcgtaattggcatcaacttcatggaaagaaagaagcgtatgacacattgattaaagatctcaaaaaagccaatctttgtactcttgcagagaaaattcagactatcatcctcaaggacattactagtgactcagaaaattcaaacttcagaaatgaaatccaaagcttggtctagagtgaaaaacaacaaattcagttctgagtatatgcaattagtgtttgaaaagattcttaatagctggctgtaaatactgcttggttttttactgggtacattttatcatttattagcgctgaagagccaacatatttgtagatttttaatatctcatgattctgcctccaaggatgtttaaaatctagttgggaaaacaaacttcatcaagagtaaatgcagtggcatgctaagtacccaaataggagtgtatgcagaggatgaaagattaagattatgctctggcatctaacatatgattctgtagtatgaatgtaatcagtgtatgttagtacaaatgtctatccacaggctaaccccactctatgaatcaatagaagaagctatgaccttttgctgaaatatcagttactgaacaggcaggccactttgcctctaaattacctctgataattctagagattttaccatatttctaaactttgtttataactctgagaagatcatatttatgtaaagtatatgtatttgagtgcagaatttaaataaggctctacctcaaagacctttgcacagtttattggtgtcatattatacaatatttcaattgtgaattcacatagaaaacattaaattataatgtttgactattatatatgtgtatgcattttactggctcaaaactacctacttctttctcaggcatcaaaagcattttgagcaggagagtattactagagctttgccacctctccatttttgccttggtgctcatcttaatggcctaatgcacccccaaacatggaaatatcaccaaaaaatacttaatagtccaccaaaaggcaagactgcccttagaaattctagcctggtttggagatactaactgctctcagagaaagtagctttgtgacatgtcatgaacccatgtttgcaatcaaagatgataaaatagattcttatttttcccccacccccgaaaatgttcaataatgtcccatgtaaaacctgctacaaatggcagcttatacatagcaatggtaaaatcatcatctggatttaggaattgctcttgtcatacccccaagtttctaagatttaagattctccttactactatcctacgtttaaatatctttgaaagtttgtattaaatgtgaattttaagaaataatatttatatttctgtaaatgtaaactgtgaagatagttataaactgaagcagatacctggaaccacctaaagaacttccatttatggaggatttttttgccccttgtgtttggaattataaaatataggtaaaagtacgtaattaaataatgtttttggta

SEQ ID NO: 283801 - DNA, 2343 bp, Homo sapiens
agccctccccaacccgggcgttccccagcgaggcttccttcccatcctcctgaccaccggggcttttcgtgagctcgtctctgatctcgcgcaagagtgacacacaggtgttcaaagacgcttctggggagtgagggaagcggtttacgagtgacttggctggagcctcaggggcgggcactggcacggaacacaccctgaggccagccctggctgcccaggcggagctgcctcttctcccgcgggttggtggacccgctcagtacggagttggggaagctctttcacttcggaggattgctcaacaaccatgctgggcatctggaccctcctacctctggttcttacgtctgttgctagattatcgtccaaaagtgttaatgcccaagtgactgacatcaactccaagggattggaattgaggaagactgttactacagttgagactcagaacttggaaggcctgcatcatgatggccaattctgccataagccctgtcctccagatgtgaacatggaatcatcaaggaatgcacactcaccagcaacaccaagtgcaaagaggaagtgaagagaaaggaagtacagaaaacatgcagaaagcacagaaaggaaaaccaaggttctcatgaatctccaaccttaaatcctgaaacagtggcaataaatttatctgatgttgacttgagtaaatatatcaccactattgctggagtcatgacactaagtcaagttaaaggctttgttcgaaagaatggtgtcaatgaagccaaaatagatgagatcaagaatgacaatgtccaagacacagcagaacagaaagttcaactgcttcgtaattggcatcaacttcatggaaagaaagaagcgtatgacacattgattaaagatctcaaaaaagccaatctttgtactcttgcagagaaaattcagactatcatcctcaaggacattactagtgactcagaaaattcaaacttcagaaatgaaatccaaagcttggtctagagtgaaaaacaacaaattcagttctgagtatatgcaattagtgtttgaaaagattcttaatagctggctgtaaatactgcttggttttttactgggtacattttatcatttattagcgctgaagagccaacatatttgtagatttttaatatctcatgattctgcctccaaggatgtttaaaatctagttgggaaaacaaacttcatcaagagtaaatgcagtggcatgctaagtacccaaataggagtgtatgcagaggatgaaagattaagattatgctctggcatctaacatatgattctgtagtatgaatgtaatcagtgtatgttagtacaaatgtctatccacaggctaaccccactctatgaatcaatagaagaagctatgaccttttgctgaaatatcagttactgaacaggcaggccactttgcctctaaattacctctgataattctagagattttaccatatttctaaactttgtttataactctgagaagatcatatttatgtaaagtatatgtatttgagtgcagaatttaaataaggctctacctcaaagacctttgcacagtttattggtgtcatattatacaatatttcaattgtgaattcacatagaaaacattaaattataatgtttgactattatatatgtgtatgcattttactggctcaaaactacctacttctttctcaggcatcaaaagcattttgagcaggagagtattactagagctttgccacctctccatttttgccttggtgctcatcttaatggcctaatgcacccccaaacatggaaatatcaccaaaaaatacttaatagtccaccaaaaggcaagactgcccttagaaattctagcctggtttggagatactaactgctctcagagaaagtagctttgtgacatgtcatgaacccatgtttgcaatcaaagatgataaaatagattcttatttttcccccacccccgaaaatgttcaataatgtcccatgtaaaacctgctacaaatggcagcttatacatagcaatggtaaaatcatcatctggatttaggaattgctcttgtcatacccccaagtttctaagatttaagattctccttactactatcctacgtttaaatatctttgaaagtttgtattaaatgtgaattttaagaaataatatttatatttctgtaaatgtaaactgtgaagatagttataaactgaagcagatacctggaaccacctaaagaacttccatttatggaggatttttttgccccttgtgtttggaattataaaatataggtaaaagtacgtaattaaataatgtttttggta

SEQ ID NO: 283802 - DNA, 2544 bp, Homo sapiens
agccctccccaacccgggcgttccccagcgaggcttccttcccatcctcctgaccaccggggcttttcgtgagctcgtctctgatctcgcgcaagagtgacacacaggtgttcaaagacgcttctggggagtgagggaagcggtttacgagtgacttggctggagcctcaggggcgggcactggcacggaacacaccctgaggccagccctggctgcccaggcggagctgcctcttctcccgcgggttggtggacccgctcagtacggagttggggaagctctttcacttcggaggattgctcaacaaccatgctgggcatctggaccctcctacctctggttcttacgtctgttgctagattatcgtccaaaagtgttaatgcccaagtgactgacatcaactccaagggattggaattgaggaagactgttactacagttgagactcagaacttggaaggcctgcatcatgatggccaattctgccataagccctgtcctccaggtgaaaggaaagctagggactgcacagtcaatggggatgaaccagactgcgtgccctgccaagaagggaaggagtacacagacaaagcccatttttcttccaaatgcagaagatgtagattgtgtgatgaaggacatgatgtgaacatggaatcatcaaggaatgcacactcaccagcaacaccaagtgcaaagaggaaggatccagatctaacttggggtggctttgtcttcttcttttgccaattccactaattgtttgggtgaagagaaaggaagtacagaaaacatgcagaaagcacagaaaggaaaaccaaggttctcatgaatctccaaccttaaatcctgaaacagtggcaataaatttatctgatgttgacttgagtaaatatatcaccactattgctggagtcatgacactaagtcaagttaaaggctttgttcgaaagaatggtgtcaatgaagccaaaatagatgagatcaagaatgacaatgtccaagacacagcagaacagaaagttcaactgcttcgtaattggcatcaacttcatggaaagaaagaagcgtatgacacattgattaaagatctcaaaaaagccaatctttgtactcttgcagagaaaattcagactatcatcctcaaggacattactagtgactcagaaaattcaaacttcagaaatgaaatccaaagcttggtctagagtgaaaaacaacaaattcagttctgagtatatgcaattagtgtttgaaaagattcttaatagctggctgtaaatactgcttggttttttactgggtacattttatcatttattagcgctgaagagccaacatatttgtagatttttaatatctcatgattctgcctccaaggatgtttaaaatctagttgggaaaacaaacttcatcaagagtaaatgcagtggcatgctaagtacccaaataggagtgtatgcagaggatgaaagattaagattatgctctggcatctaacatatgattctgtagtatgaatgtaatcagtgtatgttagtacaaatgtctatccacaggctaaccccactctatgaatcaatagaagaagctatgaccttttgctgaaatatcagttactgaacaggcaggccactttgcctctaaattacctctgataattctagagattttaccatatttctaaactttgtttataactctgagaagatcatatttatgtaaagtatatgtatttgagtgcagaatttaaataaggctctacctcaaagacctttgcacagtttattggtgtcatattatacaatatttcaattgtgaattcacatagaaaacattaaattataatgtttgactattatatatgtgtatgcattttactggctcaaaactacctacttctttctcaggcatcaaaagcattttgagcaggagagtattactagagctttgccacctctccatttttgccttggtgctcatcttaatggcctaatgcacccccaaacatggaaatatcaccaaaaaatacttaatagtccaccaaaaggcaagactgcccttagaaattctagcctggtttggagatactaactgctctcagagaaagtagctttgtgacatgtcatgaacccatgtttgcaatcaaagatgataaaatagattcttatttttcccccacccccgaaaatgttcaataatgtcccatgtaaaacctgctacaaatggcagcttatacatagcaatggtaaaatcatcatctggatttaggaattgctcttgtcatacccccaagtttctaagatttaagattctccttactactatcctacgtttaaatatctttgaaagtttgtattaaatgtgaattttaagaaataatatttatatttctgtaaatgtaaactgtgaagatagttataaactgaagcagatacctggaaccacctaaagaacttccatttatggaggatttttttgccccttgtgtttggaattataaaatataggtaaaagtacgtaattaaataatgtttttggta

SEQ ID NO: 283803 - DNA, 2461 bp, Homo sapiens
agccctccccaacccgggcgttccccagcgaggcttccttcccatcctcctgaccaccggggcttttcgtgagctcgtctctgatctcgcgcaagagtgacacacaggtgttcaaagacgcttctggggagtgagggaagcggtttacgagtgacttggctggagcctcaggggcgggcactggcacggaacacaccctgaggccagccctggctgcccaggcggagctgcctcttctcccgcgggttggtggacccgctcagtacggagttggggaagctctttcacttcggaggattgctcaacaaccatgctgggcatctggaccctcctacctctggttcttacgtctgttgctagattatcgtccaaaagtgttaatgcccaagtgactgacatcaactccaagggattggaattgaggaagactgttactacagttgagactcagaacttggaaggcctgcatcatgatggccaattctgccataagccctgtcctccaggtgaaaggaaagctagggactgcacagtcaatggggatgaaccagactgcgtgccctgccaagaagggaaggagtacacagacaaagcccatttttcttccaaatgcagaagatgtagattgtgtgatgaaggacatgatgtgaacatggaatcatcaaggaatgcacactcaccagcaacaccaagtgcaaagaggaaggatccagatctaacttggggtggctttgtcttcttcttttgccaattccactaattgtttggggaaacagtggcaataaatttatctgatgttgacttgagtaaatatatcaccactattgctggagtcatgacactaagtcaagttaaaggctttgttcgaaagaatggtgtcaatgaagccaaaatagatgagatcaagaatgacaatgtccaagacacagcagaacagaaagttcaactgcttcgtaattggcatcaacttcatggaaagaaagaagcgtatgacacattgattaaagatctcaaaaaagccaatctttgtactcttgcagagaaaattcagactatcatcctcaaggacattactagtgactcagaaaattcaaacttcagaaatgaaatccaaagcttggtctagagtgaaaaacaacaaattcagttctgagtatatgcaattagtgtttgaaaagattcttaatagctggctgtaaatactgcttggttttttactgggtacattttatcatttattagcgctgaagagccaacatatttgtagatttttaatatctcatgattctgcctccaaggatgtttaaaatctagttgggaaaacaaacttcatcaagagtaaatgcagtggcatgctaagtacccaaataggagtgtatgcagaggatgaaagattaagattatgctctggcatctaacatatgattctgtagtatgaatgtaatcagtgtatgttagtacaaatgtctatccacaggctaaccccactctatgaatcaatagaagaagctatgaccttttgctgaaatatcagttactgaacaggcaggccactttgcctctaaattacctctgataattctagagattttaccatatttctaaactttgtttataactctgagaagatcatatttatgtaaagtatatgtatttgagtgcagaatttaaataaggctctacctcaaagacctttgcacagtttattggtgtcatattatacaatatttcaattgtgaattcacatagaaaacattaaattataatgtttgactattatatatgtgtatgcattttactggctcaaaactacctacttctttctcaggcatcaaaagcattttgagcaggagagtattactagagctttgccacctctccatttttgccttggtgctcatcttaatggcctaatgcacccccaaacatggaaatatcaccaaaaaatacttaatagtccaccaaaaggcaagactgcccttagaaattctagcctggtttggagatactaactgctctcagagaaagtagctttgtgacatgtcatgaacccatgtttgcaatcaaagatgataaaatagattcttatttttcccccacccccgaaaatgttcaataatgtcccatgtaaaacctgctacaaatggcagcttatacatagcaatggtaaaatcatcatctggatttaggaattgctcttgtcatacccccaagtttctaagatttaagattctccttactactatcctacgtttaaatatctttgaaagtttgtattaaatgtgaattttaagaaataatatttatatttctgtaaatgtaaactgtgaagatagttataaactgaagcagatacctggaaccacctaaagaacttccatttatggaggatttttttgccccttgtgtttggaattataaaatataggtaaaagtacgtaattaaataatgtttttggta

SEQ ID NO: 283804 - DNA, 2250 bp, Homo sapiens
taggaaataagtcagcaccgaagcagtggttaagccggagggctcggaagaacggcaccttttctttctcgaaaaagttatatgggggctgaatgagcttctggaggcttgtttaccgttttttattgtcacacagaaaaagaaactgccttgtctcccttccgggaattctctctttaagactgttcttacgtctgttgctagattatcgtccaaaagtgttaatgcccaagtgactgacatcaactccaagggattggaattgaggaagactgttactacagttgagactcagaacttggaaggcctgcatcatgatggccaattctgccataagccctgtcctccagatgtgaacatggaatcatcaaggaatgcacactcaccagcaacaccaagtgcaaagaggaaggatccagatctaacttggggtggctttgtcttcttcttttgccaattccactaattgtttgggtgaagagaaaggaagtacagaaaacatgcagaaagcacagaaaggaaaaccaaggttctcatgaatctccaaccttaaatcctgaaacagtggcaataaatttatctgatgttgacttgagtaaatatatcaccactattgctggagtcatgacactaagtcaagttaaaggctttgttcgaaagaatggtgtcaatgaagccaaaatagatgagatcaagaatgacaatgtccaagacacagcagaacagaaagttcaactgcttcgtaattggcatcaacttcatggaaagaaagaagcgtatgacacattgattaaagatctcaaaaaagccaatctttgtactcttgcagagaaaattcagactatcatcctcaaggacattactagtgactcagaaaattcaaacttcagaaatgaaatccaaagcttggtctagagtgaaaaacaacaaattcagttctgagtatatgcaattagtgtttgaaaagattcttaatagctggctgtaaatactgcttggttttttactgggtacattttatcatttattagcgctgaagagccaacatatttgtagatttttaatatctcatgattctgcctccaaggatgtttaaaatctagttgggaaaacaaacttcatcaagagtaaatgcagtggcatgctaagtacccaaataggagtgtatgcagaggatgaaagattaagattatgctctggcatctaacatatgattctgtagtatgaatgtaatcagtgtatgttagtacaaatgtctatccacaggctaaccccactctatgaatcaatagaagaagctatgaccttttgctgaaatatcagttactgaacaggcaggccactttgcctctaaattacctctgataattctagagattttaccatatttctaaactttgtttataactctgagaagatcatatttatgtaaagtatatgtatttgagtgcagaatttaaataaggctctacctcaaagacctttgcacagtttattggtgtcatattatacaatatttcaattgtgaattcacatagaaaacattaaattataatgtttgactattatatatgtgtatgcattttactggctcaaaactacctacttctttctcaggcatcaaaagcattttgagcaggagagtattactagagctttgccacctctccatttttgccttggtgctcatcttaatggcctaatgcacccccaaacatggaaatatcaccaaaaaatacttaatagtccaccaaaaggcaagactgcccttagaaattctagcctggtttggagatactaactgctctcagagaaagtagctttgtgacatgtcatgaacccatgtttgcaatcaaagatgataaaatagattcttatttttcccccacccccgaaaatgttcaataatgtcccatgtaaaacctgctacaaatggcagcttatacatagcaatggtaaaatcatcatctggatttaggaattgctcttgtcatacccccaagtttctaagatttaagattctccttactactatcctacgtttaaatatctttgaaagtttgtattaaatgtgaattttaagaaataatatttatatttctgtaaatgtaaactgtgaagatagttataaactgaagcagatacctggaaccacctaaagaacttccatttatggaggatttttttgccccttgtgtttggaattataaaatataggtaaaagtacgtaattaaataatgtttttggta

SEQ ID NO: 283805 - DNA, 2653 bp, Homo sapiens
agccctccccaacccgggcgttccccagcgaggcttccttcccatcctcctgaccaccggggcttttcgtgagctcgtctctgatctcgcgcaagagtgacacacaggtgttcaaagacgcttctggggagtgagggaagcggtttacgagtgacttggctggagcctcaggggcgggcactggcacggaacacaccctgaggccagccctggctgcccaggcggagctgcctcttctcccgcgggttggtggacccgctcagtacggagttggggaagctctttcacttcggaggattgctcaacaaccatgctgggcatctggaccctcctacctctggttcttacgtctgttgctagattatcgtccaaaagtgttaatgcccaagtgactgacatcaactccaagggattggaattgaggaagactgttactacagttgagactcagaacttggaaggcctgcatcatgatggccaattctgccataagccctgtcctccaggtgaaaggaaagctagggactgcacagtcaatggggatgaaccagactgcgtgccctgccaagaagggaaggagtacacagacaaagcccatttttcttccaaatgcagaagatgtagattgtgtgatgaaggacatggcttagaagtggaaataaactgcacccggacccagaataccaagtgcagatgtaaaccaaactttttttgtaactctactgtatgtgaacactgtgacccttgcaccaaatgtgaacatggaatcatcaaggaatgcacactcaccagcaacaccaagtgcaaagaggaaggatccagatctaacttggggtggctttgtcttcttcttttgccaattccactaattgtttgggtgaagagaaaggaagtacagaaaacatgcagaaagcacagaaaggaaaaccaaggttctcatgaatctccaaccttaaatcctgaaacagtggcaataaatttatctgatgttgacttgagtaaatatatcaccactattgctggagtcatgacactaagtcaagttaaaggctttgttcgaaagaatggtgtcaatgaagccaaaatagatgagatcaagaatgacaatgtccaagacacagcagaacagaaagttcaactgcttcgtaattggcatcaacttcatggaaagaaagaagcgtatgacacattgattaaagatctcaaaaaagccaatctttgtactcttgcagagaaaattcagactatcatcctcaaggacattactagtgactcagaaaattcaaacttcagaaatgaaatccaaagcttggtctagagtgaaaaacaacaaattcagttctgagtatatgcaattagtgtttgaaaagattcttaatagctggctgtaaatactgcttggttttttactgggtacattttatcatttattagcgctgaagagccaacatatttgtagatttttaatatctcatgattctgcctccaaggatgtttaaaatctagttgggaaaacaaacttcatcaagagtaaatgcagtggcatgctaagtacccaaataggagtgtatgcagaggatgaaagattaagattatgctctggcatctaacatatgattctgtagtatgaatgtaatcagtgtatgttagtacaaatgtctatccacaggctaaccccactctatgaatcaatagaagaagctatgaccttttgctgaaatatcagttactgaacaggcaggccactttgcctctaaattacctctgataattctagagattttaccatatttctaaactttgtttataactctgagaagatcatatttatgtaaagtatatgtatttgagtgcagaatttaaataaggctctacctcaaagacctttgcacagtttattggtgtcatattatacaatatttcaattgtgaattcacatagaaaacattaaattataatgtttgactattatatatgtgtatgcattttactggctcaaaactacctacttctttctcaggcatcaaaagcattttgagcaggagagtattactagagctttgccacctctccatttttgccttggtgctcatcttaatggcctaatgcacccccaaacatggaaatatcaccaaaaaatacttaatagtccaccaaaaggcaagactgcccttagaaattctagcctggtttggagatactaactgctctcagagaaagtagctttgtgacatgtcatgaacccatgtttgcaatcaaagatgataaaatagattcttatttttcccccacccccgaaaatgttcaataatgtcccatgtaaaacctgctacaaatggcagcttatacatagcaatggtaaaatcatcatctggatttaggaattgctcttgtcatacccccaagtttctaagatttaagattctccttactactatcctacgtttaaatatctttgaaagtttgtattaaatgtgaattttaagaaataatatttatatttctgtaaatgtaaactgtgaagatagttataaactgaagcagatacctggaaccacctaaagaacttccatttatggaggatttttttgccccttgtgtttggaattataaaatataggtaaaagtacgtaattaaataatgtttttggta

SEQ ID NO: 283806 - DNA, 2590 bp, Homo sapiens
agccctccccaacccgggcgttccccagcgaggcttccttcccatcctcctgaccaccggggcttttcgtgagctcgtctctgatctcgcgcaagagtgacacacaggtgttcaaagacgcttctggggagtgagggaagcggtttacgagtgacttggctggagcctcaggggcgggcactggcacggaacacaccctgaggccagccctggctgcccaggcggagctgcctcttctcccgcgggttggtggacccgctcagtacggagttggggaagctctttcacttcggaggattgctcaacaaccatgctgggcatctggaccctcctacctctggttcttacgtctgttgctagattatcgtccaaaagtgttaatgcccaagtgactgacatcaactccaagggattggaattgaggaagactgttactacagttgagactcagaacttggaaggcctgcatcatgatggccaattctgccataagccctgtcctccaggtgaaaggaaagctagggactgcacagtcaatggggatgaaccagactgcgtgccctgccaagaagggaaggagtacacagacaaagcccatttttcttccaaatgcagaagatgtagattgtgtgatgaaggacatggcttagaagtggaaataaactgcacccggacccagaataccaagtgcagatgtaaaccaaactttttttgtaactctactgtatgtgaacactgtgacccttgcaccaaatgtgaacatggaatcatcaaggaatgcacactcaccagcaacaccaagtgcaaagaggaagtgaagagaaaggaagtacagaaaacatgcagaaagcacagaaaggaaaaccaaggttctcatgaatctccaaccttaaatcctgaaacagtggcaataaatttatctgatgttgacttgagtaaatatatcaccactattgctggagtcatgacactaagtcaagttaaaggctttgttcgaaagaatggtgtcaatgaagccaaaatagatgagatcaagaatgacaatgtccaagacacagcagaacagaaagttcaactgcttcgtaattggcatcaacttcatggaaagaaagaagcgtatgacacattgattaaagatctcaaaaaagccaatctttgtactcttgcagagaaaattcagactatcatcctcaaggacattactagtgactcagaaaattcaaacttcagaaatgaaatccaaagcttggtctagagtgaaaaacaacaaattcagttctgagtatatgcaattagtgtttgaaaagattcttaatagctggctgtaaatactgcttggttttttactgggtacattttatcatttattagcgctgaagagccaacatatttgtagatttttaatatctcatgattctgcctccaaggatgtttaaaatctagttgggaaaacaaacttcatcaagagtaaatgcagtggcatgctaagtacccaaataggagtgtatgcagaggatgaaagattaagattatgctctggcatctaacatatgattctgtagtatgaatgtaatcagtgtatgttagtacaaatgtctatccacaggctaaccccactctatgaatcaatagaagaagctatgaccttttgctgaaatatcagttactgaacaggcaggccactttgcctctaaattacctctgataattctagagattttaccatatttctaaactttgtttataactctgagaagatcatatttatgtaaagtatatgtatttgagtgcagaatttaaataaggctctacctcaaagacctttgcacagtttattggtgtcatattatacaatatttcaattgtgaattcacatagaaaacattaaattataatgtttgactattatatatgtgtatgcattttactggctcaaaactacctacttctttctcaggcatcaaaagcattttgagcaggagagtattactagagctttgccacctctccatttttgccttggtgctcatcttaatggcctaatgcacccccaaacatggaaatatcaccaaaaaatacttaatagtccaccaaaaggcaagactgcccttagaaattctagcctggtttggagatactaactgctctcagagaaagtagctttgtgacatgtcatgaacccatgtttgcaatcaaagatgataaaatagattcttatttttcccccacccccgaaaatgttcaataatgtcccatgtaaaacctgctacaaatggcagcttatacatagcaatggtaaaatcatcatctggatttaggaattgctcttgtcatacccccaagtttctaagatttaagattctccttactactatcctacgtttaaatatctttgaaagtttgtattaaatgtgaattttaagaaataatatttatatttctgtaaatgtaaactgtgaagatagttataaactgaagcagatacctggaaccacctaaagaacttccatttatggaggatttttttgccccttgtgtttggaattataaaatataggtaaaagtacgtaattaaataatgtttttggta

SEQ ID NO: 283807 - DNA, 1908 bp, Homo sapiens
agccctccccaacccgggcgttccccagcgaggcttccttcccatcctcctgaccaccggggcttttcgtgagctcgtctctgatctcgcgcaagagtgacacacaggtgttcaaagacgcttctggggagtgagggaagcggtttacgagtgacttggctggagcctcaggggcgggcactggcacggaacacaccctgaggccagccctggctgcccaggcggagctgcctcttctcccgcgggttggtggacccgctcagtacggagttggggaagctctttcacttcggaggattgctcaacaaccatgctgggcatctggaccctcctacctctggttcttacgtctgttgctagattatcgtccaaaagtgttaatgcccaagtgactgacatcaactccaagggattggaattgaggaagactgttactacagttgagactcagaacttggaaggcctgcatcatgatggccaattctgccataagccctgtcctccaggtgaaaggaaagctagggactgcacagtcaatggggatgaaccagactgcgtgccctgccaagaagggaaggagtacacagacaaagcccatttttcttccaaatgcagaagatgtagattgtgtgatgaaggacatggcttagaagtggaaataaactgcacccggacccagaataccaagtgcagatgtaaaccaaactttttttgtaactctactgtatgtgaacactgtgacccttgcaccaaatgtgaacatggaatcatcaaggaatgcacactcaccagcaacaccaagtgcaaagaggaagtgaagagaaaggaagtacagaaaacatgcagaaagcacagaaaggaaaaccaaggttctcatgaatctccaaccttaaatcctgaaacagtggcaataaatttatctgatgttgacttgagtaaatatatcaccactattgctggagtcatgacactaagtcaagttaaaggctttgttcgaaagaatggtgtcaatgaagccaaaatagatgagatcaagaatgacaatgtccaagacacagcagaacagaaagttcaactgcttcgtaattggcatcaacttcatggaaagaaagaagcgtatgacacattgattaaagatctcaaaaaagccaatctttgtactcttgcagagaaaattcagactatcatcctcaaggacattactagtgactcagaaaattcaaacttcagaaatgaaatccaaagcttggtctagagtgaaaaacaacaaattcagttctgagtatatgcaattagtgtttgaaaagattcttaatagctggctgtaaatactgcttggttttttactgggtacattttatcatttattagcgctgaagagccaacatatttgtagatttttaatatctcatgattctgcctccaaggatgtttaaaatctagttgggaaaacaaacttcatcaagagtaaatgcagtggcatgctaagtacccaaataggagtgtatgcagaggatgaaagattaagattatgctctggcatctaacatatgattctgtagtatgaatgtaatcagtgtatgttagtacaaatgtctatccacaggctaaccccactctatgaatcaatagaagaagctatgaccttttgctgaaatatcagttactgaacaggcaggccactttgcctctaaattacctctgataattctagagattttaccatatttctaaactttgtttataactctgagaagatcatatttatgtaaagtatatgtatttgagtgcagaatttaaataaggctctacctcaaagacctttgcacagtttattggtgtcatattatacaatatttcaattgtgaattcacatagaaaacattaaattataatgtttgactatta

SEQ ID NO: 283808 - DNA, 2481 bp, Homo sapiens
agccctccccaacccgggcgttccccagcgaggcttccttcccatcctcctgaccaccggggcttttcgtgagctcgtctctgatctcgcgcaagagtgacacacaggtgttcaaagacgcttctggggagtgagggaagcggtttacgagtgacttggctggagcctcaggggcgggcactggcacggaacacaccctgaggccagccctggctgcccaggcggagctgcctcttctcccgcgggttggtggacccgctcagtacggagttggggaagctctttcacttcggaggattgctcaacaaccatgctgggcatctggaccctcctacctctggttcttacgtctgttgctagattatcgtccaaaagtgttaatgcccaagtgactgacatcaactccaagggattggaattgaggaagactgttactacagttgagactcagaacttggaaggcctgcatcatgatggccaattctgccataagccctgtcctccaggtgaaaggaaagctagggactgcacagtcaatggggatgaaccagactgcgtgccctgccaagaagggaaggagtacacagacaaagcccatttttcttccaaatgcagaagatgtagattgtgtgatgaaggacatgatgtgaacatggaatcatcaaggaatgcacactcaccagcaacaccaagtgcaaagaggaagtgaagagaaaggaagtacagaaaacatgcagaaagcacagaaaggaaaaccaaggttctcatgaatctccaaccttaaatcctgaaacagtggcaataaatttatctgatgttgacttgagtaaatatatcaccactattgctggagtcatgacactaagtcaagttaaaggctttgttcgaaagaatggtgtcaatgaagccaaaatagatgagatcaagaatgacaatgtccaagacacagcagaacagaaagttcaactgcttcgtaattggcatcaacttcatggaaagaaagaagcgtatgacacattgattaaagatctcaaaaaagccaatctttgtactcttgcagagaaaattcagactatcatcctcaaggacattactagtgactcagaaaattcaaacttcagaaatgaaatccaaagcttggtctagagtgaaaaacaacaaattcagttctgagtatatgcaattagtgtttgaaaagattcttaatagctggctgtaaatactgcttggttttttactgggtacattttatcatttattagcgctgaagagccaacatatttgtagatttttaatatctcatgattctgcctccaaggatgtttaaaatctagttgggaaaacaaacttcatcaagagtaaatgcagtggcatgctaagtacccaaataggagtgtatgcagaggatgaaagattaagattatgctctggcatctaacatatgattctgtagtatgaatgtaatcagtgtatgttagtacaaatgtctatccacaggctaaccccactctatgaatcaatagaagaagctatgaccttttgctgaaatatcagttactgaacaggcaggccactttgcctctaaattacctctgataattctagagattttaccatatttctaaactttgtttataactctgagaagatcatatttatgtaaagtatatgtatttgagtgcagaatttaaataaggctctacctcaaagacctttgcacagtttattggtgtcatattatacaatatttcaattgtgaattcacatagaaaacattaaattataatgtttgactattatatatgtgtatgcattttactggctcaaaactacctacttctttctcaggcatcaaaagcattttgagcaggagagtattactagagctttgccacctctccatttttgccttggtgctcatcttaatggcctaatgcacccccaaacatggaaatatcaccaaaaaatacttaatagtccaccaaaaggcaagactgcccttagaaattctagcctggtttggagatactaactgctctcagagaaagtagctttgtgacatgtcatgaacccatgtttgcaatcaaagatgataaaatagattcttatttttcccccacccccgaaaatgttcaataatgtcccatgtaaaacctgctacaaatggcagcttatacatagcaatggtaaaatcatcatctggatttaggaattgctcttgtcatacccccaagtttctaagatttaagattctccttactactatcctacgtttaaatatctttgaaagtttgtattaaatgtgaattttaagaaataatatttatatttctgtaaatgtaaactgtgaagatagttataaactgaagcagatacctggaaccacctaaagaacttccatttatggaggatttttttgccccttgtgtttggaattataaaatataggtaaaagtacgtaattaaataatgtttttggta

SEQ ID NO: 283809 - DNA, 2628 bp, Homo sapiens
agccctccccaacccgggcgttccccagcgaggcttccttcccatcctcctgaccaccggggcttttcgtgagctcgtctctgatctcgcgcaagagtgacacacaggtgttcaaagacgcttctggggagtgagggaagcggtttacgagtgacttggctggagcctcaggggcgggcactggcacggaacacaccctgaggccagccctggctgcccaggcggagctgcctcttctcccgcgggttggtggacccgctcagtacggagttggggaagctctttcacttcggaggattgctcaacaaccatgctgggcatctggaccctcctacctctggttcttacgtctgttgctagattatcgtccaaaagtgttaatgcccaagtgactgacatcaactccaagggattggaattgaggaagactgttactacagttgagactcagaacttggaaggcctgcatcatgatggccaattctgccataagccctgtcctccaggtgaaaggaaagctagggactgcacagtcaatggggatgaaccagactgcgtgccctgccaagaagggaaggagtacacagacaaagcccatttttcttccaaatgcagaagatgtagattgtgtgatgaaggacatggcttagaagtggaaataaactgcacccggacccagaataccaagtgcagatgtaaaccaaactttttttgtaactctactgtatgtgaacactgtgacccttgcaccaaatgtgaacatggaatcatcaaggaatgcacactcaccagcaacaccaagtgcaaagaggaaggatccagatctaacttggggtggctttgtcttcttcttttgccaattccactaattgtttgggtgaagagaaaggaagtacagaaaacatgcagaaagcacagaaaggaaaaccaaggttctcatgaatctccaaccttaaatcctatgttgacttgagtaaatatatcaccactattgctggagtcatgacactaagtcaagttaaaggctttgttcgaaagaatggtgtcaatgaagccaaaatagatgagatcaagaatgacaatgtccaagacacagcagaacagaaagttcaactgcttcgtaattggcatcaacttcatggaaagaaagaagcgtatgacacattgattaaagatctcaaaaaagccaatctttgtactcttgcagagaaaattcagactatcatcctcaaggacattactagtgactcagaaaattcaaacttcagaaatgaaatccaaagcttggtctagagtgaaaaacaacaaattcagttctgagtatatgcaattagtgtttgaaaagattcttaatagctggctgtaaatactgcttggttttttactgggtacattttatcatttattagcgctgaagagccaacatatttgtagatttttaatatctcatgattctgcctccaaggatgtttaaaatctagttgggaaaacaaacttcatcaagagtaaatgcagtggcatgctaagtacccaaataggagtgtatgcagaggatgaaagattaagattatgctctggcatctaacatatgattctgtagtatgaatgtaatcagtgtatgttagtacaaatgtctatccacaggctaaccccactctatgaatcaatagaagaagctatgaccttttgctgaaatatcagttactgaacaggcaggccactttgcctctaaattacctctgataattctagagattttaccatatttctaaactttgtttataactctgagaagatcatatttatgtaaagtatatgtatttgagtgcagaatttaaataaggctctacctcaaagacctttgcacagtttattggtgtcatattatacaatatttcaattgtgaattcacatagaaaacattaaattataatgtttgactattatatatgtgtatgcattttactggctcaaaactacctacttctttctcaggcatcaaaagcattttgagcaggagagtattactagagctttgccacctctccatttttgccttggtgctcatcttaatggcctaatgcacccccaaacatggaaatatcaccaaaaaatacttaatagtccaccaaaaggcaagactgcccttagaaattctagcctggtttggagatactaactgctctcagagaaagtagctttgtgacatgtcatgaacccatgtttgcaatcaaagatgataaaatagattcttatttttcccccacccccgaaaatgttcaataatgtcccatgtaaaacctgctacaaatggcagcttatacatagcaatggtaaaatcatcatctggatttaggaattgctcttgtcatacccccaagtttctaagatttaagattctccttactactatcctacgtttaaatatctttgaaagtttgtattaaatgtgaattttaagaaataatatttatatttctgtaaatgtaaactgtgaagatagttataaactgaagcagatacctggaaccacctaaagaacttccatttatggaggatttttttgccccttgtgtttggaattataaaatataggtaaaagtacgtaattaaataatgtttttggta

SEQ ID NO: 283810 - DNA, 2514 bp, Homo sapiens
acgcgggcacctgggagcggcgggctgctgcgggaggcgttggagactggctcccgggggctgttaggaccttccctcaggcccgggtgctcagaacgctggaggacttgcttttcttgggccttgatgcgaagtgctgaccccgctgggcaggcggggcagctccggcgctcctcggagaccactgcgctccacgttgaggttcttacgtctgttgctagattatcgtccaaaagtgttaatgcccaagtgactgacatcaactccaagggattggaattgaggaagactgttactacagttgagactcagaacttggaaggcctgcatcatgatggccaattctgccataagccctgtcctccaggtgaaaggaaagctagggactgcacagtcaatggggatgaaccagactgcgtgccctgccaagaagggaaggagtacacagacaaagcccatttttcttccaaatgcagaagatgtagattgtgtgatgaaggacatggcttagaagtggaaataaactgcacccggacccagaataccaagtgcagatgtaaaccaaactttttttgtaactctactgtatgtgaacactgtgacccttgcaccaaatgtgaacatggaatcatcaaggaatgcacactcaccagcaacaccaagtgcaaagaggaaggatccagatctaacttggggtggctttgtcttcttcttttgccaattccactaattgtttgggtgaagagaaaggaagtacagaaaacatgcagaaagcacagaaaggaaaaccaaggttctcatgaatctccaaccttaaatcctgaaacagtggcaataaatttatctgatgttgacttgagtaaatatatcaccactattgctggagtcatgacactaagtcaagttaaaggctttgttcgaaagaatggtgtcaatgaagccaaaatagatgagatcaagaatgacaatgtccaagacacagcagaacagaaagttcaactgcttcgtaattggcatcaacttcatggaaagaaagaagcgtatgacacattgattaaagatctcaaaaaagccaatctttgtactcttgcagagaaaattcagactatcatcctcaaggacattactagtgactcagaaaattcaaacttcagaaatgaaatccaaagcttggtctagagtgaaaaacaacaaattcagttctgagtatatgcaattagtgtttgaaaagattcttaatagctggctgtaaatactgcttggttttttactgggtacattttatcatttattagcgctgaagagccaacatatttgtagatttttaatatctcatgattctgcctccaaggatgtttaaaatctagttgggaaaacaaacttcatcaagagtaaatgcagtggcatgctaagtacccaaataggagtgtatgcagaggatgaaagattaagattatgctctggcatctaacatatgattctgtagtatgaatgtaatcagtgtatgttagtacaaatgtctatccacaggctaaccccactctatgaatcaatagaagaagctatgaccttttgctgaaatatcagttactgaacaggcaggccactttgcctctaaattacctctgataattctagagattttaccatatttctaaactttgtttataactctgagaagatcatatttatgtaaagtatatgtatttgagtgcagaatttaaataaggctctacctcaaagacctttgcacagtttattggtgtcatattatacaatatttcaattgtgaattcacatagaaaacattaaattataatgtttgactattatatatgtgtatgcattttactggctcaaaactacctacttctttctcaggcatcaaaagcattttgagcaggagagtattactagagctttgccacctctccatttttgccttggtgctcatcttaatggcctaatgcacccccaaacatggaaatatcaccaaaaaatacttaatagtccaccaaaaggcaagactgcccttagaaattctagcctggtttggagatactaactgctctcagagaaagtagctttgtgacatgtcatgaacccatgtttgcaatcaaagatgataaaatagattcttatttttcccccacccccgaaaatgttcaataatgtcccatgtaaaacctgctacaaatggcagcttatacatagcaatggtaaaatcatcatctggatttaggaattgctcttgtcatacccccaagtttctaagatttaagattctccttactactatcctacgtttaaatatctttgaaagtttgtattaaatgtgaattttaagaaataatatttatatttctgtaaatgtaaactgtgaagatagttataaactgaagcagatacctggaaccacctaaagaacttccatttatggaggatttttttgccccttgtgtttggaattataaaatataggtaaaagtacgtaattaaataatgtttttggta

SEQ ID NO: 283811 - DNA, 902 bp, Homo sapiens
agcggaaagggcacgtgagcgaggcgcccgaagccgtcgcggcggggaccatgttgcttccgaacatcctgctcaccggtacaccaggggttggaaaaaccacactaggcaaagaacttgcgtcaaaatcaggactgaaatacattaatgtgggtgatttagctcgagaagagcaattgtatgatggctatgatgaagagtatgactgtcccattttagatgaagacagagtagttgatgagttagataaccaaatgagagaaggtggagttattgttgattaccatggttgtgatttcttccctgaacgctggtttcatatagtttttgtgctgagaacagataccaatgtattgtacgaaagacttgaaacaaggggttataatgagaagaaactaacagacaatattcagtgtgagatttttcaagttctttatgaagaagccacagcatcctacaaggaagaaatcgtgcatcagctgcccagtaataaaccagaagagctagaaaataatgtagatcagatcttgaaatggattgagcagtggatcaaagatcataactcttgacttataaggctagctacttaataatcactcttgttgatatctctgccgacatcatagaaattgttcaagtgtcagtaacactttattaaaatcatgttgcagaaccagcaggtggatagtatataggtttatgcctgtgtttctttttctccatgagaaagctaaacatgaaatataatgaatatagtattattaaggattgagacaaaaactgtgattttaatacttaaattgctaaagaataaataaatctgacaaaatgggtggatatcttttaagtttattacagaaaaaaatgcagatgatctcttaaaataaaactaaagataaagc

SEQ ID NO: 283812 - DNA, 596 bp, Homo sapiens
ttaatacccaatgaaaaaagttgaggtgtcttagacagattccaattgtatggtcgaaagctttgaacaggggttataatgagaagaaactaacagacaatattcagtgtgagatttttcaagttctttatgaagaagccacagcatcctacaaggaagaaatcgtgcatcagctgcccagtaataaaccagaagagctagaaaataatgtagatcagatcttgaaatggattgagcagtggatcaaagatcataactcttgacttataaggctagctacttaataatcactcttgttgatatctctgccgacatcatagaaattgttcaagtgtcagtaacactttattaaaatcatgttgcagaaccagcaggtggatagtatataggtttatgcctgtgtttctttttctccatgagaaagctaaacatgaaatataatgaatatagtattattaaggattgagacaaaaactgtgattttaatacttaaattgctaaagaataaataaatctgacaaaatgggtggatatcttttaagtttattacagaaaaaaatgcagatgatctcttaaaataaaactaaagataaagc

SEQ ID NO: 283813 - DNA, 1562 bp, Homo sapiens
agcggaaagggcacgtgagcgaggcgcccgaagccgtcgcggcggggaccatgttgcttccgaacatcctgctcaccggtacaccaggggttggaaaaaccacactaggcaaagaacttgcgtcaaaatcaggactgaaatacattaatgtgggtgatttagctcgagaagagcaattgtatgatggctatgatgaagagtatgactgtcccattttagatgaagacagagtagttgatgagttagataaccaaatgagagaaggtggagttattgttgattaccatggttgtgatttcttccctgaacgctggtttcatatagtttttgtgctgagaacagataccaatgtattgtacgaaagacttgaaacaaggggttataatgagaagaaactaacagacaatattcagtgtgagatttttcaagttctttatgaagaagccacagcatcctacaaggaagaaatcgtgcatcagctgcccagtaataaaccagaagagctagaaaataatgtagatcagatcttgaaatggattgagcagtggatcaaagatcataactcttgacttataaggctagctacttaataatcactcttgttgatatctctgccgacatcatagaaattgttcaagtgtcagtaacactttattaaaatcatgttgcagaaccagcaggtggatagtatataggtttatgcctgtgtttctttttctccatgagaaagctaaacatgaaatataatgaatatagtattattaaggattgagacaaaaactgtgattttaatacttaaattgctaaagaataaataaatctgacaaaatgggtggatatcttttaagtttattacagaaaaaaatgcagatgatctcttaaaataaaactaaagataaagcaaacagagtattccttttttctttctttaaattagaaaaaaagttaagtgttgtactcgatacaaagttcaaaaggtacaaaagagcatgttgaaaagttaggtctcccttccagaccaccctatccccaggcaccccaggttccttccctttaggaaataatgttactggtttcctatatgtctttttagaggttttatgcctgcacagtgtatatgtacatgtgtacattttttaaagaatataacagtatattatgcacactattctgtacctttcttttttcacttactatatttgaagattatatcatctcagtacagacctccctgttcttttttttagttgagatagatatacatatcataccctgttctcactaggaattttccacctcgagtatttatgcatgctgttctctttataggtttccttatcttccttacaactccttggaggcccaactccaatgtcatatctttggctgtctaacttcactatgcagaattaattgcccttttcttttcgcataaaaagccaggtattttaaaggcacccaatcactctaaaccagttaatttcttgttctaattgctttagagttatcagcttcttgttgagttgaggtaaatgtggtgaatatgttttcaaaagaagaaa

SEQ ID NO: 283814 - DNA, 1565 bp, Homo sapiens
tattggctaggtgggcggtgtgaatcggccgagggagcgtcgcggcggggaccatgttgcttccgaacatcctgctcaccggtacaccaggggttggaaaaaccacactaggcaaagaacttgcgtcaaaatcaggactgaaatacattaatgtgggtgatttagctcgagaagagcaattgtatgatggctatgatgaagagtatgactgtcccattttagatgaagacagagtagttgatgagttagataaccaaatgagagaaggtggagttattgttgattaccatggttgtgatttcttccctgaacgctggtttcatatagtttttgtgctgagaacagataccaatgtattgtacgaaagacttgaaacaaggggttataatgagaagaaactaacagacaatattcagtgtgagatttttcaagttctttatgaagaagccacagcatcctacaaggaagaaatcgtgcatcagctgcccagtaataaaccagaagagctagaaaataatgtagatcagatcttgaaatggattgagcagtggatcaaagatcataactcttgacttataaggctagctacttaataatcactcttgttgatatctctgccgacatcatagaaattgttcaagtgtcagtaacactttattaaaatcatgttgcagaaccagcaggtggatagtatataggtttatgcctgtgtttctttttctccatgagaaagctaaacatgaaatataatgaatatagtattattaaggattgagacaaaaactgtgattttaatacttaaattgctaaagaataaataaatctgacaaaatgggtggatatcttttaagtttattacagaaaaaaatgcagatgatctcttaaaataaaactaaagataaagcaaacagagtattccttttttctttctttaaattagaaaaaaagttaagtgttgtactcgatacaaagttcaaaaggtacaaaagagcatgttgaaaagttaggtctcccttccagaccaccctatccccaggcaccccaggttccttccctttaggaaataatgttactggtttcctatatgtctttttagaggttttatgcctgcacagtgtatatgtacatgtgtacattttttaaagaatataacagtatattatgcacactattctgtacctttcttttttcacttactatatttgaagattatatcatctcagtacagacctccctgttcttttttttagttgagatagatatacatatcataccctgttctcactaggaattttccacctcgagtatttatgcatgctgttctctttataggtttccttatcttccttacaactccttggaggcccaactccaatgtcatatctttggctgtctaacttcactatgcagaattaattgcccttttcttttcgcataaaaagccaggtattttaaaggcacccaatcactctaaaccagttaatttcttgttctaattgctttagagttatcagcttcttgttgagttgaggtaaatgtggtgaatatgttttcaaaagaagaaa

SEQ ID NO: 283815 - DNA, 1268 bp, Homo sapiens
ttaggctaggtacgaggcctggggtgtgagtttttgtgctgagaacagataccaatgtattgtacgaaagacttgaaacaaggggttataatgagaagaaactaacagacaatattcagtgtgagatttttcaagttctttatgaagaagccacagcatcctacaaggaagaaatcgtgcatcagctgcccagtaataaaccagaagagctagaaaataatgtagatcagatcttgaaatggattgagcagtggatcaaagatcataactcttgacttataaggctagctacttaataatcactcttgttgatatctctgccgacatcatagaaattgttcaagtgtcagtaacactttattaaaatcatgttgcagaaccagcaggtggatagtatataggtttatgcctgtgtttctttttctccatgagaaagctaaacatgaaatataatgaatatagtattattaaggattgagacaaaaactgtgattttaatacttaaattgctaaagaataaataaatctgacaaaatgggtggatatcttttaagtttattacagaaaaaaatgcagatgatctcttaaaataaaactaaagataaagcaaacagagtattccttttttctttctttaaattagaaaaaaagttaagtgttgtactcgatacaaagttcaaaaggtacaaaagagcatgttgaaaagttaggtctcccttccagaccaccctatccccaggcaccccaggttccttccctttaggaaataatgttactggtttcctatatgtctttttagaggttttatgcctgcacagtgtatatgtacatgtgtacattttttaaagaatataacagtatattatgcacactattctgtacctttcttttttcacttactatatttgaagattatatcatctcagtacagacctccctgttcttttttttagttgagatagatatacatatcataccctgttctcactaggaattttccacctcgagtatttatgcatgctgttctctttataggtttccttatcttccttacaactccttggaggcccaactccaatgtcatatctttggctgtctaacttcactatgcagaattaattgcccttttcttttcgcataaaaagccaggtattttaaaggcacccaatcactctaaaccagttaatttcttgttctaattgctttagagttatcagcttcttgttgagttgaggtaaatgtggtgaatatgttttcaaaagaagaaa

SEQ ID NO: 283816 - DNA, 1503 bp, Homo sapiens
agcggaaagggcacgtgagcgaggcgcccgaagccgtcgcggcggggaccatgttgcttccgaacatcctgctcaccggtacaccaggggttggaaaaaccacactaggcaaagaacttgcgtcaaaatcaggactgaaatacattaatgtgggtgatttagctcgagaagagcaattgtatgatggctatgatgaagagtatgactgtcccattttagatgaagacagagtagttgatgagttagataaccaaatgagagaaggtggagttattgttgattaccatggttgtgatttcttccctgaacgctggtttcatatagtttttgtgctgagaacagataccaatgtattgtacgaaagacttgaaacaaggggttataatgagaagaaactaacagacaatattcagtgtgagatttttcaagttctttatgaagaagccacagcatcctacaaggaagaaatcgtgcatcagctgcccagtaataaaccagaagagctagaaaataatgtagatcagatcttgaaatggattgagcagtggatcaaagatcataactcttgacttataaggctagctacttaataatcactcttgttgatatctctgccgacatcatagaaattgttcaagtgtcagtaacactttattaaatccatgagaaagctaaacatgaaatataatgaatatagtattattaaggattgagacaaaaactgtgattttaatacttaaattgctaaagaataaataaatctgacaaaatgggtggatatcttttaagtttattacagaaaaaaatgcagatgatctcttaaaataaaactaaagataaagcaaacagagtattccttttttctttctttaaattagaaaaaaagttaagtgttgtactcgatacaaagttcaaaaggtacaaaagagcatgttgaaaagttaggtctcccttccagaccaccctatccccaggcaccccaggttccttccctttaggaaataatgttactggtttcctatatgtctttttagaggttttatgcctgcacagtgtatatgtacatgtgtacattttttaaagaatataacagtatattatgcacactattctgtacctttcttttttcacttactatatttgaagattatatcatctcagtacagacctccctgttcttttttttagttgagatagatatacatatcataccctgttctcactaggaattttccacctcgagtatttatgcatgctgttctctttataggtttccttatcttccttacaactccttggaggcccaactccaatgtcatatctttggctgtctaacttcactatgcagaattaattgcccttttcttttcgcataaaaagccaggtattttaaaggcacccaatcactctaaaccagttaatttcttgttctaattgctttagagttatcagcttcttgttgagttgaggtaaatgtggtgaatatgttttcaaaagaagaaa

SEQ ID NO: 283817 - DNA, 843 bp, Homo sapiens
agcggaaagggcacgtgagcgaggcgcccgaagccgtcgcggcggggaccatgttgcttccgaacatcctgctcaccggtacaccaggggttggaaaaaccacactaggcaaagaacttgcgtcaaaatcaggactgaaatacattaatgtgggtgatttagctcgagaagagcaattgtatgatggctatgatgaagagtatgactgtcccattttagatgaagacagagtagttgatgagttagataaccaaatgagagaaggtggagttattgttgattaccatggttgtgatttcttccctgaacgctggtttcatatagtttttgtgctgagaacagataccaatgtattgtacgaaagacttgaaacaaggggttataatgagaagaaactaacagacaatattcagtgtgagatttttcaagttctttatgaagaagccacagcatcctacaaggaagaaatcgtgcatcagctgcccagtaataaaccagaagagctagaaaataatgtagatcagatcttgaaatggattgagcagtggatcaaagatcataactcttgacttataaggctagctacttaataatcactcttgttgatatctctgccgacatcatagaaattgttcaagtgtcagtaacactttattaaatccatgagaaagctaaacatgaaatataatgaatatagtattattaaggattgagacaaaaactgtgattttaatacttaaattgctaaagaataaataaatctgacaaaatgggtggatatcttttaagtttattacagaaaaaaatgcagatgatctcttaaaataaaactaaagataaagc

SEQ ID NO: 283818 - DNA, 1179 bp, Homo sapiens
taagtcttttttattgatgacaaaatgccaggcacaacccgatggggccaagtcaccatcatttgatctgggtgaacactttctcaagggaccaggatcctccctgccgaaccagaagagctagaaaataatgtagatcagatcttgaaatggattgagcagtggatcaaagatcataactcttgacttataaggctagctacttaataatcactcttgttgatatctctgccgacatcatagaaattgttcaagtgtcagtaacactttattaaaatcatgttgcagaaccagcaggtggatagtatataggtttatgcctgtgtttctttttctccatgagaaagctaaacatgaaatataatgaatatagtattattaaggattgagacaaaaactgtgattttaatacttaaattgctaaagaataaataaatctgacaaaatgggtggatatcttttaagtttattacagaaaaaaatgcagatgatctcttaaaataaaactaaagataaagcaaacagagtattccttttttctttctttaaattagaaaaaaagttaagtgttgtactcgatacaaagttcaaaaggtacaaaagagcatgttgaaaagttaggtctcccttccagaccaccctatccccaggcaccccaggttccttccctttaggaaataatgttactggtttcctatatgtctttttagaggttttatgcctgcacagtgtatatgtacatgtgtacattttttaaagaatataacagtatattatgcacactattctgtacctttcttttttcacttactatatttgaagattatatcatctcagtacagacctccctgttcttttttttagttgagatagatatacatatcataccctgttctcactaggaattttccacctcgagtatttatgcatgctgttctctttataggtttccttatcttccttacaactccttggaggcccaactccaatgtcatatctttggctgtctaacttcactatgcagaattaattgcccttttcttttcgcataaaaagccaggtattttaaaggcacccaatcactctaaaccagttaatttcttgttctaattgctttagagttatcagcttcttgttgagttgaggtaaatgtggtgaatatgttttcaaaagaagaaa

SEQ ID NO: 283819 - DNA, 859 bp, Homo sapiens
agcggaaagggcacgtgagcgaggcgcccgaagccgtcgcggcggggaccatgttgcttccgaacatcctgctcaccggtacaccaggggttggaaaaaccacactaggcaaagaacttgcgtcaaaatcaggactgaaatacattaatgtgggtgatttagctcgagaagagcaattgtatgatggctatgatgaagagtatgactgtcccattttagatgaagacagagtagttgatgagttagataaccaaatgagagaaggtggagttattgttgattaccatggttgtgatttcttccctgaacgctggtttcatatagtttttgtgctgagaacagataccaatgtattgtacgaaagacttgaaacaagatttttcaagttctttatgaagaagccacagcatcctacaaggaagaaatcgtgcatcagctgcccagtaataaaccagaagagctagaaaataatgtagatcagatcttgaaatggattgagcagtggatcaaagatcataactcttgacttataaggctagctacttaataatcactcttgttgatatctctgccgacatcatagaaattgttcaagtgtcagtaacactttattaaaatcatgttgcagaaccagcaggtggatagtatataggtttatgcctgtgtttctttttctccatgagaaagctaaacatgaaatataatgaatatagtattattaaggattgagacaaaaactgtgattttaatacttaaattgctaaagaataaataaatctgacaaaatgggtggatatcttttaagtttattacagaaaaaaatgcagatgatctcttaaaataaaactaaagataaagc

SEQ ID NO: 283820 - DNA, 629 bp, Homo sapiens
gttgtactcgatacaaagttcaaaaggtacaaaagagcatgttgaaaagttaggtctcccttccagaccaccctatccccaggcaccccaggttccttccctttaggaaataatgttactggtttcctatatgtctttttagaggttttatgcctgcacagtgtatatgtacatgtgtacattttttaaagaatataacagtatattatgcacactattctgtacctttcttttttcacttactatatttgaagattatatcatctcagtacagacctccctgttcttttttttagttgagatagatatacatatcatacaataaaatttaccattttgaagtgtataatcagaaccgggtatggtggcttatgcctgtaatcccagcaaatggggaggctgaggtggagaatcgcttgaggcaggagttcaagaccagcctgggcaacatagtgagaccttagactctaaaaataaacataaataaaatttataatccgttggtttttagcttattaacaaggttatgtaactgtcaccactgtggaggaagcagtgatgataaagggaactcctataccctttagcagtcactctctattctttcctcctcatccccttgcagtcac

SEQ ID NO: 283821 - DNA, 869 bp, Homo sapiens
tattggctaggtgggcggtgtgaatcggccgagggagcgtcgcggcggggaccatgttgcttccgaacatcctgctcaccggtacaccaggggttggaaaaaccacactaggcaaagaacttgcgtcaaaatcaggactgaaatacattaatgtgggtgatttagctcgagaagagcaattgtatgatggctatgatgaagagtatgactgtcccattttagatgaagacagagtagttgatgagttagataaccaaatgagagaaggtggagttattgttgattaccatggttgtgatttcttccctgaacgctggtttcatatagtttttgtgctgagaacagataccaatgtattgtacgaaagacttgaaacaaggggttataatgagaagaaactaacagacaatattcagtgtgagatttttcaagttctttatgaagaagccacagcatcctacaaggaagaaatcgtgcatcagctgcccagtaataaaccagaagagctagaaaataatgtagatcagatcttgaaatggattgagcagtggatcaaagatcataactcttgacttataaggctagctacttaataatcactcttgttgatatctctgccgacatcatagaaattgttcaagtgtcagtaacactttattaaaatcatgttgcagaaccagcaggtggatagtatataggtttatgcctgtgtttctttttcgtaacatgattatgattgtttagggggccaacgggtttaacttaatggagaaatattgcaaggggttttggtttcgaaaggggtttataagtcaaaaaaaaaatggggggcaataaaggggagaaggtgacgaagggcaaaggaagtg

SEQ ID NO: 283822 - DNA, 1508 bp, Homo sapiens
agcggaaagggcacgtgagcgaggcgcccgaagccgtcgcggcggggaccatgttgcttccgaacatcctgctcaccggtacaccaggggttggaaaaaccacactaggcaaagaacttgcgtcgtatgatggctatgatgaagagtatgactgtcccattttagatgaagacagagtagttgatgagttagataaccaaatgagagaaggtggagttattgttgattaccatggttgtgatttcttccctgaacgctggtttcatatagtttttgtgctgagaacagataccaatgtattgtacgaaagacttgaaacaaggggttataatgagaagaaactaacagacaatattcagtgtgagatttttcaagttctttatgaagaagccacagcatcctacaaggaagaaatcgtgcatcagctgcccagtaataaaccagaagagctagaaaataatgtagatcagatcttgaaatggattgagcagtggatcaaagatcataactcttgacttataaggctagctacttaataatcactcttgttgatatctctgccgacatcatagaaattgttcaagtgtcagtaacactttattaaaatcatgttgcagaaccagcaggtggatagtatataggtttatgcctgtgtttctttttctccatgagaaagctaaacatgaaatataatgaatatagtattattaaggattgagacaaaaactgtgattttaatacttaaattgctaaagaataaataaatctgacaaaatgggtggatatcttttaagtttattacagaaaaaaatgcagatgatctcttaaaataaaactaaagataaagcaaacagagtattccttttttctttctttaaattagaaaaaaagttaagtgttgtactcgatacaaagttcaaaaggtacaaaagagcatgttgaaaagttaggtctcccttccagaccaccctatccccaggcaccccaggttccttccctttaggaaataatgttactggtttcctatatgtctttttagaggttttatgcctgcacagtgtatatgtacatgtgtacattttttaaagaatataacagtatattatgcacactattctgtacctttcttttttcacttactatatttgaagattatatcatctcagtacagacctccctgttcttttttttagttgagatagatatacatatcataccctgttctcactaggaattttccacctcgagtatttatgcatgctgttctctttataggtttccttatcttccttacaactccttggaggcccaactccaatgtcatatctttggctgtctaacttcactatgcagaattaattgcccttttcttttcgcataaaaagccaggtattttaaaggcacccaatcactctaaaccagttaatttcttgttctaattgctttagagttatcagcttcttgttgagttgaggtaaatgtggtgaatatgttttcaaaagaagaaa

SEQ ID NO: 283823 - DNA, 857 bp, Homo sapiens
agcggaaagggcacgtgagcgaggcgcccgaagccgtcgcggcggggaccatgttgcttccgaacatcctgctcaccggtacaccaggggttggaaaaaccacactaggcaaagaacttgcgtcaaaatcaggactgaaatacattaatgtgggtgatttagctcgagaagagcaattgtatgatggctatgatgaagagtatgactgtcccattttagatgaagacagagtagttgatgagttagataaccaaatgagagaaggtggagttattgtagtttttgtgctgagaacagataccaatgtattgtacgaaagacttgaaacaaggggttataatgagaagaaactaacagacaatattcagtgtgagatttttcaagttctttatgaagaagccacagcatcctacaaggaagaaatcgtgcatcagctgcccagtaataaaccagaagagctagaaaataatgtagatcagatcttgaaatggattgagcagtggatcaaagatcataactcttgacttataaggctagctacttaataatcactcttgttgatatctctgccgacatcatagaaattgttcaagtgtcagtaacactttattaaaatcatgttgcagaaccagcaggtggatagtatataggtttatgcctgtgtttctttttctccatgagaaagctaaacatgaaatataatgaatatagtattattaaggattgagacaaaaactgtgattttaatacttaaattgctaaagaataaataaatctgacaaaatgggtggatatcttttaagtttattacagaaaaaaatgcagatgatctcttaaaataaaactaaagataaagc

SEQ ID NO: 283824 - DNA, 283 bp, Homo sapiens
cccaccctcaccaaggtgagcaagtagcatttttcatattgtatgtttccttttcttctatacattgaaaaactgctttaaatagcaccaggtttcgtaaatgaccaggcacttgggacattttcattattaaaacctgttcttggtcactttctgctgaagaactggaatgaggctgtaagctttactgtcatggaacctgggagcagggcctacagcacagctgctgcctctgggctccggtgccaactttgaaagctcctccactggtcgtgacgtgggg

SEQ ID NO: 283825 - DNA, 368 bp, Homo sapiens
  misc_feature (166)..(166): n is a, c, g, or t
  misc_feature (322)..(322): n is a, c, g, or t
  misc_feature (339)..(339): n is a, c, g, or t
  misc_feature (356)..(356): n is a, c, g, or t
aattctaaagaattgaagaagttatatcccttaagatagttgtcccttgcatttttattacattgaggccaatttcttattcagaatgtcagtaagtacaaaatacagaatttttacttttgaaggtaagattatctttcggccgggattacaggcgtgacactgncgcccagcctaaattggtattataagtaaaaatatatcccattgcaaaacaagtctacaaatgatgggaaattaattagtatttacccaaccatttaggcatatacataaccggtattactttaccaaattgtcttcattaaacccccaaaggggnaccaatatggatacccncacctatctgttagggnttaaacttgggg

SEQ ID NO: 283826 - DNA, 476 bp, Homo sapiens
gtgaagacagggagctcaagtgacctcctccagggtatatagctgtggtgtgggaagcatcatgagaacacggtctttgatggggataattactctgaatctaccaggctgattaagccacagcagatcagcaggtgagaattcaactgtccagatagaaaggtggacatggaaaaattgggctttgcaaatggtcacccaattcttgccttcctggtctccagatcacccttcctataccgccactctggagaaagaagtacagaacgctaacaaggatggcttggagttgcagtggtcacctcagatcttaaggtcactttggagatggaacccctgtgactaggaatggcagaagagaaaggtagaaagagattgagtcctggggatgtggcagagccaccatcctagccccgtactgcgtacttctggacttcctttaaattgagagaaacatgttcctaccatatttaaaa

SEQ ID NO: 283827 - DNA, 1908 bp, Homo sapiens
ggccttgcctgtcactttttccagaggcgagggtcgcggaggggacagcgtcagggccgctggggtgtggacggcgggcgaggcgcaaactttactaggagtttttggcacttggaggcagagcctgttgggcggcacagcacgcccgctgggaaacgcaggggagcggcctgcttcgctgaaaacccgaccaggacctaacgggccgcgggacagaaacctccgagaccatggtacacagcaactaccgcaactcgctcctcagcccctgactcttcgtccccgccccacagagcagtataagtagggcccgaaacagaactggcaaccgcagtagccaatctacttgccaacatcactttgacagcccaatcacgatgaagaggaggcggggagaccgtgagtaatgccccccggactcttactactagaaacccaagtcctccgggaggcggaaggaaggggagggccgggcacgggcggaagtggcggcgcatgcgcactggcaccctctcggtgtcctttgagctgcggccgcagagtgcgcgggagacctacccattccgcggccggaccaccactcccagcagcctaggcggctcccgcgcctgcgccatccgtcaccgccctccctttgtgtcgtctcccggtactcagtttggaacggcttggagacaaaggggcctgagagggaagctgcttcctagtgccgagccccagaagaggtggataggcccgaggggcgccttccctaggccttatctcttcccgccctgtgtcatggacaccgttctcggaggccgctccccacacttggaaaggccgcccacagtatgcagacacccggtcggcggcgtcctgaggccattcagctcccggaaccgccctcccccgcgtcgcccctctaccctcccaaagctcccggattttgggctttctgagaagcctggacgccacgcgagcccgttgcctaggcgaccggccccgcgcgccggcccccccccttccggccaaagggcccgcccctcctgggcgtggcctcgtgcctttgtgcacttcccgcctggctctctggttccggggcggcctcggcttcggcctccgccccgctgcggccgccgcgggtcccctccggggtggccccgagagctgtgttcgccacgcttggctgcctgcttttctctgattttcttccgccttggaccctgctctatttgcattgtctttttttcagcaagtcggagaacggtgccttgtcagttttcacctttctcactggactttctcttttccggagagccgggttggtggtgctgcctgtgtattccacgaactaagccctgtccccagcccttgcagtgtttctgtatcaactccacgccagcgcggttctccatttttcttagcctcttaattaggacagggtcggatttcagcttttatccaccgggtttatcctgttgcaaagcagagtacacagttttagacacaaaataattgcagttgaaatggatacacattctggtggtaagatttggaaacgtggtatttgatggaaccctgttgtaacatctaaaactctttggattttttaaaaacgtattctgtgtaatccagtaaaaatttggattcgtccagtatttatagagtagattattaaccgcagtggtgctcattccagggccctgccgggtattttgtgctatggatgtgagtacggcaaagagactgaattaagctgttttgtatttggaatcggattgttcacgttgcaacgttgctgcaatgataaatggatggatactctttacactttgaagtggatttaatcttcacttttaagccccttcatctcacctacacagcaggagagctttggctttgatatttggggaaatggctgttatt

SEQ ID NO: 283828 - DNA, 906 bp, Homo sapiens
tcttggagataagccttgtaaaaagctacaggccagggagaatttcagggtcagattcaggagttccttaaatgagtttggttttcctcctgtctttcacatacataggggatgaaataatacccaggtcatcaaagtctgtgaaaccaactgcaacaggacctctgattcttcccactcagagacccacaagtgccactctgtttttggacaacggtcaacaagcttcaccgccaagtgcctgatttgtcaaatgagagctttgtcgtttcttcagatgctgaccagtatctgaattcagtatctctgaattacaggagaggagaaaatagatgaaatactgctgtcagtaccacggttgctggctcttgtttagcttctgagtcagctggggcacccctgccatctgctctcagtgtggggctgggtgtccctgcaccgtggaacaagggcaggtcctgtcttcccggaaggcccagcacgggtgaagatttgggggcagatttataccaacatacactggtctatacattggatatgtgcaggttcccattcgtttcctggggagccatgtgtccctgaggccagagagtctcctcacccagctcagactgaatgcttttgtttttgtttcagggcatttgcacgccaaaggcaaagaagaaaaaatgtccaaatcattaaagaactacattactattaaggtaacgtgctttttgtattgtatctctgaggtgccgatagcttgtggaacccatcttaaaggcttctgtgtcatttgagaaccacggaatcccattcccagtgccctctggcccctttcttatgacgagacctgcctcacctccctcccactttaagtggctctccgcctaatcgcgccctcagctgtgcgcctcccgcagg

SEQ ID NO: 283829 - DNA, 1186 bp, Homo sapiens
cttcatgaaagtaaatagatgaggctgattgccccgaagtcacttcctcgttgacttcgttcagggctcagttcagcgctccctgaactgtctgaggagctggagttgctccctccgcaggcacgtttctgtctgcaggtttatcctgttcagtaggtcagggtttgttactgacaaccatgacctgctgtgagcccttctgcgagtgtggagctggggggcaagaagggcagccttagctgtgccaacgcttcgtcctgtcagggcatttgcacgccaaaggcaaagaagaaaaaatgtccaaatcattaaagaactacattactattaaggactttctgaagaccttttcccccgatgtcttccggttcttctgcctgcggagcagctaccgctcagccatcgactacagtgacagcgccatgctccaagctcagcagctgctcctggggctgggctctttcctggaggacgcacgtgcctacatgaaggggcagctggcctgcggctccgtcagggaagcgatgctgtgggagaggtaagaggcccgcctagcacccggcgtggcacccctcctgtggcctgctgggtgctgctggtgggctcttgaaggggaagaggggcccccaggagacagggcgctggacaggaggttctggggtcagggactgcccagagaggccccaggagacagggtgctgggcaggaggtgcaggtgtggggtcaggggctccccagaggccacaggacactgggtgctggacaggaggtgtggggtcaggggctcccgagacatcccagggagacggcgctggcaggaagtgtgcctggggccctcgggctctgagccccctgctcagagtggctttgggctcgggttccctgtgcgaggagcggagctgctcatccctcccagtcctgactgtgaggagccaaaatctataaaacacacaggcctgggcccacagcatcgcctccactccccacccacgggtgtcctgggcagcgctgcacattcatcccggcatgcagagtcttccggatggtcttggtgataacccacccctgccacttcagcagggtaggcagccagtggccacgggaggctgagatccgggagccccgggctgggcctccccagcctctctttgtgagtggtcagccgtgccgtctctcccccaccgag

SEQ ID NO: 283830 - DNA, 1173 bp, Homo sapiens
cttcatgaaagtaaatagatgaggctgattgccccgaagtcacttcctcgttgacttcgttcagggctcagttcagcgctccctgaactgtctgaggagctggagttgctccctccgcaggcacgtttctgtctgcaggtttatcctgttcagtaggtcagggtttgttactgacaaccatgacctgctgtgagcccttctgcgagtgtggagctggggggcaagaagggcagccttagctgtgccaacgcttcgtcctgtcagggcatttgcacgccaaaggcaaagaagaaaaaatgtccaaatcattaaagaactacattactattaagccatcgactacagtgacagcgccatgctccaagctcagcagctgctcctggggctgggctctttcctggaggacgcacgtgcctacatgaaggggcagctggcctgcggctccgtcagggaagcgatgctgtgggagaggtaagaggcccgcctagcacccggcgtggcacccctcctgtggcctgctgggtgctgctggtgggctcttgaaggggaagaggggcccccaggagacagggcgctggacaggaggttctggggtcagggactgcccagagaggccccaggagacagggtgctgggcaggaggtgcaggtgtggggtcaggggctccccagaggccacaggggactgggagctggacaggaggtgtggggtcaggggctccccagaggccacaggacactgggtgctggacaggaggtgtggggtcaggggctcccgagacatcccagggagacggcgctggcaggaagtgtgcctggggccctcgggctctgagccccctgctcagagtggctttgggctcgggttccctgtgcgaggagcggagctgctcatccctcccagtcctgactgtgaggagccaaaatctataaaacacacaggcctgggcccacagcatcgcctccactccccacccacgggtgtcctgggcagcgctgcacattcatcccggcatgcagagtcttccggatggtcttggtgataacccacccctgccacttcagcagggtaggcagccagtggccacgggaggctgagatccgggagccccgggctgggcctccccagcctctctttgtgagtggtcagccgtgccgtctctcccccaccgag

SEQ ID NO: 283831 - DNA, 788 bp, Homo sapiens
ctcattttcatcaaggttcctgatttcttgataggtagagataacttatgtaattgtagaaagtaacatattctctgaacagtgcgaagcgtaaaagcaaagcctcgtgactgcctgtctctcgctttaccaggactttctgaagaccttttcccccgatgtcttccggttcttctgcctgcggagcagctaccgctcaggtgagccgagcacacgtggagtggactccccccccagctcggagacagtcattctgacaggactgaaaacagcaaaatgcaggccagagaataagcagaaccttgttgagtgaggctgctgtgtgccttacggttcgggttgagagtgaacccagaggacgagggatcccagtgctggtctgggcccggcccacagtggatgtgggcttcctcgtcaagctcgagtcctctccactccttctctctgggtctggacaagtcgtgaacccgcagcacctcggcttcctgctgtgtgaactgggagattggaaggggccagcctggcacggcccctgaacatgggagccctcaaacgtgaccctgcctgtcctgcccaggggcagcacttccccgaacggtgtgtagcagagcaaggtctcctggatgggtgatgacggttcctcccatgctgcacagttacctgctgccccgggctaggctcttggccaggagttgtctagcactggcctggcatggtggctcacgtgtatgatcccagcactttgggaggccgaggctggcagatgttttgagtccaggagtttgaga

SEQ ID NO: 283832 - DNA, 454 bp, Homo sapiens
  misc_feature (435)..(435): n is a, c, g, or t
tcttggagataagccttgtaaaaagctacaggccagggagaatttcagggtcagattcaggagttccttaaatgagtttggttttcctcctgtctttcacatacataggggatgaaataatacccaggtcatcaaagtctgtgaaaccaactgcaacaggacctctgattcttcccactcagagacccacaagtgccactctgtttttggacaacggtcaacaagcttcaccgccaagtgcctgatttgtcaaatgagagctttgtcgtttcttcagatgctgaccagtatctgaattcagtatctctgaattacaggagaggagaaaatagatgaaatactgctgtcagtaccacggttgctggctcttgtttagcttctgagtcagctggggaagggttcgggggttctttcccccgggaaggggccccaggnaacgggggtggaaaggatt

SEQ ID NO: 283833 - DNA, 2301 bp, Homo sapiens
ggccttgcctgtcactttttccagaggcgagggtcgcggaggggacagcgtcagggccgctggggtgtggacggcgggcgaggcgcaaactttactaggagtttttggcacttggaggcagagcctgttgggcggcacagcacgcccgctgggaaacgcaggggagcggcctgcttcgctgaaaacccgaccaggacctaacgggccgcgggacagaaacctccgagaccatggtacacagcaactaccgcaactcgctcctcagcccctgactcttcgtccccgccccacagagcagtataagtagggcccgaaacagaactggcaaccgcagtagccaatctacttgccaacatcactttgacagcccaatcacgatgaagaggaggcggggagaccgcggagtctccctctgttgcccaggctgcagtgcagtggtgtgacctcagctcactgtgagctctgcctcctgggttcaagcgattctcttgtctcagcctccccagtagctgggactacagatgcacgccaccacgcccggctaatttgtgtatttttagtagagacggggtttcaccatattggtcaggctggtctcgaactcctgacctcaggtgatccatccgcctcagcctcccaaagtgctgggattacaggtgtgagccactgcgcctggcccaatagaggcacgtttgtcaagctattgtatagctgtggaccaactgtatatgatcatgcgcaccttggccatgcttgctcatatgttagatttgatatcattcgaaggatcctaaccaaggtttttggatgcagcatagtcatggtgatgggtattacagatgtagatgataaaatcatcaaaagagccaatgagatgaatatttcccccgcttccctcgccagtctttatgaggaagacttcaagcaggacatggcagccctgaaggttctcccacccacggtgtacctgagggtaaccgaaaatattcctcagataatttctttcattgaaggaatcattgctcgtgggaacgcttattcaacggcaaaaggcaatgtctacttcgatctgaagtctagaggagacaagtatggcaaattggtcggcgtggtccctggtccagtcggagagccagcggactctgacaagcgtcatgccagtgacttcgccctgtggaaggcggccaaaccccaggaggtgttctgggcctctccctggggacccgggaggccgggctggcacatcgagtgctctgccatcgctagtatggtatttggaagtcaactggatatccattcaggtgggatagatttagcttttccacatcatgagaacgaaattgcacagtgcgaagtctttcatcagtgcgagcagtggggaaattattttctgcattctgggcatttgcacgccaaaggcaaagaagaaaaaatgtccaaatcattaaagaactacattactattaaggactttctgaagaccttttcccccgatgtcttccggttcttctgcctgcggagcagctaccgctcagccatcgactacagtgacagcgccatgctccaagctcagcagctgctcctggggctgggctctttcctggaggacgcacgtgcctacatgaaggggcagctggcctgcggctccgtcagggaagcgatgctgtgggagaggctctccagcaccaagagggccgtgaaggcggccttggcagatgattttgacacacccagggtggttgatgccatcctgggccttgcacaccacgggaatggacagctcagggcgtccctgaaggaacctgaagggccgagaagtcctgctgtgtttggtgccatcatctcttactttgaacagttttttgaaactgttggaatttctctggcaaatcaacagtacgtttcaggagacggcagcgaggctaccttgcatggtgtggtggacgagctggtgcggttccggcagaaggtccggcagtttgcgctggccatgcccgaggccacgggggacgcccggcggcagcagctcctagaaaggcagcccctgctggaagcatgcgacaccctgcgccggggcctgactgcccacggcatcaacatcaaggacagaagcagtacaacatccacgtgggaactgctggatcaaaggacaaaagaccaaaaatcagcgggctgaggatggagcacagccatgaacctgctcacgacaagacgcacccatgcttctcagggtcaaggctttatgttaaagcttcctgtcggggctgctaggtcagcattaaagtaaggcaaccaacagtg

SEQ ID NO: 283834 - DNA, 1944 bp, Homo sapiens
ggccttgcctgtcactttttccagaggcgagggtcgcggaggggacagcgtcagggccgctggggtgtggacggcgggcgaggcgcaaactttactaggagtttttggcacttggaggcagagcctgttgggcggcacagcacgcccgctgggaaacgcaggggagcggcctgcttcgctgaaaacccgaccaggacctaacgggccgcgggacagaaacctccgagaccatggtacacagcaactaccgcaactcgctcctcagcccctgactcttcgtccccgccccacagagcagtataagtagggcccgaaacagaactggcaaccgcagtagccaatctacttgccaacatcactttgacagcccaatcacgatgaagaggaggcggggagaccctcatatgttagatttgatatcattcgaaggatcctaaccaaggtttttggatgcagcatagtcatggtgatgggtattacagatgtagatgataaaatcatcaaaagagccaatgagatgaatatttcccccgcttccctcgccagtctttatgaggaagacttcaagcaggacatggcagccctgaaggttctcccacccacggtgtacctgagggtaaccgaaaatattcctcagataatttctttcattgaaggaatcattgctcgtgggaacgcttattcaacggcaaaaggcaatgtctacttcgatctgaagtctagaggagacaagtatggcaaattggtcggcgtggtccctggtccagtcggagagccagcggactctgacaagcgtcatgccagtgacttcgccctgtggaaggcggccaaaccccaggaggtgttctgggcctctccctggggacccgggaggccgggctggcacatcgagtgctctgccatcgctagtatggtatttggaagtcaactggatatccattcaggtgggatagatttagcttttccacatcatgagaacgaaattgcacagtgcgaagtctttcatcagtgcgagcagtggggaaattattttctgcattctgggcatttgcacgccaaaggcaaagaagaaaaaatgtccaaatcattaaagaactacattactattaaggactttctgaagaccttttcccccgatgtcttccggttcttctgcctgcggagcagctaccgctcagccatcgactacagtgacagcgccatgctccaagctcagcagctgctcctggggctgggctctttcctggaggacgcacgtgcctacatgaaggggcagctggcctgcggctccgtcagggaagcgatgctgtgggagaggctctccagcaccaagagggccgtgaaggcggccttggcagatgattttgacacacccagggtggttgatgccatcctgggccttgcacaccacgggaatggacagctcagggcgtccctgaaggaacctgaagggccgagaagtcctgctgtgtttggtgccatcatctcttactttgaacagttttttgaaactgttggaatttctctggcaaatcaacagtacgtttcaggagacggcagcgaggctaccttgcatggtgtggtggacgagctggtgcggttccggcagaaggtccggcagtttgcgctggccatgcccgaggccacgggggacgcccggcggcagcagctcctagaaaggcagcccctgctggaagcatgcgacaccctgcgccggggcctgactgcccacggcatcaacatcaaggacagaagcagtacaacatccacgtgggaactgctggatcaaaggacaaaagaccaaaaatcagcgggctgaggatggagcacagccatgaacctgctcacgacaagacgcacccatgcttctcagggtcaaggctttatgttaaagcttcctgtcggggctgctaggtcagcattaaagtaaggcaaccaacagtg

SEQ ID NO: 283835 - DNA, 1745 bp, Homo sapiens
aaacgctcctcccgcgcggcggacacagctccaggctggtaccgcgcgcacacggacgcctcgcaggacctgggctaataaggagaggagatcggcacggtatagctgtggaccaactgtatatgatcatgcgcaccttggccatgcttgctcatatgttagatttgatatcattcgaaggatcctaaccaaggtttttggatgcagcatagtcatggtgatgggtattacagatgtagatgataaaatcatcaaaagagccaatgaggcatgagtcaaaggaatggtgtgaggtccttgaggaacattttcactgagatgaatatttcccccgcttccctcgccagtctttatgaggaagacttcaagcaggacatggcagccctgaaggttctcccacccacggtgtacctgagggtaaccgaaaatattcctcagataatttctttcattgaaggaatcattgctcgtgggaacgcttattcaacggcaaaaggcaatgtctacttcgatctgaagtctagaggagacaagtatggcaaattggtcggcgtggtccctggtccagtcggagagccagcggactctgacaagcgtcatgccagtgacttcgccctgtggaaggcggccaaaccccaggaggtgttctgggcctctccctggggacccgggaggccgggctggcacatcgagtgctctgccatcgctagtatggtatttggaagtcaactggatatccattcaggtgggatagatttagcttttccacatcatgagaacgaaattgcacagtgcgaagtctttcatcagtgcgagcagtggggaaattattttctgcattctgggcatttgcacgccaaaggcaaagaagaaaaaatgtccaaatcattaaagaactacattactattaaggactttctgaagaccttttcccccgatgtcttccggttcttctgcctgcggagcagctaccgctcagccatcgactacagtgacagcgccatgctccaagctcagcagctgctcctggggctgggctctttcctggaggacgcacgtgcctacatgaaggggcagctggcctgcggctccgtcagggaagcgatgctgtgggagaggctctccagcaccaagagggccgtgaaggcggccttggcagatgattttgacacacccagggtggttgatgccatcctgggccttgcacaccacgggaatggacagctcagggcgtccctgaaggaacctgaagggccgagaagtcctgctgtgtttggtgccatcatctcttactttgaacagttttttgaaactgttggaatttctctggcaaatcaacagtacgtttcaggagacggcagcgaggctaccttgcatggtgtggtggacgagctggtgcggttccggcagaaggtccggcagtttgcgctggccatgcccgaggccacgggggacgcccggcggcagcagctcctagaaaggcagcccctgctggaagcatgcgacaccctgcgccggggcctgactgcccacggcatcaacatcaaggacagaagcagtacaacatccacgtgggaactgctggatcaaaggacaaaagaccaaaaatcagcgggctgaggatggagcacagccatgaacctgctcacgacaagacgcacccatgcttctcagggtcaaggctttatgttaaagcttcctgtcggggctgctaggtcagcattaaagtaaggcaaccaacagtg

SEQ ID NO: 283836 - DNA, 1987 bp, Homo sapiens
cccggcgtggctcccgtctccgcccgagtcgtaggcgctggccgctgacatgttgaggactacgcgcggcccaggcctgggccccccgctgctccaggccgcgctgggccttgggcgggctgggtggcactggcctgcgggccgggcggcgagcggggggcgcgggcgggcctggctgcagcccacgggccgggagacgggtgtgcaggtgtacaacagcctcaccgggaggaaggaacccctaatcgtggcgcacgccgaagccgcctcctggtatagctgtggaccaactgtatatgatcatgcgcaccttggccatgcttgctcatatgttagatttgatatcattcgaaggatcctaaccaaggtttttggatgcagcatagtcatggtgatgggtattacagatgtagatgataaaatcatcaaaagagccaatgagatgaatatttcccccgcttccctcgccagtctttatgaggaagacttcaagcaggacatggcagccctgaaggttctcccacccacggtgtacctgagggtaaccgaaaatattcctcagataatttctttcattgaaggaatcattgctcgtgggaacgcttattcaacggcaaaaggcaatgtctacttcgatctgaagtctagaggagacaagtatggcaaattggtcggcgtggtccctggtccagtcggagagccagcggactctgacaagcgtcatgccagtgacttcgccctgtggaaggcggccaaaccccaggaggtgttctgggcctctccctggggacccgggaggccgggctggcacatcgagtgctctgccatcgctagtatggtatttggaagtcaactggatatccattcaggtgggatagatttagcttttccacatcatgagaacgaaattgcacagtgcgaagtctttcatcagtgcgagcagtggggaaattattttctgcattctgggcatttgcacgccaaaggcaaagaagaaaaaatgtccaaatcattaaagaactacattactattaaggactttctgaagaccttttcccccgatgtcttccggttcttctgcctgcggagcagctaccgctcagccatcgactacagtgacagcgccatgctccaagctcagcagctgctcctggggctgggctctttcctggaggacgcacgtgcctacatgaaggggcagctggcctgcggctccgtcagggaagcgatgctgtgggagaggctctccagcaccaagagggccgtgaaggcggccttggcagatgattttgacacacccagggtggttgatgccatcctgggccttgcacaccacgggaatggacagctcagggcgtccctgaaggaacctgaagggccgagaagtcctgctgtgtttggtgccatcatctcttactttgaacagttttttgaaactgttggaatttctctggcaaatcaacagttggcaaactctcgtgcgcagaaccagagatgagtccatctcagcaacagaatgtcgccagctctgcacacacgtttatgttcaaagactctcagaatgtgcagaagtcacaggcacatacgtttcaggagacggcagcgaggctaccttgcatggtgtggtggacgagctggtgcggttccggcagaaggtccggcagtttgcgctggccatgcccgaggccacgggggacgcccggcggcagcagctcctagaaaggcagcccctgctggaagcatgcgacaccctgcgccggggcctgactgcccacggcatcaacatcaaggacagaagcagtacaacatccacgtgggaactgctggatcaaaggacaaaagaccaaaaatcagcgggctgaggatggagcacagccatgaacctgctcacgacaagacgcacccatgcttctcagggtcaaggctttatgttaaagcttcctgtcggggctgctaggtcagcattaaagtaaggcaaccaacagtg

SEQ ID NO: 283837 - DNA, 1794 bp, Homo sapiens
cccggcgtggctcccgtctccgcccgagtcgtaggcgctggccgctgacatgttgaggactacgcgcggcccaggcctgggccccccgctgctccaggccgcgctgggccttgggcgggctgggtggcactggcctgcgggccgggcggcgagcggggggcgcgggcgggcctggctgcagcccacgggccgggagacgggtgtgcaggtgtacaacagcctcaccgggaggaaggaacccctaatcgtggcgcacgccgaagccgcctcctggtatagctgtggaccaactgtatatgatcatgcgcaccttggccatgcttgctcatatgttagatttgatatcattcgaaggatcctaaccaaggtttttggatgcagcatagtcatggtgatgggtattacagatgtagatgataaaatcatcaaaagagccaatgagatgaatatttcccccgcttccctcgccagtctttatgaggaagacttcaagcaggacatggcagccctgaaggttctcccacccacggtgtacctgagggtaaccgaaaatattcctcagataatttctttcattgaaggaatcattgctcgtgggaacgcttattcaacggcaaaaggcaatgtctacttcgatctgaagtctagaggagacaagtatggcaaattggtcggcgtggtccctggtccagtcggagagccagcggactctgacaagcgtcatgccagtgacttcgccctgtggaaggcggccaaaccccaggaggtgttctgggcctctccctggggacccgggaggccgggctggcacatcgagtgctctgccatcgctagtatggtatttggaagtcaactggatatccattcaggtgggatagatttagcttttccacatcatgagaacgaaattgcacagtgcgaagtctttcatcagtgcgagcagtggggaaattattttctgcattctgggcatttgcacgccaaaggcaaagaagaaaaaatgtccaaatcattaaagaactacattactattaaggactttctgaagaccttttcccccgatgtcttccggttcttctgcctgcggagcagctaccgctcagccatcgactacagtgacagcgccatgctccaagctcagcagctgctcctggggctgggctctttcctggaggacgcacgtgcctacatgaaggggcagctggcctgcggctccgtcagggaagcgatgctgtgggagaggctctccagcaccaagagggccgtgaaggcggccttggcagatgattttgacacacccagggtggttgatgccatcctgggccttgccatcatctcttactttgaacagttttttgaaactgttggaatttctctggcaaatcaacagtacgtttcaggagacggcagcgaggctaccttgcatggtgtggtggacgagctggtgcggttccggcagaaggtccggcagtttgcgctggccatgcccgaggccacgggggacgcccggcggcagcagctcctagaaaggcagcccctgctggaagcatgcgacaccctgcgccggggcctgactgcccacggcatcaacatcaaggacagaagcagtacaacatccacgtgggaactgctggatcaaaggacaaaagaccaaaaatcagcgggctgaggatggagcacagccatgaacctgctcacgacaagacgcacccatgcttctcagggtcaaggctttatgttaaagcttcctgtcggggctgctaggtcagcattaaagtaaggcaaccaacagtg

SEQ ID NO: 283838 - DNA, 1537 bp, Homo sapiens
tcttggagataagccttgtaaaaagctacaggccagggagaatttcagggtcagattcaggagttccttaaatgagtttggttttcctcctgtctttcacatacataggggatgaaataatacccaggtcatcaaagtctgtgaaaccaactgcaacaggacctctgattcttcccactcagagacccacaagtgccactctgtttttggacaacggtcaacaagcttcaccgccaagtgcctgatttgtcaaatgagagctttgtcgtttcttcagatgctgaccagtatctgaattcagtatctctgaattacaggagaggagaaaatagatgaaatactgctgtcagtaccacggttgctggctcttgtttagcttctgagtcagctggggcacccctgccatctgctctcagtgtggggctgggtgtccctgcaccgtggaacaagggcaggtcctgtcttcccggaaggcccagcacgggtgaagatttgggggcagatttataccaacatacactggtctatacattggatatgtgcaggttcccattcgtttcctggggagccatgtgtccctgaggccagagagtctcctcacccagctcagactgaatgcttttgtttttgtttcagggcatttgcacgccaaaggcaaagaagaaaaaatgtccaaatcattaaagaactacattactattaaggactttctgaagaccttttcccccgatgtcttccggttcttctgcctgcggagcagctaccgctcagccatcgactacagtgacagcgccatgctccaagctcagcagctgctcctggggctgggctctttcctggaggacgcacgtgcctacatgaaggggcagctggcctgcggctccgtcagggaagcgatgctgtgggagaggctctccagcaccaagagggccgtgaaggcggccttggcagatgattttgacacacccagggtggttgatgccatcctgggccttgcacaccacgggaatggacagctcagggcgtccctgaaggaacctgaagggccgagaagtcctgctgtgtttggtgccatcatctcttactttgaacagttttttgaaactgttggaatttctctggcaaatcaacagtacgtttcaggagacggcagcgaggctaccttgcatggtgtggtggacgagctggtgcggttccggcagaaggtccggcagtttgcgctggccatgcccgaggccacgggggacgcccggcggcagcagctcctagaaaggcagcccctgctggaagcatgcgacaccctgcgccggggcctgactgcccacggcatcaacatcaaggacagaagcagtacaacatccacgtgggaactgctggatcaaaggacaaaagaccaaaaatcagcgggctgaggatggagcacagccatgaacctgctcacgacaagacgcacccatgcttctcagggtcaaggctttatgttaaagcttcctgtcggggctgctaggtcagcattaaagtaaggcaaccaacagtg

SEQ ID NO: 283839 - DNA, 1243 bp, Homo sapiens
cccggcgtggctcccgtctccgcccgagtcgtaggcgctggccgctgacatgttgaggactacgcgcggcccaggcctgggccccccgctgctccaggccgcgctgggccttgggcgggctgggtggcactggcctgcgggccgggcggcgagcggggggcgcgggcgggcctggctgcagcccacgggccgggagacgggtgtgcaggtgtacaacagcctcaccgggaggaaggaacccctaatcgtggcgcacgccgaagccgcctcctggtatagctgtggaccaactgtatatgatcatgcgcaccttggccatgcttgctcatatgttagatttgatatcattcgaaggatcctaaccaaggtttttggatgcagcatagtcatggtgatgggtattacagatgtagatgataaaatcatcaaaagagccaatgagatgaatatttcccccgcttccctcgccagtctttatgaggaagacttcaagcaggacatggcagccctgaaggttctcccacccacggtgtacctgagggtaaccgaaaatattcctcagataatttctttcattgaaggaatcattgctcgtgggaacgcttattcaacggcaaaaggcaatgtctacttcgatctgaagtctagaggagacaagtatggcaaattggtcggcgtggtccctggtccagtcggagagccagcggactctgacaagcgtcatgccagtgacttcgccctgtggaaggcggccaaaccccaggaggtgttctgggcctctccctggggacccgggaggccgggctggcacatcgagtgctctgccatcgctagtatggtatttggaagtcaactggatatccattcaggtgggatagatttagcttttccacatcatgagaacgaaattgcacagtgcgaagtctttcatcagtgcgagcagtggggaaattattttctgcattctgggcatttgcacgccaaaggcaaagaagaaaaaatgtccaaatcattaaagaactacattactattaaggactttctgaagaccttttcccccgatgtcttccggttcttctgcctgcggagcagctaccgctcagccatcgactacagtgacagcgccatgctccaagctcagcagctgctcctggggctgggctctttcctggaggacgcacgtgcctacatgaaggggcagctgggctgctaggtcagcattaaagtaaggcaaccaacagtg

SEQ ID NO: 283840 - DNA, 2498 bp, Homo sapiens
gactttttcttggggtaacatgacagtttgcagttgatgttacataattttctgctactcaggaactcaagtctttgggaatatgacctagagaaagtccccagattagagcccccagcgtctctccctggggaaggactggtgtgggggccgcctggggagagtggagctccctctgctgtgactgttctctcctcttccctcaggctctccagcaccaagagggccgtgaaggcggccttggcagatgattttgacacacccagggtggttgatgccatcctgggccttgcacaccacgggaatggacagctcagggcgtccctgaaggaacctgaagggccgagaagtcctgctgtgtttggtgccatcatctcttactttgaacagttttttgaaactgttggaatttctctggcaaatcaacagttggcaaactctcgtgcgcagaaccagagatgagtccatctcagcaacagaatgtcgccagctctgcacacacgtttatgttcaaagactctcagaatgtgcagaagtcacaggcacaacagtaagagaacattttttcctgacccatttgagggcaagttggcgacctgagcccccttgcctggcacatgttttgtacggacaggacgggctccccgacaggcacgagtcacctgcaccttcccagcgaggctcaccctggctgtgcagtgaaggtggacgctgccaggcttctccacattccttctcttccgttgtaactcaagagcatttttgcaaagagacttggatcctatgaaaatgtcctcttccttatcaggctcacctgaaactcgtttattctatcaatacagatttgaggtttcctgccttattcttaaagtccccaccatcactttgtatgtggctgacagaggccccttggggctggcgctgtgtccctgaacatccctgtcattctttggacacccttgtagaattctcagcacaaggcgctctggctcttttggggtgtggctcggctgctgctgcctggacgggggctgccactctagaccagctgcccagcaccccgagggtcccgccgcttgggactggggcccaagcaggtgtgctgaaggcctggctctgggccaaacatgtctcgctggctctcaacagagaactatagtgtcttttccaagtttggctcatttgtatacctgttgatcacctggtagacttagttcccctttccagcagtccggcgtctgttgccaatcacataaaagtcgactggtgtgagatgacccaagtttttgcaatgtacatgttcatttttaggggtggctttccggagtctgttttgagtaagaaaagtgggatctggccaagctctgcctagcccttgtcaaagatatctcattcaccttcctctggccgcaaggcccaatgtctgggcccactctgggctcatatttctgtaataacaaaaactgtcttttatcatggaagcaataactgaggggtgtgtgaggtttaagtagtttgacaccaaggtcaaatgttgtgtctgtttcttattttacacacatggatttaacaaataggtacagctgccccttccacaccgccccaggatctgttctcagtgggaggacagcgcgaggccttctgcgcaaatcccgtcctcagcacctgaggctgtgaatctcagaccatttgccgaaacacacgtgtgcaagcgctcagtcgctgccccccagcctcatcctcaggttgctcctgatacctcggccacaattgcgtgaggtctggaagccagggagcgtttgtgttcagggcggggcggcatgcagcccccagccctttcttccaactcccgagtgaggatcactcagccttgcttggacgacagatgctcagagttgagtggagccttgcccagagcccagcgctcgcgggctgtacccatccctgccagacccagaaagaggcccagctgcagggaatcagggaagcccagggctgggtgggtgtcggcccagagcccaaccacggggtggggaggggggcatccacaatccacagtctccgggggacgtaaccgcgccctgctggcttcagtacgtttcaggagacggcagcgaggctaccttgcatggtgtggtggacgagctggtgcggttccggcagaaggtccggcagtttgcgctggccatgcccgaggccacgggggacgcccggcggcagcagctcctagaaaggcagcccctgctggaagcatgcgacaccctgcgccggggcctgactgcccacggcatcaacatcaaggacagaagcagtacaacatccacgtgggaactgctggatcaaaggacaaaagaccaaaaatcagcgggctgaggatggagcacagccatgaacctgctcacgacaagacgcacccatgcttctcagggtcaaggctttatgttaaagcttcctgtcggggctgctaggtcagcattaaagtaaggcaaccaacagtg

SEQ ID NO: 283841 - DNA, 951 bp, Homo sapiens
gactttttcttggggtaacatgacagtttgcagttgatgttacataattttctgctactcaggaactcaagtctttgggaatatgacctagagaaagtccccagattagagcccccagcgtctctccctggggaaggactggtgtgggggccgcctggggagagtggagctccctctgctgtgactgttctctcctcttccctcaggctctccagcaccaagagggccgtgaaggcggccttggcagatgattttgacacacccagggtggttgatgccatcctgggccttgcacaccacgggaatggacagctcagggcgtccctgaaggaacctgaagggccgagaagtcctgctgtgtttggtgccatcatctcttactttgaacagttttttgaaactgttggaatttctctggcaaatcaacagttggcaaactctcgtgcgcagaaccagagatgagtccatctcagcaacagaatgtcgccagctctgcacacacgtttatgttcaaagactctcagaatgtgcagaagtcacaggcacatacgtttcaggagacggcagcgaggctaccttgcatggtgtggtggacgagctggtgcggttccggcagaaggtccggcagtttgcgctggccatgcccgaggccacgggggacgcccggcggcagcagctcctagaaaggcagcccctgctggaagcatgcgacaccctgcgccggggcctgactgcccacggcatcaacatcaaggacagaagcagtacaacatccacgtgggaactgctggatcaaaggacaaaagaccaaaaatcagcgggctgaggatggagcacagccatgaacctgctcacgacaagacgcacccatgcttctcagggtcaaggctttatgttaaagcttcctgtcggggctgctaggtcagcattaaagtaaggcaaccaacagtg

SEQ ID NO: 283842 - DNA, 430 bp, Homo sapiens
  misc_feature (145)..(147): n is a, c, g, or t
  misc_feature (149)..(149): n is a, c, g, or t
  misc_feature (151)..(151): n is a, c, g, or t
  misc_feature (153)..(154): n is a, c, g, or t
  misc_feature (156)..(157): n is a, c, g, or t
  misc_feature (166)..(167): n is a, c, g, or t
  misc_feature (173)..(173): n is a, c, g, or t
  misc_feature (176)..(177): n is a, c, g, or t
  misc_feature (182)..(188): n is a, c, g, or t
  misc_feature (191)..(195): n is a, c, g, or t
  misc_feature (205)..(205): n is a, c, g, or t
  misc_feature (210)..(212): n is a, c, g, or t
  misc_feature (214)..(215): n is a, c, g, or t
  misc_feature (240)..(240): n is a, c, g, or t
  misc_feature (243)..(243): n is a, c, g, or t
  misc_feature (247)..(248): n is a, c, g, or t
  misc_feature (251)..(252): n is a, c, g, or t
  misc_feature (254)..(254): n is a, c, g, or t
  misc_feature (257)..(257): n is a, c, g, or t
  misc_feature (269)..(269): n is a, c, g, or t
  misc_feature (277)..(278): n is a, c, g, or t
  misc_feature (280)..(280): n is a, c, g, or t
  misc_feature (289)..(290): n is a, c, g, or t
  misc_feature (293)..(293): n is a, c, g, or t
  misc_feature (296)..(297): n is a, c, g, or t
  misc_feature (302)..(302): n is a, c, g, or t
  misc_feature (305)..(305): n is a, c, g, or t
  misc_feature (307)..(309): n is a, c, g, or t
  misc_feature (312)..(314): n is a, c, g, or t
  misc_feature (325)..(325): n is a, c, g, or t
  misc_feature (334)..(334): n is a, c, g, or t
  misc_feature (343)..(344): n is a, c, g, or t
  misc_feature (346)..(346): n is a, c, g, or t
  misc_feature (355)..(359): n is a, c, g, or t
  misc_feature (370)..(370): n is a, c, g, or t
  misc_feature (378)..(378): n is a, c, g, or t
ggctgtaccggcccgaaggtcctttgatgacatgttgaggactacgcgcggcccaggcctgggccccccgctgctccaggccgcgctgggccttgggcgggctgggtggcactggcctgcgggccgggcggcgagcggggggctnnncncncnntnnatcatacannaacccnacnnataannnnnnnaannnnnaaaaaacaanaaaannnannaaccaaaaaattatactccacaaanaanaaannacnntnatngtatatatgtgnaaaaaatnnantttcataannacnaanntgctnaancnnncannntatctttcatnttttttaantacaaccannanataaaaccnnnnnccttcaacaanactaatcntcatccctattaaacatctacttcatataataataaaaactcaaatttctac

SEQ ID NO: 283843 - DNA, 567 bp, Homo sapiens
ctctctttgtgagtggtcagccgtgccgtctctcccccaccgagtcttccttgccactcccctcaatatctattgatttttaaaaccatcatgaaaatgcccacgtgtgtcttgtattttaagtgtcacaggtgacctctgctctgggactttttcttggggtaacatgacagtttgcagttgatgttacataattttctgctactcaggaactcaagtctttgggaatatgacctagagaaagtccccagattagagcccccagcgtctctccctggggaaggactggtgtgggggccgcctggggagagtggagctccctctgctgtgactgttctctcctcttccctcaggctctccagcaccaagagggccgtgaaggcggccttggcagatgattttgacacacccagggtggttgatgccatcctgggccttgcacaccacgggaatggacagctcagggcgtccctgaaggtagctcaacgaacaggtggccttgcggtcctgctgccaggggcatgggtcgggtcctctggtgggtttttctcatgtcggctgggtggc

SEQ ID NO: 283844 - DNA, 440 bp, Homo sapiens
cccaaagtgctaggattacaggtgtgagccaccacgcctggcctggatttctttttttgaaaaaaaaatatacatatacatactttttaagtcagtgagatttgaattatagcatttgtctgtcattgtggcttcccttcctctttaacctcccgtcacacccatgcatcttccttttgtgaaatggggtggaactagtgactaaagatttggattggaagtcagaggccgcctttgggctggggcgtttatctgaaaagaggctgaactttgtcatttgttgagtgaacagagctcttctcttgtctcttaggcatgagtcaaaggaatggtgtgaggtccttgaggaacattttcactgaggtctctgtcttcctattttctattgatttgtctttctcataactgggtagtctcccaccgcatggggctgtttagca

SEQ ID NO: 283845 - DNA, 833 bp, Homo sapiens
gactttttcttggggtaacatgacagtttgcagttgatgttacataattttctgctactcaggaactcaagtctttgggaatatgacctagagaaagtccccagattagagcccccagcgtctctccctggggaaggactggtgtgggggccgcctggggagagtggagctccctctgctgtgactgttctctcctcttccctcaggctctccagcaccaagagggccgtgaaggcggccttggcagatgattttgacacacccagggtggttgatgccatcctgggccttgcacaccacgggaatggacagctcagggcgtccctgaaggaacctgaagggccgagaagtcctgctgtgtttggtgccatcatctcttactttgaacagttttttgaaactgttggaatttctctggcaaatcaacagtacgtttcaggagacggcagcgaggctaccttgcatggtgtggtggacgagctggtgcggttccggcagaaggtccggcagtttgcgctggccatgcccgaggccacgggggacgcccggcggcagcagctcctagaaaggcagcccctgctggaagcatgcgacaccctgcgccggggcctgactgcccacggcatcaacatcaaggacagaagcagtacaacatccacgtgggaactgctggatcaaaggacaaaagaccaaaaatcagcgggctgaggatggagcacagccatgaacctgctcacgacaagacgcacccatgcttctcagggtcaaggctttatgttaaagcttcctgtcggggctgctaggtcagcattaaagtaaggcaaccaacagtg

SEQ ID NO: 283846 - DNA, 1869 bp, Homo sapiens
cccggcgtggctcccgtctccgcccgagtcgtaggcgctggccgctgacatgttgaggactacgcgcggcccaggcctgggccccccgctgctccaggccgcgctgggccttgggcgggctgggtggcactggcctgcgggccgggcggcgagcggggggcgcgggcgggcctggctgcagcccacgggccgggagacgggtgtgcaggtgtacaacagcctcaccgggaggaaggaacccctaatcgtggcgcacgccgaagccgcctcctggtatagctgtggaccaactgtatatgatcatgcgcaccttggccatgcttgctcatatgttagatttgatatcattcgaaggatcctaaccaaggtttttggatgcagcatagtcatggtgatgggtattacagatgtagatgataaaatcatcaaaagagccaatgagatgaatatttcccccgcttccctcgccagtctttatgaggaagacttcaagcaggacatggcagccctgaaggttctcccacccacggtgtacctgagggtaaccgaaaatattcctcagataatttctttcattgaaggaatcattgctcgtgggaacgcttattcaacggcaaaaggcaatgtctacttcgatctgaagtctagaggagacaagtatggcaaattggtcggcgtggtccctggtccagtcggagagccagcggactctgacaagcgtcatgccagtgacttcgccctgtggaaggcggccaaaccccaggaggtgttctgggcctctccctggggacccgggaggccgggctggcacatcgagtgctctgccatcgctagtatggtatttggaagtcaactggatatccattcaggtgggatagatttagcttttccacatcatgagaacgaaattgcacagtgcgaagtctttcatcagtgcgagcagtggggaaattattttctgcattctgggcatttgcacgccaaaggcaaagaagaaaaaatgtccaaatcattaaagaactacattactattaaggactttctgaagaccttttcccccgatgtcttccggttcttctgcctgcggagcagctaccgctcagccatcgactacagtgacagcgccatgctccaagctcagcagctgctcctggggctgggctctttcctggaggacgcacgtgcctacatgaaggggcagctggcctgcggctccgtcagggaagcgatgctgtgggagaggctctccagcaccaagagggccgtgaaggcggccttggcagatgattttgacacacccagggtggttgatgccatcctgggccttgcacaccacgggaatggacagctcagggcgtccctgaaggaacctgaagggccgagaagtcctgctgtgtttggtgccatcatctcttactttgaacagttttttgaaactgttggaatttctctggcaaatcaacagtacgtttcaggagacggcagcgaggctaccttgcatggtgtggtggacgagctggtgcggttccggcagaaggtccggcagtttgcgctggccatgcccgaggccacgggggacgcccggcggcagcagctcctagaaaggcagcccctgctggaagcatgcgacaccctgcgccggggcctgactgcccacggcatcaacatcaaggacagaagcagtacaacatccacgtgggaactgctggatcaaaggacaaaagaccaaaaatcagcgggctgaggatggagcacagccatgaacctgctcacgacaagacgcacccatgcttctcagggtcaaggctttatgttaaagcttcctgtcggggctgctaggtcagcattaaagtaaggcaaccaacagtg

SEQ ID NO: 283847 - DNA, 938 bp, Homo sapiens
ggctgtaccggcccgaaggtcctttgatgacatgttgaggactacgcgcggcccaggcctgggccccccgctgctccaggccgcgctgggccttgggcgggctgggtggcactggcctgcgggccgggcggcgagcggggggcgcgggcgggcctggctgcagcccacgggccgggagacgggtgtgcaggtgtacaacagcctcaccgggaggaaggaacccctaatcgtggcgcacgccgaagccgcctcctggtatagctgtggaccaactgtatatgatcatgcgcaccttggccatgcttgctcatatgttagatttgatatcattcgaaggatcctaaccaaggtttttggatgcagcatagtcatggtgatgggtattacagatgtagatgataaaatcatcaaaagagccaatgagatgaatatttcccccgcttccctcgccagtctttatgaggaagacttcaagcaggacatggcagccctgaaggttctcccacccacggtgtacctgagggtaaccgaaaatattcctcagataatttctttcattgaaggaatcattgctcgtgggaacgcttattcaacggcaaaaggcaatgtctacttcgatctgaagtctagaggagacaagtatggcaaattggtcggcgtggtccctggtccagtcggagagccagcggactctgacgaagcgtcaatgccagtgacgtatctgcccttgtggcaagtgcggccaaaatacacccaaggaaggggtgatacctggtagcccctcatccccatagcggaaaccccgcgtgaagcgcctggggatggtaacacctgaaagtgtccagagcgaaaccgcatagacatgggacaattgtgtagaggatacgggtgtggaatactccgttccgtggtgcagaataggacttgacggtatacga

SEQ ID NO: 283848 - DNA, 798 bp, Homo sapiens
cccggcgtggctcccgtctccgcccgagtcgtaggcgctggccgctgacatgttgaggactacgcgcggcccaggcctgggccccccgctgctccaggccgcgctgggccttgggcgggctgggtggcactggcctgcgggccgggcggcgagcggggggcgcgggcgggcctggctgcagcccacgggccgggagacgggtgtgcaggtgtacaacagcctcaccgggaggaaggaacccctaatcgtggcgcacgccgaagccgcctcctggtatagctgtggaccaactgtatatgatcatgcgcaccttggccatgcttgctcatatgttagatttgatatcattcgaaggatcaccctctacatcaccgccccgaccttagttctcaccatcgtctttctacatatgaacccccgtccattaccaaacccctgtcaaacctcaaactaggcctcctatttattctagccacctctagacctagcccgttaactcaatcctctgatcggggtagagccatcaaatataccgaactaacgcctgaatcggcggcaattgcgaaccaggatggcccaaacgaatgttcaatattgaagggcacgcagaaacaatcaggtctactattaaaaatagtgtactaagtggacattaaaccgcgtcaaccttataccaacactaaggagacgcctctgattaactttgccaatatgaagccaggacaaaatatagaatacaccaacacaagcgaaaaaacagagcccttgaatgacatgagaaccaaacagaaaggcgga

SEQ ID NO: 283849 - DNA, 3534 bp, Homo sapiens
cccggcgtggctcccgtctccgcccgagtcgtaggcgctggccgctgacatgttgaggactacgcgcggcccaggcctgggccccccgctgctccaggccgcgctgggccttgggcgggctgggtggcactggcctgcgggccgggcggcgagcggggggcgcgggcgggcctggctgcagcccacgggccgggagacgggtgtgcaggtgtacaacagcctcaccgggaggaaggaacccctaatcgtggcgcacgccgaagccgcctcctggtatagctgtggaccaactgtatatgatcatgcgcaccttggccatgcttgctcatatgttagatttgatatcattcgaaggatcctaaccaaggtttttggatgcagcatagtcatggtgatgggtattacagatgtagatgataaaatcatcaaaagagccaatgagatgaatatttcccccgcttccctcgccagtctttatgaggaagacttcaagcaggacatggcagccctgaaggttctcccacccacggtgtacctgagggtaaccgaaaatattcctcagataatttctttcattgaaggaatcattgctcgtgggaacgcttattcaacggcaaaaggcaatgtctacttcgatctgaagtctagaggagacaagtatggcaaattggtcggcgtggtccctggtccagtcggagagccagcggactctgacaagcgtcatgccagtgacttcgccctgtggaaggcggccaaaccccaggaggtgttctgggcctctccctggggacccgggaggccgggctggcacatcgagtgctctgccatcgctagtatggtatttggaagtcaactggatatccattcaggtgggatagatttagcttttccacatcatgagaacgaaattgcacagtgcgaagtctttcatcagtgcgagcagtggggaaattattttctgcattctgggcatttgcacgccaaaggcaaagaagaaaaaatgtccaaatcattaaagaactacattactattaaggactttctgaagaccttttcccccgatgtcttccggttcttctgcctgcggagcagctaccgctcagccatcgactacagtgacagcgccatgctccaagctcagcagctgctcctggggctgggctctttcctggaggacgcacgtgcctacatgaaggggcagctggcctgcggctccgtcagggaagcgatgctgtgggagaggctctccagcaccaagagggccgtgaaggcggccttggcagatgattttgacacacccagggtggttgatgccatcctgggccttgcacaccacgggaatggacagctcagggcgtccctgaaggaacctgaagggccgagaagtcctgctgtgtttggtgccatcatctcttactttgaacagttttttgaaactgttggaatttctctggcaaatcaacagttggcaaactctcgtgcgcagaaccagagatgagtccatctcagcaacagaatgtcgccagctctgcacacacgtttatgttcaaagactctcagaatgtgcagaagtcacaggcacaacagtaagagaacattttttcctgacccatttgagggcaagttggcgacctgagcccccttgcctggcacatgttttgtacggacaggacgggctccccgacaggcacgagtcacctgcaccttcccagcgaggctcaccctggctgtgcagtgaaggtggacgctgccaggcttctccacattccttctcttccgttgtaactcaagagcatttttgcaaagagacttggatcctatgaaaatgtcctcttccttatcaggctcacctgaaactcgtttattctatcaatacagatttgaggtttcctgccttattcttaaagtccccaccatcactttgtatgtggctgacagaggccccttggggctggcgctgtgtccctgaacatccctgtcattctttggacacccttgtagaattctcagcacaaggcgctctggctcttttggggtgtggctcggctgctgctgcctggacgggggctgccactctagaccagctgcccagcaccccgagggtcccgccgcttgggactggggcccaagcaggtgtgctgaaggcctggctctgggccaaacatgtctcgctggctctcaacagagaactatagtgtcttttccaagtttggctcatttgtatacctgttgatcacctggtagacttagttcccctttccagcagtccggcgtctgttgccaatcacataaaagtcgactggtgtgagatgacccaagtttttgcaatgtacatgttcatttttaggggtggctttccggagtctgttttgagtaagaaaagtgggatctggccaagctctgcctagcccttgtcaaagatatctcattcaccttcctctggccgcaaggcccaatgtctgggcccactctgggctcatatttctgtaataacaaaaactgtcttttatcatggaagcaataactgaggggtgtgtgaggtttaagtagtttgacaccaaggtcaaatgttgtgtctgtttcttattttacacacatggatttaacaaataggtacagctgccccttccacaccgccccaggatctgttctcagtgggaggacagcgcgaggccttctgcgcaaatcccgtcctcagcacctgaggctgtgaatctcagaccatttgccgaaacacacgtgtgcaagcgctcagtcgctgccccccagcctcatcctcaggttgctcctgatacctcggccacaattgcgtgaggtctggaagccagggagcgtttgtgttcagggcggggcggcatgcagcccccagccctttcttccaactcccgagtgaggatcactcagccttgcttggacgacagatgctcagagttgagtggagccttgcccagagcccagcgctcgcgggctgtacccatccctgccagacccagaaagaggcccagctgcagggaatcagggaagcccagggctgggtgggtgtcggcccagagcccaaccacggggtggggaggggggcatccacaatccacagtctccgggggacgtaaccgcgccctgctggcttcagtacgtttcaggagacggcagcgaggctaccttgcatggtgtggtggacgagctggtgcggttccggcagaaggtccggcagtttgcgctggccatgcccgaggccacgggggacgcccggcggcagcagctcctagaaaggcagcccctgctggaagcatgcgacaccctgcgccggggcctgactgcccacggcatcaacatcaaggacagaagcagtacaacatccacgtgggaactgctggatcaaaggacaaaagaccaaaaatcagcgggctgaggatggagcacagccatgaacctgctcacgacaagacgcacccatgcttctcagggtcaaggctttatgttaaagcttcctgtcggggctgctaggtcagcattaaagtaaggcaaccaacagtg

SEQ ID NO: 283850 - DNA, 1919 bp, Homo sapiens
cccggcgtggctcccgtctccgcccgagtcgtaggcgctggccgctgacatgttgaggactacgcgcggcccaggcctgggccccccgctgctccaggccgcgctgggccttgggcgggctgggtggcactggcctgcgggccgggcggcgagcggggggcgcgggcgggcctggctgcagcccacgggccgggagacgggtgtgcaggtgtacaacagcctcaccgggaggaaggaacccctaatcgtggcgcacgccgaagccgcctcctggtatagctgtggaccaactgtatatgatcatgcgcaccttggccatgcttgctcatatgttagatttgatatcattcgaaggatcctaaccaaggtttttggatgcagcatagtcatggtgatgggtattacagatgtagatgataaaatcatcaaaagagccaatgaggcatgagtcaaaggaatggtgtgaggtccttgaggaacattttcactgagatgaatatttcccccgcttccctcgccagtctttatgaggaagacttcaagcaggacatggcagccctgaaggttctcccacccacggtgtacctgagggtaaccgaaaatattcctcagataatttctttcattgaaggaatcattgctcgtgggaacgcttattcaacggcaaaaggcaatgtctacttcgatctgaagtctagaggagacaagtatggcaaattggtcggcgtggtccctggtccagtcggagagccagcggactctgacaagcgtcatgccagtgacttcgccctgtggaaggcggccaaaccccaggaggtgttctgggcctctccctggggacccgggaggccgggctggcacatcgagtgctctgccatcgctagtatggtatttggaagtcaactggatatccattcaggtgggatagatttagcttttccacatcatgagaacgaaattgcacagtgcgaagtctttcatcagtgcgagcagtggggaaattattttctgcattctgggcatttgcacgccaaaggcaaagaagaaaaaatgtccaaatcattaaagaactacattactattaaggactttctgaagaccttttcccccgatgtcttccggttcttctgcctgcggagcagctaccgctcagccatcgactacagtgacagcgccatgctccaagctcagcagctgctcctggggctgggctctttcctggaggacgcacgtgcctacatgaaggggcagctggcctgcggctccgtcagggaagcgatgctgtgggagaggctctccagcaccaagagggccgtgaaggcggccttggcagatgattttgacacacccagggtggttgatgccatcctgggccttgcacaccacgggaatggacagctcagggcgtccctgaaggaacctgaagggccgagaagtcctgctgtgtttggtgccatcatctcttactttgaacagttttttgaaactgttggaatttctctggcaaatcaacagtacgtttcaggagacggcagcgaggctaccttgcatggtgtggtggacgagctggtgcggttccggcagaaggtccggcagtttgcgctggccatgcccgaggccacgggggacgcccggcggcagcagctcctagaaaggcagcccctgctggaagcatgcgacaccctgcgccggggcctgactgcccacggcatcaacatcaaggacagaagcagtacaacatccacgtgggaactgctggatcaaaggacaaaagaccaaaaatcagcgggctgaggatggagcacagccatgaacctgctcacgacaagacgcacccatgcttctcagggtcaaggctttatgttaaagcttcctgtcggggctgctaggtcagcattaaagtaaggcaaccaacagtg

SEQ ID NO: 283851 - DNA, 1892 bp, Homo sapiens
cccggcgtggctcccgtctccgcccgagtcgtaggcgctggccgctgacatgttgaggactacgcgcggcccaggcctgggccccccgctgctccaggccgcgctgggccttgggcgggctgggtggcactggcctgcgggccgggcggcgagcggggggcgcgggcgggcctggctgcagcccacgggccgggagacgggtgtgcaggtgtacaacagcctcaccgggaggaaggaacccctaatcgtggcgcacgccgaagccgcctcctggtatagctgtggaccaactgtatatgatcatgcgcaccttggccatgcttgctcatatgttagatttgatatcattcgaaggatcctaaccaaggtttttggatgcagcatagtcatggtgatgggtattacagatgtagatgataaaatcatcaaaagagccaatgagatgaatatttcccccgcttccctcgccagtctttatgaggaagacttcaagcaggacatggcagccctgaaggttctcccacccacggtgtacctgagggtaaccgaaaatattcctcagataatttctttcattgaaggaatcattgctcgtgggaacgcttattcaacggcaaaaggcaatgtctacttcgatctgaagtctagaggagacaagtatggcaaattggtcggcgtggtccctggtccagtcggagagccagcggactctgacaagcgtcatgccagtgacttcgccctgtggaaggcggccaaaccccaggaggtgttctgggcctctccctggggacccgggaggccgggctggcacatcgagtgctctgccatcgctagtatggtatttggaagtcaactggatatccattcaggtgggatagatttagcttttccacatcatgagaacgaaattgcacagtgcgaagtctttcatcagtgcgagcagtggggaaattattttctgcattctgggcatttgcacgccaaaggcaaagaagaaaaaatgtccaaatcattaaagaactacattactattaaggactttctgaagaccttttcccccgatgtcttccggttcttctgcctgcggagcagctaccgctcagccatcgactacagtgacagcgccatgctccaagctcagcagctgctcctggggctgggctctttcctggaggacgcacgtgcctacatgaaggggcagctggcctgcggctccgtcagggaagcgatgctgtgggagaggctctccagcaccaagagggccgtgaaggcggccttggcagatgattttgacacacccagggtggttgatgccatcctgggccttgcacaccacgggaatggacagctcagggcgtccctgaaggaacctgaagggccgagaagtcctgctgtgtttggtgccatcatctcttactttgaacagttttttgaaactgttggaatttctctggcaaatcaacagtacgtttcaggagacggcagcgaggctaccttgcatggtgtggtggacgagctggtgcggttccggcagaaggtccggcagtttgcgctggccatgcccgaggccacgggggacgcccggcggcagcagctcctagaaaggcagcccctgctggaagcatgcgacaccctgcgccggggcctgactgcccacggcatcaacatcaaggacagaagcagtacaacatccacgtgggaactgctggatcaaaggacaaaagaccaaaaatcagcgggctgaggatggagcacagccatgaacctgctcacgacaagacgcacccatgcttctcagggtcaaggctttatgttaaagcttcctgtcggggctgctaggtcagcattaaagtaaggcaaccaacagtgaaaaaaaaaaaagtcgtatcgat

SEQ ID NO: 283852 - DNA, 1754 bp, Homo sapiens
cccggcgtggctcccgtctccgcccgagtcgtaggcgctggccgctgacatgttgaggactacgcgcggcccaggcctgggccccccgctgctccaggccgcgctgggccttgggcgggctgggtggcactggcctgcgggccgggcggcgagcggggggcgcgggcgggcctggctgcagcccacgggccgggagacgggtgtgcaggtgtacaacagcctcaccgggaggaaggaacccctaatcgtggcgcacgccgaagccgcctcctggtatagctgtggaccaactgtatatgatcatgcgcaccttggccatgcttgctcatatgttagatttgatatcattcgaaggatcctaaccaaggtttttggatgcagcatagtcatggtgatgggtattacagatgtagatgataaaatcatcaaaagagccaatgagatgaatatttcccccgcttccctcgccagtctttatgaggaagacttcaagcaggacatggcagccctgaaggttctcccacccacggtgtacctgagggtaaccgaaaatattcctcagataatttctttcattgaaggaatcattgctcgtgggaacgcttattcaacggcaaaaggcaatgtctacttcgatctgaagtctagaggagacaagtatggcaaattggtcggcgtggtccctggtccagtcggagagccagcggactctgacaagcgtcatgccagtgacttcgccctgtggaaggcggccaaaccccaggaggtgttctgggcctctccctggggacccgggaggccgggctggcacatcgagtgctctgccatcgctagtatggtatttggaagtcaactggatatccattcaggtgggatagatttagcttttccacatcatgagaacgaaattgcacagtgcgaagtctttcatcagtgcgagcagtggggaaattattttctgcattctgggcatttgcacgccaaaggcaaagaagaaaaaatgtccaaatcattaaagaactacattactattaaggactttctgaagaccttttcccccgatgtcttccggttcttctgcctgcggagcagctaccgctcagccatcgactacagtgacagcgccatgctccaagctcagcagctgctcctggggctgggctctttcctggaggacgcacgtgcctacatgaaggggcagctggcctgcggctccgtcagggaagcgatgctgtgggagaggctctccagcaccaagagggccgtgaaggcggccttggcagatgattttgacacacccagggtggttgatgccatcctgggccttgcacaccacgggaatggacagctcagggcgtccctgaaggaacctgaagggccgagaagtcctgctgtgtttggtgccatcatctcttactttgaacagttttttgaaactgttggaatttctctggcaaatcaacagtacgtttcaggagacggcagcgaggctaccttgcatggtgtggtggacgagctggtgcggttccggcagaaggtccggcagtttgcgctggccatgcccgaggccacgggggacgcccggcggcagcagctcctagaaaggcagcccctgctggaagcatgcgacaccctgcgccggggcctgactgcccacggcatcaacatcaaggacagaagcagtacaacatccacgtgggaactgctggatcggacgaccacacccatgcttctcagggtcggcttttgttgct

SEQ ID NO: 283853 - DNA, 1696 bp, Homo sapiens
cccggcgtggctcccgtctccgcccgagtcgtaggcgctggccgctgacatgttgaggactacgcgcggcccaggcctgggccccccgctgctccaggccgcgctgggccttgggcgggctgggtggcactggcctgcgggccgggcggcgagcggggggcgcgggcgggcctggctgcagcccacgggccgggagacgggtgtgcaggtgtacaacagcctcaccgggaggaaggaacccctaatcgtggcgcacgccgaagccgcctcctggtatagctgtggaccaactgtatatgatcatgcgcaccttggccatgcttgctcatatgttagatttgatatcattcgaaggatcctaaccaaggtttttggatgcagcatagtcatggtgatgggtattacagatgtagatgataaaatcatcaaaagagccaatgagatgaatatttcccccgcttccctcgccagtctttatgaggaagacttcaagcaggacatggcagccctgaaggttctcccacccacggtgtacctgagggtaaccgaaaatattcctcagataatttctttcattgaaggaatcattgctcgtgggaacgcttattcaacggcaaaaggcaatgtctacttcgatctgaagtctagaggagacaagtatggcaaattggtcggcgtggtccctggtccagtcggagagccagcggactctgacaagcgtcatgccagtgacttcgccctgtggaaggcggccaaaccccaggaggtgttctgggcctctccctggggacccgggaggccgggctggcacatcgagtgctctgccatcgctagtatggtatttggaagtcaactggatatccattcaggtgggatagatttagcttttccacatcatgagaacgaaattgcacagtgcgaagtctttcatcagtgcgagcagtggggaaattattttctgcattctgggcatttgcacgccaaaggcaaagaagaaaaaatgtccaaatcattaaagaactacattactattaaggactttctgaagaccttttcccccgatgtcttccggttcttctgcctgcggagcagctaccgctcagccatcgactacagtgacagcgccatgctccaagctcagcagctgctcctggggctgggctctttcctggaggacgcacgtgcctacatgaaggggcagctggcctgcggctccgtcagggaagcgatgctgtgggagaggctctccagcaccaagagggccgtgaaggcggccttggcagatgattttgacacacccagggtggttgatgccatcctgggccttgcacaccacgggaatggacagctcagggcgtccctgaaggctaccttgcatggtgtggtggacgagctggtgcggttccggcagaaggtccggcagtttgcgctggccatgcccgaggccacgggggacgcccggcggcagcagcctgactgcccacggcatcaacatcaaggacagaagcagtacaacatccacgtgggaactgctggatcaaaggacaaaagaccaaaaatcagcgggctgaggatggagcacagccatgaacctgctcacgacaagacgcacccatgcttctcagggtcaaggctttatgttaaagcttcctgtcggggctgctaggtcagcattaaagtaaggcaaccaacagtg

SEQ ID NO: 283854 - DNA, 1478 bp, Homo sapiens
cccggcgtggctcccgtctccgcccgagtcgtaggcgctggccgctgacatgttgaggactacgcgcggcccaggcctgggccccccgctgctccaggccgcgctgggccttgggcgggctgggtggcactggcctgcgggccgggcggcgagcggggggcgcgggcgggcctggctgcagcccacgggccgggagacgggtgtgcaggtgtacaacagcctcaccgggaggaaggaacccctaatcgtggcgcacgccgaagccgcctcctggtatagctgtggaccaactgtatatgatcatgcgcaccttggccatgcttgctcatatgttagatttgatatcattcgaaggatcctaaccaaggtttttggatgcagcatagtcatggtgatgggtattacagatgtagatgataaaatcatcaaaagagccaatgagatgaatatttcccccgcttccctcgccagtctttatgaggaagacttcaagcaggacatggcagccctgaaggttctcccacccacggtgtacctgagggtaaccgaaaatattcctcagataatttctttcattgaaggaatcattgctcgtgggaacgcttattcaacggcaaaaggcaatgtctacttcgatctgaagtctagaggagacaagtatggcaaattggtcggcgtggtccctggtccagtcggagagccagcggactctgacaagcgtcatgccagtgacttcgccctgtggaaggcggccaaaccccaggaggtgttctgggcctctccctggggacccgggaggccgggctggcacatcgagtgctctgccatcgctagtatggtatttggaagtcaactggatatccattcaggtgggatagatttagcttttccacatcatgagaacgaaattgcacagtgcgaagtctttcatcagtgcgagcagtggggaaattattttctgcattctgggcatttgcacgccaaaggcaaagaagaaaaaatgtccaaatcattaaagaactacattactattaaggactttctgaagaccttttcccccgatgtcttccggttcttctgcctgcggagcagctaccgctcagccatcgactacagtgacagcgccatgctccaagctcagcagctgctcctggggctgggctctttcctggaggacgcacgtgcctacatgaaggggcagctgtcctagaaaggcagcccctgctggaagcatgcgacaccctgcgccggggcctgactgcccacggcatcaacatcaaggacagaagcagtacaacatccacgtgggaactgctggatcaaaggacaaaagaccaaaaatcagcgggctgaggatggagcacagccatgaacctgctcacgacaagacgcacccatgcttctcagggtcaaggctttatgttaaagcttcctgtcggggctgctaggtcagcattaaagtaaggcaaccaacagtg

SEQ ID NO: 283855 - DNA, 1944 bp, Homo sapiens
cccggcgtggctcccgtctccgcccgagtcgtaggcgctggccgctgacatgttgaggactacgcgcggcccaggcctgggccccccgctgctccaggccgcgctgggccttgggcgggctgggtggcactggcctgcgggccgggcggcgagcggggggcgcgggcgggcctggctgcagcccacgggccgggagacgggtgtgcaggtgtacaacagcctcaccgggaggaaggaacccctaatcgtggcgcacgccgaagccgcctcctggtatagctgtggaccaactgtatatgatcatgcgcaccttggccatgcttgctcatatgttagatttgatatcattcgaaggatcctaaccaaggtttttggatgcagcatagtcatggtgatgggtattacagatgtagatgataaaatcatcaaaagagccaatgagatgaatatttcccccgcttccctcgccagtctttatgaggaagacttcaagcaggacatggcagccctgaaggttctcccacccacggtgtacctgagggtaaccgaaaatattcctcagataatttctttcattgaaggaatcattgctcgtgggaacgcttattcaacggcaaaaggcaatgtctacttcgatctgaagtctagaggagacaagtatggcaaattggtcggcgtggtccctggtccagtcggagagccagcggactctgacaagcgtcatgccagtgacttcgccctgtggaaggcggccaaaccccaggaggtgttctgggcctctccctggggacccgggaggccgggctggcacatcgagtgctctgccatcgctagtatggtatttggaagtcaactggatatccattcaggtgggatagatttagcttttccacatcatgagaacgaaattgcacagtgcgaagtctttcatcagtgcgagcagtggggaaattattttctgcattctgggcatttgcacgccaaaggcaaagaagaaaaaatgtccaaatcattaaagaactacattactattaaggactttctgaagaccttttcccccgatgtcttccggttcttctgcctgcggagcagctaccgctcagccatcgactacagtgacagcgccatgctccaagctcagcagctgctcctggggctgggctctttcctggaggacgcacgtgcctacatgaaggggcagctggcctgcggctccgtcagggaagcgatgctgtgggagaggtaagaggcccgcctagcacccggcgtggcacccctcctgtggcctgctgggtgctgctggtgggctcttgaaggggaagaggggcccccaggagacagggcgctggacaggaggttctggggtcagggactgcccagagaggccccaggagacagggtgctgggcaggaggtgcaggtgtggggtcaggggctccccagaggccacaggggactgggagctggacaggaggtgtggggtcaggggctccccagaggccacaggacactgggtgctggacaggaggtgtggggtcaggggctcccgagacatcccagggagacggcgctggcaggaagtgtgcctggggccctcgggctctgagccccctgctcagagtggctttgggctcgggttccctgtgcgaggagcggagctgctcatccctcccagtcctgactgtgaggagccaaaatctataaaacacacaggcctgggcccacagcatcgcctccactccccacccacgggtgtcctgggcagcgctgcacattcatcccggcatgcagagtcttccggatggtcttggtgataacccacccctgccacttcagcagggtaggcagccagtggccacgggaggctgagatccgggagccccgggctgggcctccccagcctctctttgtgagtggtcagccgtgccgtctctcccccaccgag

SEQ ID NO: 283856 - DNA, 1691 bp, Homo sapiens
cccggcgtggctcccgtctccgcccgagtcgtaggcgctggccgctgacatgttgaggactacgcgcggcccaggcctgggccccccgctgctccaggccgcgctgggccttgggcgggctgggtggcactggcctgcgggccgggcggcgagcggggggcgcgggcgggcctggctgcagcccacgggccgggagacgggtgtgcaggtgtacaacagcctcaccgggaggaaggaacccctaatcgtggcgcacgccgaagccgcctcctggtatagctgtggaccaactgtatatgatcatgcgcaccttggccatgcttgctcatatgttagatttgatatcattcgaaggatcctaaccaaggtttttggatgcagcatagtcatggtgatgggtattacagatgtagatgataaaatcatcaaaagagccaatgagatgaatatttcccccgcttccctcgccagtctttatgaggaagacttcaagcaggacatggcagccctgaaggttctcccacccacggtgtacctgagggtaaccgaaaatattcctcagataatttctttcattgaaggaatcattgctcgtgggaacgcttattcaacggcaaaaggcaatgtctacttcgatctgaagtctagaggagacaagtatggcaaattggtcggcgtggtccctggtccagtcggagagccagcggactctgacaagcgtcatgccagtgacttcgccctgtggaaggcggccaaaccccaggaggtgttctgggcctctccctggggacccgggaggccgggctggcacatcgagtgctctgccatcgctagtatggtatttggaagtcaactggatatccattcaggtgggatagatttagcttttccacatcatgagaacgaaattgcacagtgcgaagtctttcatcagtgcgagcagtggggaaattattttctgcattctgggcatttgcacgccaaaggcaaagaagaaaaaatgtccaaatcattaaagaactacattactattaaggactttctgaagaccttttcccccgatgtcttccggttcttctgcctgcggagcagctaccgctcaggtgagccgagcacacgtggagtggactccccccccagctcggagacagtcattctgacaggactgaaaacagcaaaatgcaggccagagaataagcagaaccttgttgagtgaggctgctgtgtgccttacggttcgggttgagagtgaacccagaggacgagggatcccagtgctggtctgggcccggcccacagtggatgtgggcttcctcgtcaagctcgagtcctctccactccttctctctgggtctggacaagtcgtgaacccgcagcacctcggcttcctgctgtgtgaactgggagattggaaggggccagcctggcacggcccctgaacatgggagccctcaaacgtgaccctgcctgtcctgcccaggggcagcacttccccgaacggtgtgtagcagagcaaggtctcctggatgggtgatgacggttcctcccatgctgcacagttacctgctgccccgggctaggctcttggccaggagttgtctagcactggcctggcatggtggctcacgtgtatgatcccagcactttgggaggccgaggctggcagatgttttgagtccaggagtttgaga

SEQ ID NO: 283857 - DNA, 2465 bp, Homo sapiens
ggcaccgcctcagtgaccatctcttcctcctcagccatcgactacagtgacagcgccatgctccaagctcagcagctgctcctggggctgggctctttcctggaggacgcacgtgcctacatgaaggggcagctggcctgcggctccgtcagggaagcgatgctgtgggagaggctctccagcaccaagagggccgtgaaggcggccttggcagatgattttgacacacccagggtggttgatgccatcctgggccttgcacaccacgggaatggacagctcagggcgtccctgaaggaacctgaagggccgagaagtcctgctgtgtttggtgccatcatctcttactttgaacagttttttgaaactgttggaatttctctggcaaatcaacagttggcaaactctcgtgcgcagaaccagagatgagtccatctcagcaacagaatgtcgccagctctgcacacacgtttatgttcaaagactctcagaatgtgcagaagtcacaggcacaacagtaagagaacattttttcctgacccatttgagggcaagttggcgacctgagcccccttgcctggcacatgttttgtacggacaggacgggctccccgacaggcacgagtcacctgcaccttcccagcgaggctcaccctggctgtgcagtgaaggtggacgctgccaggcttctccacattccttctcttccgttgtaactcaagagcatttttgcaaagagacttggatcctatgaaaatgtcctcttccttatcaggctcacctgaaactcgtttattctatcaatacagatttgaggtttcctgccttattcttaaagtccccaccatcactttgtatgtggctgacagaggccccttggggctggcgctgtgtccctgaacatccctgtcattctttggacacccttgtagaattctcagcacaaggcgctctggctcttttggggtgtggctcggctgctgctgcctggacgggggctgccactctagaccagctgcccagcaccccgagggtcccgccgcttgggactggggcccaagcaggtgtgctgaaggcctggctctgggccaaacatgtctcgctggctctcaacagagaactatagtgtcttttccaagtttggctcatttgtatacctgttgatcacctggtagacttagttcccctttccagcagtccggcgtctgttgccaatcacataaaagtcgactggtgtgagatgacccaagtttttgcaatgtacatgttcatttttaggggtggctttccggagtctgttttgagtaagaaaagtgggatctggccaagctctgcctagcccttgtcaaagatatctcattcaccttcctctggccgcaaggcccaatgtctgggcccactctgggctcatatttctgtaataacaaaaactgtcttttatcatggaagcaataactgaggggtgtgtgaggtttaagtagtttgacaccaaggtcaaatgttgtgtctgtttcttattttacacacatggatttaacaaataggtacagctgccccttccacaccgccccaggatctgttctcagtgggaggacagcgcgaggccttctgcgcaaatcccgtcctcagcacctgaggctgtgaatctcagaccatttgccgaaacacacgtgtgcaagcgctcagtcgctgccccccagcctcatcctcaggttgctcctgatacctcggccacaattgcgtgaggtctggaagccagggagcgtttgtgttcagggcggggcggcatgcagcccccagccctttcttccaactcccgagtgaggatcactcagccttgcttggacgacagatgctcagagttgagtggagccttgcccagagcccagcgctcgcgggctgtacccatccctgccagacccagaaagaggcccagctgcagggaatcagggaagcccagggctgggtgggtgtcggcccagagcccaaccacggggtggggaggggggcatccacaatccacagtctccgggggacgtaaccgcgccctgctggcttcagtacgtttcaggagacggcagcgaggctaccttgcatggtgtggtggacgagctggtgcggttccggcagaaggtccggcagtttgcgctggccatgcccgaggccacgggggacgcccggcggcagcagctcctagaaaggcagcccctgctggaagcatgcgacaccctgcgccggggcctgactgcccacggcatcaacatcaaggacagaagcagtacaacatccacgtgggaactgctggatcaaaggacaaaagaccaaaaatcagcgggctgaggatggagcacagccatgaacctgctcacgacaagacgcacccatgcttctcagggtcaaggctttatgttaaagcttcctgtcggggctgctaggtcagcattaaagtaaggcaaccaacagtg

SEQ ID NO: 283858 - DNA, 1184 bp, Homo sapiens
ggccttgcctgtcactttttccagaggcgagggtcgcggaggggacagcgtcagggccgctggggtgtggacggcgggcgaggcgcaaactttactaggagtttttggcacttggaggcagagcctgttgggcggcacagcacgcccgctgggaaacgcaggggagcggcctgcttcgctgaaaacccgaccaggacctaacgggccgcgggacagaaacctccgagaccatggtacacagcaactaccgcaactcgctcctcagcccctgactcttcgtccccgccccacagagcagtataagtagggcccgaaacagaactggcaaccgcagtagccaatctacttgccaacatcactttgacagcccaatcacgatgaagaggaggcggggagaccgcggagtctccctctgttgcccaggctgcagtgcagtggtgtgacctcagctcactgtgagctctgcctcctgggttcaagcgattctcttgtctcagcctccccagtagctgggactacagatgcacgccaccacgcccggctaatttgtgtatttttagtagagacggggtttcaccatattggtcaggctggtctcgaactcctgacctcaggtgatccatccgcctcagcctcccaaagtgctgggattacaggtgtgagccactgcgcctggcccaatagaggcacgtttgtcaagctattgtgagtaactttcagaatgtttttgttctcaagatacgggatcatggtgggggaggcatgctgtgtattggagtgcagacatggtgtgtgttgggttgcacactgtgtattggggtgcacactgtattggggtgtagatgtgtgggggcgcacactctattgaggtgcacattgcattggaatgcagacagtgtttgctgggatgcacatgtgctgtgttggggtgcacactgtactggggtgcagacatggtgtgtgttagagtgcacagtgtattaggggtgcacactgtattggggtgtacactgtactggggtgcagacatggtgtgtgctggggtgcacactgtattggagtgcacactgtattgggatgctgatgtggtgtgtgctagggtgcatactgtgtattggggtgcagactgtatgctgggttgcacactgtgtatcggggtgcactgtgttgggatgctgatggtg

SEQ ID NO: 283859 - DNA, 2693 bp, Homo sapiens
caccggtcccccttcctgccaacgctgcatttggctcgggcccggtccatggcggcccctcggaccctgcgctgagccccggaggccagggcgtccggggctgcgccacttccgagggccgagcgctgccggtcccggcggtgcgacacggccgggaggaggagaacaacgcaaggggctcaaccgtcggtcgctggagccccccccggggcgtggcctcccgccccctcagctggggagggcggggctcgctgccccctgctgccgactgcgacccttacaggggagggagggcgcaggccgcgcggagatgaggaggaggctgcgcctacgcagggacgcattgctcacgctgctccttggcgcctccctgggcctcttactctatgcgcagcgcgacggcgcggccccgacggcgagcgcgccgcgagggcgagggagggcggcaccgaggcccacccccggaccccgcgcgttccagttacccgacgcgggtgcagccccgccggcctacgaaggggacacaccggcgccgcccacgcctacgggaccctttgacttcgcccgctatttgcgcgccaaggaccagcggcggtttccactgctcattaaccagccgcacaagtgccgcggcgacggcgcacccggtggccgcccggacctgcttattgctgtcaagtcggtggcagaggacttcgagcggcgccaagccgtgcgccagacgtggggcgcggagggtcgcgtgcagggggcgctggtgcgccgcgtgttcttgctgggcgtgcccaggggcgcaggctcgggcggggccgacgaagttggggagggcgcgcgaacccactggcgcgccctgctgcgggccgagagccttgcgtatgcggacatcctgctctgggccttcgacgacaccttttttaacctaacgctcaaggagatccactttctagcctgggcctcagctttctgccccgacgtgcgcttcgtttttaagggcgacgcagatgtgttcgtgaacgtgggaaatctcctggagttcctggcgccgcgggacccggcgcaagacctgcttgctggtgacgtaattgtgcatgcgcggcccatccgcacgcgggctagcaagtactacatccccgaggccgtgtacggcctgcccgcctatccggcctacgcgggcggcggtggctttgtgctttccggggccacgctgcaccgcctggctggcgcctgtgcgcaggtcgagctcttccccatcgacgacgtctttctgggcatgtgtctgcagcgcctgcggctcacgcccgagcctcaccctgccttccgcacctttggcatcccccagccttcagccgcgccgcatttgagcaccttcgacccctgcttttaccgtgagctggttgtagtgcacgggctctcggccgctgacatctggcttatgtggcgcctgctgcacgggccgcatgggccagcctgtgcgcatccacagcctgtcgctgcaggccccttccaatgggactcctagctccccactacagccccaagctcctaactcagacccagaatggagccggtttcccagattattgccgtgtatgtggttcttccctgatcaccaggtgcctgtctccacaggatcccaggggatgggggttaagcttggctcctggcggtccaccctgctggaaccagttgaaacccgtgtaatggtgaccctttgagcgagccaaggctgggtggtagatgaccatctcttgtccaacaggtcccagagcagtggatatgtctggtcctcctagtagcacagaggtgtgttctggtgtggtggcagggacttagggaatcctaccactctgctggatttggaaccccctaggctgacgcggacgtatgcagaggctctcaaggccaggccccacagggaggtggaggggctccggccgccacagcctgaattcatgaacctggcaggcactttgccatagctcatctgaaaacagatattatgcttcccacaacctctcctgggcccaggtgtggctgagcaccagggatggagccacacataagggacaaatgagtgcacggtcctacctagtctttcctcacctcctgaactcacacaacaatgccagtctcccactggaggctgtatcccctcagaggagccaaggaatgtcttcccctgagatgccaccactattaatttccccatatgcttcaaccacccccttgctcaaaaaaccaatacccacacttaccttaatacaaacatcccagcaacagcacatggcaggccattgctgagggcacaggtgctttattggagaggggatgtgggcaggggataaggaaggttcccccattccaggaggatgggaacagtcctggctgcccctgacagtggggatatgcaaggggctctggccaggccacagtccaaatgggaagacaccagtcagtcacaaaagtcgggagcgccacacaaacctggctataaggcccaggaaccatataggagcctgagacaggtcccctgcacattcatcattaaactatacaggatgaggctgtacatgagttaattacaaaagagtcatatttacaaaaatctgtacacacatttgaaaaactcacaaaattgtcatctatgtatcacaagttgctagaccaaaatattaaaaatgggataaaattat

SEQ ID NO: 283860 - DNA, 227 bp, Homo sapiens
ctcccagtctccctgcccggccctgggtcgcagtcctgggccggagctgaggccgcgggggagttggctacatgggtgaacttcttgtcccttcaggctgccggtcccggcggtgcgacacggccgggaggaggagaacaacgcaaggggctcaaccgtcggtcgctggagccccccccggggcgtggcctcccgccccctcagctggggagggcggggctcgctgc

SEQ ID NO: 283861 - DNA, 805 bp, Homo sapiens
ccgggatccccgcccgcgcgccgcgtcccacgtaccccgccgcgccgggcaagaagatggcgggatcagtggccgacagcgatgccgtggtgaaactagatgatggccatttaaacaactctttgagctctccagttcaagcggacgtgtacttcccacgactgatagttccattttgtgggcacattaaaggtggcatgagaccaggcaagaaggtgttagtgatgggcatcgtagacctcaacccagagagctttgcaatcagcttgacctgtggggactcagaagaccctcctgccgatgtggcaatcgaactcaaagctgtgttcacagatcggcagctactcagaaattcttgtatatctggggagaggggtgaagaacagtcagcaatcccttactttccattcattccagaccagccattcagggtggaaattctttgtgagcacccacgtttccgagtgtttgtggatggacaccaactttttgatttttaccatcgcattcaaacgttatctgcaattgacaccataaagataaatggagacctccagatcaccaagcttggctgatttaaaccacctctatttcaaataggatcacgtgccacaactatctgactgttggtctggaagaagtgtcctagcaagatctggagacttaaaaagaaaacaaaaacaaatggcaagtttcacttaagggtggtttgcccttaagaagaaagctgttgggacaaagacaccgagccattatacccagaataaaataatacatttatgctggattttattcagaccaaact

SEQ ID NO: 283862 - DNA, 1786 bp, Homo sapiens
ccgggatccccgcccgcgcgccgcgtcccacgtaccccgccgcgccgggcaagaagatggcgggatcagtggccgacagcgatgccgtggtgaaactagatgatggccatttaaacaactctttgagctctccagttcaagcggacgtgtacttcccacgactgatagttccattttgtgggcacattaaaggtggcatgagaccaggcaagaaggtgttagtgatgggcatcgtagacctcaacccagagagctttgcaatcagcttgacctgtggggactcagaagaccctcctgccgatgtggcaatcgaactcaaagctgtgttcacagatcggcagctactcagaaattcttgtatatctggggagaggggtgaagaacagtcagcaatcccttactttccattcattccagaccagccattcagggtggaaattctttgtgagcacccacgtttccgagtgtttgtggatggacaccaactttttgatttttaccatcgcattcaaacgttatctgcaattgacaccataaagataaatggagacctccagatcaccaagcttggctgatttaaaccacctctatttcaaataggatcacgtgccacaactatctgactgttggtctggaagaagtgtcctagcaagatctggagacttaaaaagaaaacaaaaacaaatggcaagtttcacttaagggtggtttgcccttaagaagaaagctgttgggacaaagacaccgagccattatacccagaataaaataatacatttatgctggattttattcagaccaaactaaaatggatttgtgatgatttgtgatttggtagcaaattattcatcttttcaaagcaaggcaatgcttagaaacagaagtgctaaagacacttaaaaagccaacaacaacggtacagtgaaatcaatgcatttctgcactaaagtggaattgtgtagcacaaccaatattttagtcagggtatttacatagaatgtaggttgttcaaggtttgactttttttttgttttttgtttttgtttttgtttttgttttgcacagcataatgttaattcagattgttgaagctttcttgtagttatttatttatactcaatgtatgtattaaagaatgaacaatgtctcaagaacagcaagttgtaaacttttgaatgtataaatatcttaggtccaaggggagaaaattacatattacaattatgaaacaggtgaatttctgctttaaagaattgagattctccatacccctaaacttaggatctcttgatataaactgctgtaagtgcttttgggaaacctttgcaaaaccattttgataaaactgctttccaagttattgttggttatgtaaaattctatttacattgctttttctccttactgggaattagcacattattggcttccttaagactaattatttctctcttgatttatataatagctcattaagttgttattaatcaaaaacacaaagaggtgattgcttagacaatttttaaagtgactatagtataaacttttaaaagaataatatgaaaatgactgtggaatgcagtgtaaagcagaagcaaacggccctgaataacttacttggaagtaatttatatcaacttaagctgttagctcattgtataacttttcttatgtgaccctcaccaatatccctaagtaatgcctttggaagcttcagagtagaagatgcttcctactgtgttggctctgaggagatagtaggattagataggatccagattaggaa

SEQ ID NO: 283863 - DNA, 655 bp, Homo sapiens
ccgggatccccgcccgcgcgccgcgtcccacgtaccccgccgcgccgggcaagaagatggcgggatcagtggccgacagcgatgccgtggtgaaactagatgatggccatttaaacaactctttgagctctccagttcaagcggacgtgtacttcccacgactgatagttccattttgtgggcacattaaaggtggcatgagaccaggcaagaaggtgttagtgatgggcatcgtagacctcaacccagagagctttgcaatcagcttgacctgtggggactcagaagaccctcctgccgatgtggcaatcgaactcaaagctgtgttcacagatcggcagctactcagaaattcttgtatatctggggagaggggtgaagaacagtcagcaatcccttactttccattcattccagaccagccattcaggttggaattcttgttagcaccacgtttcgagtgttgtgatgacacacttttgatttacatcgattcaacgtatcgcatgcacctagtaatggacctcagatacagcttgctgattaacacttattcaatggtacgtccaactatcacttggctgagagttctgcagctggactaaagacaacaatgagtactaggtgtcctaggagcttggcagaccgccttccg

SEQ ID NO: 283864 - DNA, 462 bp, Homo sapiens
aggaaaaagcttttacacttacattctacacaggaatcagaaattttggaggtagagcccaacaatctgtgttctaacaagccctctgcaggtctcaatgcattctgatgtttgtgaaccactgaagatactgcctttctttctctaaaatgaagtattgtttgttttccccagtagcgttcattgaaattgtggattattattttgtttcttccaggtggaaattctttgtgagcacccacgtttccgagtgtttgtggatggacaccaactttttgatttttaccatcgcattcaaacgttatctgcaattgacaccataaagataaatggagacctccagatcaccaagcttggctgatttaaaccacctctatttcaaataggatcacgtgccacaactatctgactgttggtctggaagaagtgtcctagcaagatctggagacttaaaaagaaaac

SEQ ID NO: 283865 - DNA, 376 bp, Homo sapiens
ggaaattctttgtgagcacccacgtttccgagtgtttgtggatggacaccaactttttgatttttaccatcgcattcaaacgttatctgcaattgacaccataaagataaatggagacctccagatcaccaagcttggctgatttaaaccacctctatttcaaataggatcacgtgccacaactatctgactgttggtctggaagaagtgtcctagcaagatctggagacttaaaaagaaaacaaaaacaaatggcaagtttcacttaagggtggtttgcccttaagaagaaagctgttgggacaaagacaccgagccattatacccagaataaaataatacatttatgctggattttattcagaccaaactaaaa

SEQ ID NO: 283866 - DNA, 531 bp, Homo sapiens
gcggccgccggcatctgcccaactcgctcgcgctttccgcccagggttctgaaaaatagaagaaaaaaggacaggctagagtgcagtggcgccatctcagctaactgcaacctctgcctcccaggttcaagcgattctcctgcctcaacctcccgagtagctgggaatacagctgcacgcttccattcccagccccagccagagaagaggagccaactcctcacggcagatcccttgatagaggaggatgaaccgaatccatgaccctccagacccgggaagcgacgcaccctaggccttggcaccgcaaagcccgtgctgagcgcacggacgggtgctgcccgggactcggccaggagggcgcccatgccaacgcctcttgcaggattagtgccttcggttggcaaaaggcggataaaggaagagcgaaaccacatcaggaagctaagggtggtccacgctccctgtccttttacttcccgcgccaaaggcacagtgaggcttgcttagaaaagtccatcccgcgattgg

SEQ ID NO: 283867 - DNA, 547 bp, Homo sapiens
aggaaagaaaatctcagcgtcaccatggactctggattttgctactgctccttttcccactccacctcttgctgactgtgtgtcttggctaagttttctcactcttctatccctcagttgcctcatcagtaaaagggcagtggtaacaccagcctctttgggctgctctgtgctgactagacgtggtattacataaacagcactggcacagccctgcctagggaagtcacccacagagggcccgtgtgtacaaaggtgttgcttgtatcctctggccatctcggtgccatcttcctggctcctatctccagccaatcagtcacctgacttgagaagtatctcaatttgaggcactggtagcaaaatataggaagctaaacaagtgatgtatgattatcagtgtcagttgaattccaaaggcatcaaaaaaggcagtcaattcaatcagagagagatggcggattttcttcatgtcttcagcagacagatctcctgcttcagttaagccaaatctggttttctgaacattaaatttctaaaacacaca

SEQ ID NO: 283868 - DNA, 499 bp, Homo sapiens
agcgcctcctgcaagacctggaagaaagaaaagtaacgattcttctcggccagagagagaagcatgaccggttttgcataccctgtccccagaaaaagcactctaagagtaggcgcgctactcctgggcgaggaaactgcggaagtgaggcattggtgccaggttcaaagatggcgctgagcagccaagcgcagaagcgaagagagggcggcagcctgcggccgtggccggcccgcgaggtctgggcctgggagcgcagatctggctgagcagctgattcttccagcagatccgagaaccgcgccactcgaacaggctgtcacctcgaagccaagtgatctccctttaatcctcagtctctgtctcaatagaatgatgatgaaaaatattcctacggagatcctaaatgtggttaaaaagctgggaggcccaaatgaggtcttctacagaaacatgcttattaaatcgaaattaaaagcaaataactaaaaaaaaaaaa

SEQ ID NO: 283869 - DNA, 884 bp, Homo sapiens
acttgtctgaggaaagacaggaaagcgccagcatctccaccttccccggaagcctccctttgccaggcagaaagggtttcccatggggccgcccctggcgccgcgcccggcccacgtacccggggaggccgggccccggaggacgagggaaagcaggccgggcgccgtgagcttcgcggacgtggccgtgtacttctctcccgaggagtgggaatgcctgcggccagcgcagagggccctgtaccgggacgtgatgcgggagaccttcggccacctgggcgcgctgggattttcagttcccaaacccgcttttatctcgtgggtggaaggagaagtggaggcgtggagcccggaggcccaggatcccgacggtgagagctctgcagctttcagcaggggccaaggacaggaagcaggatccagggatgggaatgaggagaaggaaaggctgaagaagtgtccaaaacaaaaagaggtggcgcatgaagtggctgtcaaggagtggtggcccagcgtcgcctgcccagagttctgcaaccctaggcagagccccatgaatccctggctcaaggacactctgacccgaagactgccccactcttgcccagactgtggccgcaacttcagctacccttccctcctggccagccaccagcgggtccactccggggagcggcccttctcctgcggccagtgtcaggcgcgtttctcccagcgcaggtacctgctccagcatcagttcatccacaccggcgagaagccctacccctgccccgactgcgggcgccgcttccgccagaggggttccctggctatccacaggcgggctcacaccggggagaagccttacgcgtgctcagactgcaagagtcgcttcacttacc

SEQ ID NO: 283870 - DNA, 1635 bp, Homo sapiens
ccacacaggtgaataattcgataaaacccctaagagaacgcatctgtgtgtcaatgcaagagaaaaaaattaagagggtgtaaatccatctgttggaagatcaacaattggaacgagtttggaaatgttcatctggacagaagtaaaaatgaaaaagtatcaagaaaatcaaccagtcagacaggaaataaaagctcaaaaaggaaacaggtggattggatggtgaaaatattctctgtgataatagaaatgaaccacctcaacataaaaatgctaaaatacctaagaaatcaaatgattcacagaatagattgtacggcaaactagctaaagtagcaaaaagtaataaatgtactgccaaggacaagttgatttctggccaggcaaagttaactcagttttttagactataaatttgtgtcttatatgctttaggtttatgtatctataaaccattcaccaaagacatgcttaatttttaagagatcaaggtgtaaattatgatgatttattattttggtctacagtgtatgtaaggttagtatgttaagcattgtttaaaaatactagtaagtcataattatgcagaattttcacaaagtttaatgcacagagaaagcatatcatttcagttactgatacatcttaacactactttcttttaaaacagacatttaacatacacaagttatagtagcagtatgggcttctcctcccattggcaattaaatgcttttattttcttctgaaaagatgatgtggaccaacaggtatcagacttgccaacaaggtcggtagactcttcccagcatacatctgagcactgaaggaagaagaaagtttaaattgtttaaaggactataattatcacacaaaatttattaagaaaaaaagaatggatctagtataactaattctgagtaaaccaaaatgataataattaattgttgctatttaatcccacatttttggcaggtgtaattgagccatggtcttatttgattttgttatgattgcatccaaattcactttaactcagagttctgtttaatggtggtaggatgtaagaattgaattttgaaaagactactcactgtcaaaatctctccttcctataggaaatttagctgagttttcttcatccccaatttctctcttttcttgtgttgattcagtattctgaactccattctcagctgggaaagctacagatccttttagtgcaagataaggttttatagccagattcagtggcagaccatgatttaagaaattatgtttggagcctgtgttctgtaaagagaaggttgatttggtttttagctatcgtattcggagtggaactataatacaattgtataatattcttgttgatcaattcaaagttactctgcactgtttttgactttttaaaaataccttagatgcaaatttataggagaaaaaacactttcagataagaggtgtttgctgggatggaagaactacctggcatgtaagaaatatcgtcagtcgtcctaatgcatattgtgactgtttgcatatacttctgtttataaaagtatcagttttacttttcagaggatttgtaagaatcatttaaattttcattgaaataaacgacaagtcacattg

SEQ ID NO: 283871 - DNA, 1897 bp, Homo sapiens
ccacacaggtgaataattcgataaaacccctaagagaacgcatctgtgtgtcaatgcaagagaaaaaaattaagatgaagcaaactttaattagatcccaatttgcttgtacttataaagatgactacatgataagcaaggataattggaataatgttaatttagcatcaaagcctttgtgtgttctttacatggaaaatgacctttctgagggtgtaaatccatctgttggaagatcaacaattggaacgagtttggaaatgttcatctggacagaagtaaaaatgaaaaagtatcaagaaaatcaaccagtcagacaggaaataaaagctcaaaaaggaaacaggtggattggatggtgaaaatattctctgtgataatagaaatgaaccacctcaacataaaaatgctaaaatacctaagaaatcaaatgattcacagaatagattgtacggcaaactagctaaagtagcaaaaagtaataaatgtactgccaaggacaagttgatttctggccaggcaaagttaactcagttttttagactataaatttgtgtcttatatgctttaggtttatgtatctataaaccattcaccaaagacatgcttaatttttaagagatcaaggtgtaaattatgatgatttattattttggtctacagtgtatgtaaggttagtatgttaagcattgtttaaaaatactagtaagtcataattatgcagaattttcacaaagtttaatgcacagagaaagcatatcatttcagttactgatacatcttaacactactttcttttaaaacagacatttaacatacacaagttatagtagcagtatgggcttctcctcccattggcaattaaatgcttttattttcttctgaaaagatgatgtggaccaacaggtatcagacttgccaacaaggtcggtagactcttcccagcatacatctgagcactgaaggaagaagaaagtttaaattgtttaaaggactataattatcacacaaaatttattaagaaaaaaagaatggatctagtataactaattctgagtaaaccaaaatgataataattaattgttgctatttaatcccacatttttggcaggtgtaattgagccatggtcttatttgattttgttatgattgcatccaaattcactttaactcagagttctgtttaatggtggtaggatgtaagaattgaattttgaaaagactactcactgtcaaaatctctccttcctataggaaatttagctgagttttcttcatccccaatttctctcttttcttgtgttgattcagtattctgaactccattctcagctgggaaagctacagatccttttagtgcaagataaggttttatagccagattcagtggcagaccatgatttaagaaattatgtttggagcctgtgttctgtaaagagaaggttgatttggtttttagctatcgtattcggagtggaactataatacaattgtataatattcttgttgatcaattcaaagttactctgcactgtttttgactttttaaaaataccttagatgcaaatttataggagaaaaaacactttcagataagaggtgtttgctgggatggaagaactacctggcatgtaagaaatatcgtcagtcgtcctaatgcatattgtgactgtttgcatatacttctgtttataaaagtatcagttttacttttcagaggatttgtaagaatcatttaaattttcattgaaataaacgacaagtcacattggccactttcctttgaaactttattttcctcttcgttcatgaaactgctctcatcatttttatattgttccagggaaggagcaataactgatttttctgcagtgtcttccttctgaaagcctttccc

SEQ ID NO: 283872 - DNA, 1771 bp, Homo sapiens
ccacacaggtgaataattcgataaaacccctaagagaacgcatctgtgtgtcaatgcaagagaaaaaaattaagatgaagcaaactttaattagatcccaatttgcttgtacttataaagatgactacatgataagcaaggataattggaataatgttaatttagcatcaaagcctttgtgtgttctttacatggaaaatgacctttctgagggtgtaaatccatctgttggaagatcaacaattggaacgagtttggaaatgttcatctggacagaagtaaaaatgaaaaagtatcaagaaaatcaaccagtcagacaggaaataaaagctcaaaaaggaaacaggtggattggatggtgaaaatattctctgtgataatagaaatgaaccacctcaacataaaaatgctaaaatacctaagaaatcaaatgattcacagaatagattgtacggcaaactagctaaagtagcaaaaagtaataaatgtactgccaaggacaagttgatttctggccaggcaaagttaactcagttttttagactataaatttgtgtcttatatgctttaggtttatgtatctataaaccattcaccaaagacatgcttaatttttaagagatcaaggtgtaaattatgatgatttattattttggtctacagtgtatgtaaggttagtatgttaagcattgtttaaaaatactagtaagtcataattatgcagaattttcacaaagtttaatgcacagagaaagcatatcatttcagttactgatacatcttaacactactttcttttaaaacagacatttaacatacacaagttatagtagcagtatgggcttctcctcccattggcaattaaatgcttttattttcttctgaaaagatgatgtggaccaacaggtatcagacttgccaacaaggtcggtagactcttcccagcatacatctgagcactgaaggaagaagaaagtttaaattgtttaaaggactataattatcacacaaaatttattaagaaaaaaagaatggatctagtataactaattctgagtaaaccaaaatgataataattaattgttgctatttaatcccacatttttggcaggtgtaattgagccatggtcttatttgattttgttatgattgcatccaaattcactttaactcagagttctgtttaatggtggtaggatgtaagaattgaattttgaaaagactactcactgtcaaaatctctccttcctataggaaatttagctgagttttcttcatccccaatttctctcttttcttgtgttgattcagtattctgaactccattctcagctgggaaagctacagatccttttagtgcaagataaggttttatagccagattcagtggcagaccatgatttaagaaattatgtttggagcctgtgttctgtaaagagaaggttgatttggtttttagctatcgtattcggagtggaactataatacaattgtataatattcttgttgatcaattcaaagttactctgcactgtttttgactttttaaaaataccttagatgcaaatttataggagaaaaaacactttcagataagaggtgtttgctgggatggaagaactacctggcatgtaagaaatatcgtcagtcgtcctaatgcatattgtgactgtttgcatatacttctgtttataaaagtatcagttttacttttcagaggatttgtaagaatcatttaaattttcattgaaataaacgacaagtcacattg

SEQ ID NO: 283873 - DNA, 1771 bp, Homo sapiens
ccacacaggtgaataattcgataaaacccctaagagaacgcatctgtgtgtcaatgcaagagaaaaaaattaagatgaagcaaactttaattagatcccaatttgcttgtacttataaagatgactacatgataagcaaggataattggaataatgttaatttagcatcaaagcctttgtgtgttctttacatggaaaatgacctttctgagggtgtaaatccatctgttggaagatcaacaattggaacgagtttggaaatgttcatctggacagaagtaaaaatgaaaaagtatcaagaaaatcaaccagtcagacaggaaataaaagctcaaaaaggaaacaggtggattggatggtgaaaatattctctgtgataatagaaatgaaccacctcaacataaaaatgctaaaatacctaagaaatcaaatgattcacagaatagattgtacggcaaactagctaaagtagcaaaaagtaataaatgtactgccaaggacaagttgatttctggccaggcaaagttaactcagttttttagactataaatttgtgtcttatatgctttaggtttatgtatctataaaccattcaccaaagacatgcttaatttttaagagatcaaggtgtaaattatgatgatttattattttggtctacagtgtatgtaaggttagtatgttaagcattgtttaaaaatactagtaagtcataattatgcagaattttcacaaagtttaatgcacagagaaagcatatcatttcagttactgatacatcttaacactactttcttttaaaacagacatttaacatacacaagttatagtagcagtatgggcttctcctcccattggcaattaaatgcttttattttcttctgaaaagatgatgtggaccaacaggtatcagacttgccaacaaggtcggtagactcttcccagcatacatctgagcactgaaggaagaagaaagtttaaattgtttaaaggactataattatcacacaaaatttattaagaaaaaaagaatggatctagtataactaattctgagtaaaccaaaatgataataattaattgttgctatttaatcccacatttttggcaggtgtaattgagccatggtcttatttgattttgttatgattgcatccaaattcactttaactcagagttctgtttaatggtggtaggatgtaagaattgaattttgaaaagactactcactgtcaaaatctctccttcctataggaaatttagctgagaatggagttcagaatactgaatcaacacaagaaaagagagaaattggggatgaagaaaactcagctgggaaagctacagatccttttagtgcaagataaggttttatagccagattcagtggcagaccatgatttaagaaattatgtttggagcctgtgttctgtaaagagaaggttgatttggtttttagctatcgtattcggagtggaactataatacaattgtataatattcttgttgatcaattcaaagttactctgcactgtttttgactttttaaaaataccttagatgcaaatttataggagaaaaaacactttcagataagaggtgtttgctgggatggaagaactacctggcatgtaagaaatatcgtcagtcgtcctaatgcatattgtgactgtttgcatatacttctgtttataaaagtatcagttttacttttcagaggatttgtaagaatcatttaaattttcattgaaataaacgacaagtcacattg

SEQ ID NO: 283874 - DNA, 406 bp, Homo sapiens
ttctccagcagaaactttcttgtgcaggaactgatgagaaagaaatgagttcattaaaaaccaagggaaggaatgatgccatcctcacctactgaggccaggttccggaaggtctccagcatcacatctctgtagaggtccctctgagcagaatccagcaaagcccactcctccagggtgaagtccacagccacatcctcaaagaccactgagtcctaagacaaaccacacaggtgtgcaggaggattggagacactgaaagtactggggaactggactcaattcataaattcaaacaagattctgtggtgtcccaacacctcctctatgacgcgaatgttagatcttttacttattcacaatcacttcctagtaaacttcatggcaccactatcagtctgaactt

SEQ ID NO: 283875 - DNA, 752 bp, Homo sapiens
ccagctgtatcttcttttaccgatgaggacactgacagagacagggtctcactctgtcacccaggagtacagtggcacgatcatagctcaacgtaaactggaacttctgggcttaagcgatgctctcgcttcagcctcccaagtacctgggaccacagcagggaaaaagcaaatcctggaggaagctcaccttctccacactgctcatcgcctggaaatagatgttgtatcctttgcgcggagccaaaggagggttccaaaagccttgtccttcaatccacatttcaattaacttccttgttctcccaatacctcatattgagtgatgattccatttggatccaaaggttctttccagttcaagaagatcttattttcaaaggatgttccttgaagagattttactgtgaacttcacacatgacattatccagaaatgtagtttcaaagtatatagcaattttgtgaggattgaaataaattaaaaatcactggatcaagggaaatacattgcattgtggctaggagcatcaagaaattctgaatgatatctcacgagagcaggatttatttcaatctacaaggagactatgaatgatactatgacctctgagacaggcaacataatttgatacattgaggaaagaaacccacaataaacagaaaatatgccagcactaaactttagaagatatgttcaagccattgtcagccgaagactatgagagaagttaactgaatgcatccgctctc

SEQ ID NO: 283876 - DNA, 433 bp, Homo sapiens
aaaaaatgtgtttctttttgaaaatatcaactgaatattgggcaagcatagtttttaattaatattttcccttaatctaacgtttcagtgaacttcacacatgacattatccagaaatgtagtttcaaagtatatagcaattttgtgaggattgaaataaattaaaaatcactggatcaagggaaatacattgcattgtggctaggagcatcaagaaattctgaatgatatctcacgagagcaggatttatttcaatctacaaggagactatgaatgatactatgacctctgagacaggcaacataatttgatacattgaggaaagaaacccacaataaacagaaaatatgccagcactaaactttagaagatatgttcaagccattgtcagccgaagactatgagagaagttaactgaatgcatccgctctc

SEQ ID NO: 283877 - DNA, 323 bp, Homo sapiens
attcataactgtctaacataagttatgtccctcttaagtacaaaattattagcataatgataagatagttaacacatgtactgtttataatatgttaagcactatttaagcacttcatatatattttattttattattttagagacagggtctcactctgtcacccaggagtacagtggcacgatcatagctcaacgtaaactggaacttctgggcttaagcgatgctctcgcttcagcctcccaagtacctgggaccacaggtgagctccatcaagcctggctaacattttttttttttttaaattttcagtagaaacaggg

SEQ ID NO: 283878 - DNA, 797 bp, Homo sapiens
gccgccaactcacactgacgttccggccagggttctcgttcgcgcccgccacctgaggtcccgcgatcgggccgccgggccgtacgcagtagaccaggcagagcggggtgcgcgccgcccgtgccaggcagtagagctcgtaacggaaacctttgatgtagttaagcgagtccaggatgaccacgtcgtggcgactcaggcgccgttccacggaggctcgcagagctccacgcaatgccttctcacgggcagaatcgccgtacaccgctgggtcctctgcgcccaggacagctgcgtcgtccaccacgtacaccgcgcggccctcggcagccagcgccacgcgcaactcttcagcacgccggctcttgccgctgtacggcagcccgcaaaacaccacgagcggcatcctctcagggagcgaccattggcaaccgcgctgcgccaacttccgggttgtacgcgtctccgaccatgggatgctgtcacttgcctaaggctcaagatttgactctgaagagtgagtgattgagaatgaaattgagaggatgcccaggagaactgcaaggtgtctaacatgatcaccatcactctattggtcaatatctaaactcaggcaactgaatcctgctttggcaagatgcccaaccagacagtctgaagggatatacacctacaaaacaatgaaatcctagataaaatggactttcagaatgtgctcactagactcagtaatgacagaaccctccataaacacaaagcaagctaaaacctatgagcaacaagcaagtgaggctgcc

SEQ ID NO: 283879 - DNA, 346 bp, Homo sapiens
ttctgtagatcacatattaatttcatgtgaaaaaaatttattggaaaatagggaattttaacaacagaagaaataactgagattaaaacgtggaggaaacgaacctgatatttacttacttcaagatcatagaaaatactcgtgtttcagcatcaaatattacagaattaaatcctaaattaattccatttatgtttatgtctatacagactcaaactagctaatgtaagatatgcaggagaattcttaatatgatatcaatgccttctcccaagtcatcccttataatgtaatccccaggcttttgacaaccaagtgctgttgaggaaaatcaatccagtcatct

SEQ ID NO: 283880 - DNA, 889 bp, Homo sapiens
aattatttcaccttcttgaacttgcattgtagaggaagacaactttcactcttattcttcctctacttctcaccactaaagttactaaaaacgatttagactccaggtggtttgtgaggcaggagaatagggtccggaggcagggaacctaaggctgattcacctgacgtcctagaactaaatagaaaggaaaaccccaactttccaggccttagtaacagaaggaccacagcgtactccctttgcaaacttccttgttttctgagtggtgatggaaaattgaaagtacctctgattggttgcagaaagtactgtaaaatgttgattgcgggccaccacttcatttacatgaggtgaacaccaagtggccaatcggaaacctctagggaggtatttggacctgagaagattccgtactgttcccttgagctgctgctcgcgcactcccacagtgtggagtgtactttcattttcagtaaatctctgctttcgttacttcattctttcctcgctttggtgtggattttgtccaattctttgttcaagacgccaagaacctggacaacttgcagtcaagatcctctaccactaacactttgtatatttcaagaaagcctgacttatgcatgtatctattatttttaataattcaaaatctgtgcctcagtcttccttctgggtctcaaatgggcttctttttcaaacagaaagtactgatagacatttatttttctgtgaaaatttaaagagaatagtgataaacaggagtaccatttattattaagattgtgagtaacattatatatatcaatataacatttccttctccagaactttcgttatgtttggaaaatctgtttagaatgtaacagtagtcttcttttctcct

SEQ ID NO: 283881 - DNA, 554 bp, Homo sapiens
atctcacttcttaaggagagcaagactcctgccatcctagaagcctcagctggagctatccagaacttgtgtgctgggcgctggacggtaccttttagaaaagggatttggagatgggaaaacttagataactagtttgctgccatttgtaatttgttccacccctttctatttgctattctagtatggtcgatacatccgctctgctctgcgtcaagagaaggctctttctgccatagctgacctcctgactaatgaacatgaacgggtggtgaaagctgcatctggagcactgagaaacctggctgtggatgctcgcaacaaagaattaattggtgaggagttgaatgctaactgttacctcaaaatttagtacagtgtttgtagtccagcaggtgcctaataatttattgaatttattgaaatgactgaagggaaggaccctcccccgcttcatagtttatgaatgcgagagttggtaagggttttagtttaatggttcttggaaagaaaacaagtgacaactcttcaaaaataaaataataattgctatt

SEQ ID NO: 283882 - DNA, 2623 bp, Homo sapiens
  misc_feature (356)..(356): n is a, c, g, or t
tggggaggggctgaacccgccctgctcgtgataaggcacaagcaagggctgccctgaaggaagctccaaagagaaaggagggcaggaagcccacggcccacaggggtgtagcccgagacccacctgcagcccccagcccttgccaggaaagcagcagccgcagccatggcggggatgaagacagcctccggggactacatcgactcgtcatgggagctgcgggtgtttgtgggagaggaggacccagaggccgagtcggtcaccctgcgggtcactggggagtcgcacatcggcggggtgctcctgaagattgtggagcagatcaatcgcaagcaggactgggtcatgacccatangctatatctgggtcgcgcgaaaacccaaggcacaacgcaacggcggccacgggttggggccctttggccctttgggccaaaggaaaacgccccccaaacctttggggaaaaccaaaccttggggacaaagtacgggatcctggccgacgcacgcctcttctttgggccccagcaccggcccgtcatccttcggttgcccaaccgccgcgcactgcgcctccgtgccagcttctcccagcccctcttccaggctgtggctgccatctgccgcctcctcagcatccggcaccccgaggagctgtccctgctccgggctcctgagaagaaggagaagaagaagaaagagaaggagccagaggaagagctctatgacttgagcaaggttgtcttggctgggggcgtggcacctgcactgttccgggggatgccagctcacttctcggacagcgcccagactgaggcctgctaccacatgctgagccggccccagccgccacccgaccccctcctgctccagcgtctgccacggcccagctccctgtcagacaagacccagctccacagcaggtggctggactcgtcgcggtgtctcatgcagcagggcatcaaggccggggacgcactctggctgcgcttcaagtactacagcttcttcgatttggatcccaagacagaccccgtgcggctgacacagctgtatgagcaggcccggtgggacctgctgctggaggagattgactgcaccgaggaggagatgatggtgtttgccgccctgcagtaccacatcaacaagctgtcccagagcggggaggtgggggagccggctggcacagacccagggctggacgacctggatgtggccctgagcaacctggaggtgaagctggaggggtcggcgcccacagatgtgctggacagcctcaccaccatcccagagctcaaggaccatctccgaatctttcggccccggaagctgaccctgaagggctaccgccaacactgggtggtgttcaaggagaccacactgtcctactacaagagccaggacgaggcccctggggaccccattcagcagctcaacctcaagggctgtgaggtggttcccgatgttaacgtctccggccagaagttctgcattaaactcctagtgccctcccctgagggcatgagtgagatctacctgcggtgccaggatgagcagcagtatgcccgctggatggctggctgccgcctggcctccaaaggccgcaccatggccgacagcagctacaccagcgaggtgcaggccatcctggccttcctcagcctgcagcgcacgggcagtgggggcccgggcaaccacccccacggccctgatgcctctgccgagggcctcaacccctacggcctcgttgccccccgtttccagcgaaagttcaaggccaagcagctcaccccacggatcctggaagcccaccagaatgtggcccagttgtcgctggcagaggcccagctgcgcttcatccaggcctggcagtccctgcccgacttcggcatctcctatgtcatggtcaggttcaagggcagcaggaaagacgagatcctgggcatcgccaacaaccgactgatccgcatcgacttggccgtgggcgacgtggtcaagacctggcgtttcagcaacatgcgccagtggaatgtcaactgggacatccggcaggtggccatcgagtttgatgaacacatcaatgtggccttcagctgcgtgtctgccagctgccgaattgtacacgagtatatcgggggctacattttcctgtcgacgcgggagcgggcccgtggggaggagctggatgaagacctcttcctgcagctcaccgggggccatgaggccttctgagggctgtctgattgcccctgccctgctcaccaccctgtcacagccactcccaagcccacacccacaggggctcactgccccacacccgctccaggcaggcacccagctgggcatttcacctgctgtcactgactttgtgcaggccaaggacctggcagggccagacgctgtaccatcacccaggccagggatgggggtgggggtccctgagctcatgtggtgccccctttccttgtctgagtggctgaggctgatacccctgacctatctgcagtcccccagcacacaaggaagaccagatgtagctacaggatgatgaaacatggtttcaaacgagttctttcttgttactttttaaaatttcttttttataaattaatattttattgtt

SEQ ID NO: 283883 - DNA, 2657 bp, Homo sapiens
tggggaggggctgaacccgccctgctcgtgataaggcacaagcaagggctgccctgaaggaagctccaaagagaaaggagggcaggaagcccacggcccacaggggtgtagcccgagacccacctgcagcccccagcccttgccaggaaagcagcagccgcagccatggcggggatgaagacagcctccggggactacatcgactcgtcatgggagctgcgggtgtttgtgggagaggaggacccagaggccgagtcggtcaccctgcgggtcactggggagtcgcacatcggcggggtgctcctgaagattgtggagcagatcaatcgcaagcaggactggtcagaccatgctatttggtgggaacagaagaggcagtggctgctgcagacccactggacactggacaagtacgggatcctggccgacgcacgcctcttctttgggccccagcaccggcccgtcatccttcggttgcccaaccgccgcgcactgcgcctccgtgccagcttctcccagcccctcttccaggctgtggctgccatctgccgcctcctcagcatccggcaccccgaggagctgtccctgctccgggctcctgagaagaaggagaagaagaagaaagagaaggagccagaggaagagctctatgacttgagcaaggttgtcttggctgggggcgtggcacctgcactgttccgggggatgccagctcacttctcggacagcgcccagactgaggcctgctaccacatgctgagccggccccagccgccacccgaccccctcctgctccagcgtctgccacggcccagctccctgtcagacaagacccagctccacagcaggtggctggactcgtcgcggtgtctcatgcagcagggcatcaaggccggggacgcactctggctgcgcttcaagtactacagcttcttcgatttggatcccaagacagaccccgtgcggctgacacagctgtatgagcaggcccggtgggacctgctgctggaggagattgactgcaccgaggaggagatgatggtgtttgccgccctgcagtaccacatcaacaagctgtcccagagcggggaggtgggggagccggctggcacagacccagggctggacgacctggatgtggccctgagcaacctggaggtgaagctggaggggtcggcgcccacagatgtgctggacagcctcaccaccatcccagagctcaaggaccatctccgaatctttcggccccggaagctgaccctgaagggctaccgccaacactgggtggtgttcaaggagaccacactgtcctactacaagagccaggacgaggcccctggggaccccattcagcagctcaacctcaagggctgtgaggtggttcccgatgttaacgtctccggccagaagttctgcattaaactcctagtgccctcccctgagggcatgagtgagatctacctgcggtgccaggatgtgagtgagggctgggcaggggccagggccgggcaggagctggggcaggggcaggggctgaggagcatcaagcttggttagcactgtccccctcacccctctcgcccaggagcagcagtatgcccgctggatggctggctgccgcctggcctccaaaggccgcaccatggccgacagcagctacaccagcgaggtgcaggccatcctggccttcctcagcctgcagcgcacgggcagtgggggcccgggcaaccacccccacggccctgatgcctctgccgagggcctcaacccctacggcctcgttgccccccgtttccagcgaaagttcaaggccaagcagctcaccccacggatcctggaagcccaccagaatgtggcccagttgtcgctggcagaggcccagctgcgcttcatccaggcctggcagtccctgcccgacttcggcatctcctatgtcatggtcaggttcaagggcagcaggaaagacgagatcctgggcatcgccaacaaccgactgatccgcatcgacttggccgtgggcgacgtggtcaagacctggcgtttcagcaacatgcgccagtggaatgtcaactgggacatccggcaggtggccatcgagtttgatgaacacatcaatgtggccttcagctgcgtgtctgccagctgccgaattgtacacgagtatatcgggggctacattttcctgtcgacgcgggagcgggcccgtggggaggagctggatgaagacctcttcctgcagctcaccgggggccatgaggccttctgagggctgtctgattgcccctgccctgctcaccaccctgtcacagccactcccaagcccacacccacaggggctcactgccccacacccgctccaggcaggcacccagctgggcatttcacctgctgtcactgactttgtgcaggccaaggacctggcagggccagacgctgtaccatcacccaggccagggatgggggtgggggtccctgagctcatgtggtgccccctttccttgtctgagtggctgaggctgatacccctgacctatctgcagtcccccagcacacaaggaagaccagatgtagctacaggatgatgaaacatggtttcaaacgagttctttcttgttactttttaaaatttcttttttataaattaatattttattgtt

SEQ ID NO: 283884 - DNA, 2711 bp, Homo sapiens
tggggaggggctgaacccgccctgctcgtgataaggcacaagcaagggctgccctgaaggaagctccaaagagaaaggagggcaggaagcccacggcccacaggggtgtagcccgagacccacctgcagcccccagcccttgccaggaaagcagcagccgcagccatggcggggatgaagacagcctccggggactacatcgactcgtcatgggagctgcgggtgtttgtgggagaggaggacccagaggccgagtcggtcaccctgcgggtcactggggagtcgcacatcggcggggtgctcctgaagattgtggagcagatcaatcgcaagcaggactggtcagaccatgctatttggtgggaacagaagaggcagtggctgctgcagacccactggacactggacaagtacgggatcctggccgacgcacgcctcttctttgggccccagcaccggcccgtcatccttcggttgcccaaccgccgcgcactgcgcctccgtgccagcttctcccagcccctcttccaggctgtggctgccatctgccgcctcctcagcatccggcaccccgaggagctgtccctgctccgggctcctgagaagaaggagaagaagaagaaagagaaggagccagaggaagagctctatgacttgagcaaggttgtcttggctgggggcgtggcacctgcactgttccgggggatgccagctcacttctcggacagcgcccagactgaggcctgctaccacatgctgagccggccccagccgccacccgaccccctcctgctccagcgtctgccacggcccagctccctgtcagacaagacccagctccacagcaggtggctggactcgtcgcggtgtctcatgcagcagggcatcaaggccggggacgcactctggctgcgcttcaagtactacagcttcttcgatttggatcccaagacagaccccgtgcggctgacacagctgtatgagcaggcccggtgggacctgctgctggaggagattgactgcaccgaggaggagatgatggtgtttgccgccctgcagtaccacatcaacaagctgtcccagagcggggaggtgggggagccggctggcacagacccagggctggacgacctggatgtggccctgagcaacctggaggtgaagctggaggggtcggcgcccacagatgtgctggacagcctcaccaccatcccagagctcaaggaccatctccgaatctttcggccccggaagctgaccctgaagggctaccgccaacactgggtggtgttcaaggagaccacactgtcctactacaagagccaggacgaggcccctggggaccccattcagcagctcaacctcaagggctgtgaggtggttcccgatgttaacgtctccggccagaagttctgcattaaactcctagtgccctcccctgagggcatgagtgagatctacctgcggtgccaggatgagcagcagtatgcccgctggatggctggctgccgcctggcctccaaaggccgcaccatggccgacagcagctacaccagcgaggtgcaggccatcctggccttcctcagcctgcagcgcacgggcagtgggggcccgggcaaccacccccacggccctgatgcctctgccgagggcctcaacccctacggcctcgttgccccccgtttccagcgaaagttcaaggccaagcagctcaccccacggatcctggaagcccaccagaatgtggcccagttgtcgctggcagaggcccagctgcgcttcatccaggcctggcagtccctgcccgacttcggcatctcctatgtcatggtcaggttcaagggcagcaggaaagacgagatcctgggcatcgccaacaaccgactgatccgcatcgacttggccgtgggcgacgtggtcaagacctggcgtttcagcaacatgcgccagtggaatgtcaactgggacatccggcaggtggccatcgagtttgatgaacacatcaatgtggccttcagctgcgtgtctgccagctgccgaattgtacacgagtatatcgggggctacattttcctgtcgacgcgggagcgggcccgtggggaggagctggatgaagacctcttcctgcagctcaccgggggccatgaggccttctgagggctgtctgattgcccctgccctgctcaccaccctgtcacagccactcccaagcccacacccacaggggctcactgccccacacccgctccaggcaggcacccagctgggcatttcacctgctgtcactgactttgtgcaggccaaggacctggcagggccagacgctgtaccatcacccaggccagggatgggggtgggggtccctgagctcatgtggtgccccctttccttgtctgagtggctgaggctgatacccctgacctatctgcagtcccccagcacacaaggaagaccagatgtagctacaggatgatgaaacatggtttcaaacgagttctttcttgttactttttaaaatttcttttttataaattaatattttattgtttaacaacaatgaaacacaccaacaaacaaaaccgcggggcccaagggcggggggggaaaaaaagggttggacagcggccccgggccactcgggtccggacccccttcttgtccaaggggaaatgggcggcccccataggggccataatggaaccgggaccgta

SEQ ID NO: 283885 - DNA, 2416 bp, Homo sapiens
tggggaggggctgaacccgccctgctcgtgataaggcacaagcaagggctgccctgaaggaagctccaaagagaaaggagggcaggaagcccacggcccacaggggtgtagcccgagacccacctgcagcccccagcccttgccaggaaagcagcagccgcagccatggcggggatgaagacagcctccggggactacatcgactcgtcatgggagctgcgggtgtttgtgggagaggaggacccagaggccgagtcggtcaccctgcgggtcactggggagtcgcacatcggcggggtgctcctgaagattgtggagcagatcaatcgcaagcaggactggtcagaccatgctatttggtgggaacagaagaggcagtggctgctgcagacccactggacactggacaagtacgggatcctggccgacgcacgcctcttctttgggccccagcaccggcccgtcatccttcggttgcccaaccgccgcgcactgcgcctccgtgccagcttctcccagcccctcttccaggctgtggctgccatctgccgcctcctcagcatccggcaccccgaggagctgtccctgctccgggctcctgagaagaaggagaagaagaagaaagagaaggagccagaggaagagctctatgacttgagcaaggttgtcttggctgggggcgtggcacctgcactgttccgggggatgccagctcacttctcggacagcgcccagactgaggcctgctaccacatgctgagccggccccagccgccacccgaccccctcctgctccagcgtctgccacggcccagctccctgtcagacaagacccagctccacagcaggtggctggactcgtcgcggtgtctcatgcagcagggcatcaaggccggggacgcactctggctgcgcttcaagtactacagcttcttcgatttggatcccaagacagaccccgtgcggctgacacagctgtatgagcaggcccggtgggacctgctgctggaggagattgactgcaccgaggaggagatgatggtgtttgccgccctgcagtaccacatcaacaagctgtcccagagcggggaggtgggggagccggctggcacagacccagggctggacgacctggatgtggccctgagcaacctggaggtgaagctggaggggtcggcgcccacagatgtgctggacagcctcaccaccatcccagagctcaaggaccatctccgaatctttcggccccggaagctgaccctgaagggctaccgccaacactgggtggtgttcaaggagaccacactgtcctactacaagagccaggacgaggcccctggggaccccattcagcagctcaacctcaagggctgtgaggtggttcccgatgttaacgtctccggccagaagttctgcattaaactcctagtgccctcccctgagggcatgagtgagatctacctgcggtgccaggatgagcagcagtatgcccgctggatggctggctgccgcctggcctccaaaggccgcaccatggccgacagcagctacaccagcgaggtgcaggccatcctggccttcctcagcctgcagcgcacgggcagtgggggcccgggcaaccacccccacggccctgatgcctctgccgagggcctcaacccctacggcctcgttgccccccgtttccagcgaaagttcaaggccaagcagctcaccccacggatcctggaagcccaccagaatgtggcccagttgtcgctggcagaggcccagctgcgcttcatccaggcctggcagtccctgcccgacttcggcatctcctatgtcatggtcaggttcaagggcagcaggaaagacgagatcctgggcatcgccaacaaccgactgatccgcatcgacttggccgtgggcgacgtggtcaagacctggcgtttcattttcctgtcgacgcgggagcgggcccgtggggaggagctggatgaagacctcttcctgcagctcaccgggggccatgaggccttctgagggctgtctgattgcccctgccctgctcaccaccctgtcacagccactcccaagcccacacccacaggggctcactgccccacacccgctccaggcaggcacccagctgggcatttcacctgctgtcactgactttgtgcaggccaaggacctggcagggccagacgctgtaccatcacccaggccagggatgggggtgggggtccctgagctcatgtggtgccccctttccttgtctgagtggctgaggctgatacccctgacctatctgcagtcccccagcacacaaggaagaccagatgtagctacaggatgatgaaacatggtttcaaacgagttctttcttgttactttttaaaatttcttttttataaattaatattttattgtt

SEQ ID NO: 283886 - DNA, 900 bp, Homo sapiens
cggaggtatctacaggatcttagtgagcaagctggcagcccgtcaccagtatggtcccgcagctcaccccacggatcctggaagcccaccagaatgtggcccagttgtcgctggcagaggcccagctgcgcttcatccaggcctggcagtccctgcccgacttcggcatctcctatgtcatggtcaggttcaagggcagcaggaaagacgagatcctgggcatcgccaacaaccgactgatccgcatcgacttggccgtgggcgacgtggtcaagacctggcgtttcagcaacatgcgccagtggaatgtcaactgggacatccggcaggtggccatcgagtttgatgaacacatcaatgtggccttcagctgcgtgtctgccagctgccgaattgtacacgagtatatcgggggctacattttcctgtcgacgcgggagcgggcccgtggggaggagctggatgaagacctcttcctgcagctcaccgggggccatgaggccttctgagggctgtctgattgcccctgccctgctcaccaccctgtcacagccactcccaagcccacacccacaggggctcactgccccacacccgctccaggcaggcacccagctgggcatttcacctgctgtcactgactttgtgcaggccaaggacctggcagggccagacgctgtaccatcacccaggccagggatgggggtgggggtccctgagctcatgtggtgccccctttccttgtctgagtggctgaggctgatacccctgacctatctgcagtcccccagcacacaaggaagaccagatgtagctacaggatgatgaaacatggtttcaaacgagttctttcttgttactttttaaaatttcttttttataaattaatattttattgtt

SEQ ID NO: 283887 - DNA, 2496 bp, Homo sapiens
tggggaggggctgaacccgccctgctcgtgataaggcacaagcaagggctgccctgaaggaagctccaaagagaaaggagggcaggaagcccacggcccacaggggtgtagcccgagacccacctgcagcccccagcccttgccaggaaagcagcagccgcagccatggcggggatgaagacagcctccggggactacatcgactcgtcatgggagctgcgggtgtttgtgggagaggaggacccagaggccgagtcggtcaccctgcgggtcactggggagtcgcacatcggcggggtgctcctgaagattgtggagcagatcaatcgcaagcaggactggtcagaccatgctatttggtgggaacagaagaggcagtggctgctgcagacccactggacactggacaagtacgggatcctggccgacgcacgcctcttctttgggccccagcaccggcccgtcatccttcggttgcccaaccgccgcgcactgcgcctccgtgccagcttctcccagcccctcttccaggctgtggctgccatctgccgcctcctcagcatccggcaccccgaggagctgtccctgctccgggctcctgagaagaaggagaagaagaagaaagagaaggagccagaggaagagctctatgacttgagcaaggttgtcttggctgggggcgtggcacctgcactgttccgggggatgccagctcacttctcggacagcgcccagactgaggcctgctaccacatgctgagccggccccagccgccacccgaccccctcctgctccagcgtctgccacggcccagctccctgtcagacaagacccagctccacagcaggtggctggactcgtcgcggtgtctcatgcagcagggcatcaaggccggggacgcactctggctgcgcttcaagtactacagcttcttcgatttggatcccaagacagaccccgtgcggctgacacagctgtatgagcaggcccggtgggacctgctgctggaggagattgactgcaccgaggaggagatgatggtgtttgccgccctgcagtaccacatcaacaagctgtcccagagcggggaggtgggggagccggctggcacagacccagggctggacgacctggatgtggccctgagcaacctggaggtgaagctggaggggtcggcgcccacagatgtgctggacagcctcaccaccatcccagagctcaaggaccatctccgaatctttcggccccggaagctgaccctgaagggctaccgccaacactgggtggtgttcaaggagaccacactgtcctactacaagagccaggacgaggcccctggggaccccattcagcagctcaacctcaagggctgtgaggtggttcccgatgttaacgtctccggccagaagttctgcattaaactcctagtgccctcccctgagggcatgagtgagatctacctgcggtgccaggatgagcagcagtatgcccgctggatggctggctgccgcctggcctccaaaggccgcaccatggccgacagcagctacaccagcgaggtgcaggccatcctggccttcctcagcctgcagcgcacgggcagtgggggcccgggcaaccacccccacggccctgatgcctctgccgagggcctcaacccctacggcctcgttgccccccgtttccagcgaaagttcaaggccaagcagctcaccccacggatcctggaagcccaccagaatgtggcccagttgtcgctggcagaggcccagctgcgcttcatccaggcctggcagtccctgcccgacttcggcatctcctatgtcatggtcaggttcaagggcagcaggaaagacgagatcctgggcatcgccaacaaccgactgatccgcatcgacttggccgtgggcgacgtggtcaagacctggcgtttcagcaacatgcgccagtggaatgtcaactgggacatccggcaggtggccatcgagtttgatgaacacatcaatgtggccttcagctgcgtgtctgccagctgccgaattgtacacgagtatatcgggggctacattttcctgtcgacgcgggagcgggcccgtggggaggagctggatgaagacctcttcctcctgctcaccaccctgtcacagccactcccaagcccacacccacaggggctcactgccccacacccgctccaggcaggcacccagctgggcatttcacctgctgtcactgactttgtgcaggccaaggacctggcagggccagacgctgtaccatcacccaggccagggatgggggtgggggtccctgagctcatgtggtgccccctttccttgtctgagtggctgaggctgatacccctgacctatctgcagtcccccagcacacaaggaagaccagatgtagctacaggatgatgaaacatggtttcaaacgagttctttcttgttactttttaaaatttcttttttataaattaatattttattgtt

SEQ ID NO: 283888 - DNA, 2548 bp, Homo sapiens
tggggaggggctgaacccgccctgctcgtgataaggcacaagcaagggctgccctgaaggaagctccaaagagaaaggagggcaggaagcccacggcccacaggggtgtagcccgagacccacctgcagcccccagcccttgccaggaaagcagcagccgcagccatggcggggatgaagacagcctccggggactacatcgactcgtcatgggagctgcgggtgtttgtgggagaggaggacccagaggccgagtcggtcaccctgcgggtcactggggagtcgcacatcggcggggtgctcctgaagattgtggagcagatcaatcgcaagcaggactggtcagaccatgctatttggtgggaacagaagaggcagtggctgctgcagacccactggacactggacaagtacgggatcctggccgacgcacgcctcttctttgggccccagcaccggcccgtcatccttcggttgcccaaccgccgcgcactgcgcctccgtgccagcttctcccagcccctcttccaggctgtggctgccatctgccgcctcctcagcatccggcaccccgaggagctgtccctgctccgggctcctgagaagaaggagaagaagaagaaagagaaggagccagaggaagagctctatgacttgagcaaggttgtcttggctgggggcgtggcacctgcactgttccgggggatgccagctcacttctcggacagcgcccagactgaggcctgctaccacatgctgagccggccccagccgccacccgaccccctcctgctccagcgtctgccacggcccagctccctgtcagacaagacccagctccacagcaggtggctggactcgtcgcggtgtctcatgcagcagggcatcaaggccggggacgcactctggctgcgcttcaagtactacagcttcttcgatttggatcccaagacagaccccgtgcggctgacacagctgtatgagcaggcccggtgggacctgctgctggaggagattgactgcaccgaggaggagatgatggtgtttgccgccctgcagtaccacatcaacaagctgtcccagagcggggaggtgggggagccggctggcacagacccagggctggacgacctggatgtggccctgagcaacctggaggtgaagctggaggggtcggcgcccacagatgtgctggacagcctcaccaccatcccagagctcaaggaccatctccgaatctttcggccccggaagctgaccctgaagggctaccgccaacactgggtggtgttcaaggagaccacactgtcctactacaagagccaggacgaggcccctggggaccccattcagcagctcaacctcaagggctgtgaggtggttcccgatgttaacgtctccggccagaagttctgcattaaactcctagtgccctcccctgagggcatgagtgagatctacctgcggtgccaggatgagcagcagtatgcccgctggatggctggctgccgcctggcctccaaaggccgcaccatggccgacagcagctacaccagcgaggtgcaggccatcctggccttcctcagcctgcagcgcacgggcagtgggggcccgggcaaccacccccacggccctgatgcctctgccgagggcctcaacccctacggcctcgttgccccccgtttccagcgaaagttcaaggccaagcagctcaccccacggatcctggaagcccaccagaatgtggcccagttgtcgctggcagaggcccagctgcgcttcatccaggcctggcagtccctgcccgacttcggcatctcctatgtcatggtcaggttcaagggcagcaggaaagacgagatcctgggcatcgccaacaaccgactgatccgcatcgacttggccgtgggcgacgtggtcaagacctggcgtttcagcaacatgcgccagtggaatgtcaactgggacatccggcaggtggccatcgagtttgatgaacacatcaatgtggccttcagctgcgtgtctgccagctgccgaattgtacacgagtatatcgggggctacattttcctgtcgacgcgggagcgggcccgtggggaggagctggatgaagacctcttcctgcagctcaccgggggccatgaggccttctgagggctgtctgattgcccctgccctgctcaccaccctgtcacagccactcccaagcccacacccacaggggctcactgccccacacccgctccaggcaggcacccagctgggcatttcacctgctgtcactgactttgtgcaggccaaggacctggcagggccagacgctgtaccatcacccaggccagggatgggggtgggggtccctgagctcatgtggtgccccctttccttgtctgagtggctgaggctgatacccctgacctatctgcagtcccccagcacacaaggaagaccagatgtagctacaggatgatgaaacatggtttcaaacgagttctttcttgttactttttaaaatttcttttttataaattaatattttattgtt

SEQ ID NO: 283889 - DNA, 1780 bp, Homo sapiens
cgcgcggccccctccagcagcccctatgagtgtctgccacggcccagctccctgtcagacaagacccagctccacagcaggtggctggactcgtcgcggtgtctcatgcagcagggcatcaaggccggggacgcactctggctgcgcttcaagtactacagcttcttcgatttggatcccaagacagaccccgtgcggctgacacagctgtatgagcaggcccggtgggacctgctgctggaggagattgactgcaccgaggaggagatgatggtgtttgccgccctgcagtaccacatcaacaagctgtcccagagcggggaggtgggggagccggctggcacagacccagggctggacgacctggatgtggccctgagcaacctggaggtgaagctggaggggtcggcgcccacagatgtgctggacagcctcaccaccatcccagagctcaaggaccatctccgaatctttcggccccggaagctgaccctgaagggctaccgccaacactgggtggtgttcaaggagaccacactgtcctactacaagagccaggacgaggcccctggggaccccattcagcagctcaacctcaagggctgtgaggtggttcccgatgttaacgtctccggccagaagttctgcattaaactcctagtgccctcccctgagggcatgagtgagatctacctgcggtgccaggatgagcagcagtatgcccgctggatggctggctgccgcctggcctccaaaggccgcaccatggccgacagcagctacaccagcgaggtgcaggccatcctggccttcctcagcctgcagcgcacgggcagtgggggcccgggcaaccacccccacggccctgatgcctctgccgagggcctcaacccctacggcctcgttgccccccgtttccagcgaaagttcaaggccaagcagctcaccccacggatcctggaagcccaccagaatgtggcccagttgtcgctggcagaggcccagctgcgcttcatccaggcctggcagtccctgcccgacttcggcatctcctatgtcatggtcaggttcaagggcagcaggaaagacgagatcctgggcatcgccaacaaccgactgatccgcatcgacttggccgtgggcgacgtggtcaagacctggcgtttcagcaacatgcgccagtggaatgtcaactgggacatccggcaggtggccatcgagtttgatgaacacatcaatgtggccttcagctgcgtgtctgccagctgccgaattgtacacgagtatatcgggggctacattttcctgtcgacgcgggagcgggcccgtggggaggagctggatgaagacctcttcctgcagctcaccgggggccatgaggccttctgagggctgtctgattgcccctgccctgctcaccaccctgtcacagccactcccaagcccacacccacaggggctcactgccccacacccgctccaggcaggcacccagctgggcatttcacctgctgtcactgactttgtgcaggccaaggacctggcagggccagacgctgtaccatcacccaggccagggatgggggtgggggtccctgagctcatgtggtgccccctttccttgtctgagtggctgaggctgatacccctgacctatctgcagtcccccagcacacaaggaagaccagatgtagctacaggatgatgaaacatggtttcaaacgagttctttcttgttactttttaaaatttcttttttataaattaatattttattgtt

SEQ ID NO: 283890 - DNA, 1404 bp, Homo sapiens
  misc_feature (33)..(33): n is a, c, g, or t
acgatctatgagcggtctcgtgctggaggggtngcgccacagatgtgctggacagcctcaccaccatcccagagctcaaggaccatctccgaatctttcggccccggaagctgaccctgaagggctaccgccaacactgggtggtgttcaaggagaccacactgtcctactacaagagccaggacgaggcccctggggaccccattcagcagctcaacctcaagggctgtgaggtggttcccgatgttaacgtctccggccagaagttctgcattaaactcctagtgccctcccctgagggcatgagtgagatctacctgcggtgccaggatgagcagcagtatgcccgctggatggctggctgccgcctggcctccaaaggccgcaccatggccgacagcagctacaccagcgaggtgcaggccatcctggccttcctcagcctgcagcgcacgggcagtgggggcccgggcaaccacccccacggccctgatgcctctgccgagggcctcaacccctacggcctcgttgccccccgtttccagcgaaagttcaaggccaagcagctcaccccacggatcctggaagcccaccagaatgtggcccagttgtcgctggcagaggcccagctgcgcttcatccaggcctggcagtccctgcccgacttcggcatctcctatgtcatggtcaggttcaagggcagcaggaaagacgagatcctgggcatcgccaacaaccgactgatccgcatcgacttggccgtgggcgacgtggtcaagacctggcgtttcagcaacatgcgccagtggaatgtcaactgggacatccggcaggtggccatcgagtttgatgaacacatcaatgtggccttcagctgcgtgtctgccagctgccgaattgtacacgagtatatcgggggctacattttcctgtcgacgcgggagcgggcccgtggggaggagctggatgaagacctcttcctgcagctcaccgggggccatgaggccttctgagggctgtctgattgcccctgccctgctcaccaccctgtcacagccactcccaagcccacacccacaggggctcactgccccacacccgctccaggcaggcacccagctgggcatttcacctgctgtcactgactttgtgcaggccaaggacctggcagggccagacgctgtaccatcacccaggccagggatgggggtgggggtccctgagctcatgtggtgccccctttccttgtctgagtggctgaggctgatacccctgacctatctgcagtcccccagcacacaaggaagaccagatgtagctacaggatgatgaaacatggtttcaaacgagttctttcttgttactttttaaaatttcttttttataaattaatattttattgtt

SEQ ID NO: 283891 - DNA, 1060 bp, Homo sapiens
gagattgtgcggctggtacccaccctttgggaggagtcacggtccaggtgcccatgtccaccttgcagcctggcgcagtgcagatctgcaccttggcggccccacgtgggcactgccccttcccaggctcacatgctgtcaccctgatggggaggtgggggctcggtgactctggaggaggggaatagtgcctggcagcccgtcaccagtatggtcccgcagctcaccccacggatcctggaagcccaccagaatgtggcccagttgtcgctggcagaggcccagctgcgcttcatccaggcctggcagtccctgcccgacttcggcatctcctatgtcatggtcaggttcaagggcagcaggaaagacgagatcctgggcatcgccaacaaccgactgatccgcatcgacttggccgtgggcgacgtggtcaagacctggcgtttcagcaacatgcgccagtggaatgtcaactgggacatccggcaggtggccatcgagtttgatgaacacatcaatgtggccttcagctgcgtgtctgccagctgccgaattgtacacgagtatatcgggggctacattttcctgtcgacgcgggagcgggcccgtggggaggagctggatgaagacctcttcctgcagctcaccgggggccatgaggccttctgagggctgtctgattgcccctgccctgctcaccaccctgtcacagccactcccaagcccacacccacaggggctcactgccccacacccgctccaggcaggcacccagctgggcatttcacctgctgtcactgactttgtgcaggccaaggacctggcagggccagacgctgtaccatcacccaggccagggatgggggtgggggtccctgagctcatgtggtgccccctttccttgtctgagtggctgaggctgatacccctgacctatctgcagtcccccagcacacaaggaagaccagatgtagctacaggatgatgaaacatggtttcaaacgagttctttcttgttactttttaaaatttcttttttataaattaatattttattgtt

SEQ ID NO: 283892 - DNA, 1593 bp, Homo sapiens
tggggaggggctgaacccgccctgctcgtgataaggcacaagcaagggctgccctgaaggaagctccaaagagaaaggagggcaggaagcccacggcccacaggggtgtagcccgagacccacctgcagcccccagcccttgccaggaaagcagcagccgcagccatggcggggatgaagacagcctccggggactacatcgactcgtcatgggagctgcgggtgtttgtgggagaggaggacccagaggccgagtcggtcaccctgcgggtcactggggagtcgcacatcggcggggtgctcctgaagattgtggagcagatcaatcgcaagcaggactggtcagaccatgctatttggtgggaacagaagaggcagtggctgctgcagacccactggacactggacaagtacgggatcctggccgacgcacgcctcttctttgggccccagcaccggcccgtcatccttcggttgcccaaccgccgcgcactgcgcctccgtgccagcttctcccagcccctcttccaggctgtggctgccatctgccgcctcctcagcatccggcaccccgaggagctgtccctgctccgggctcctgagaagaaggagaagaagaagaaagagaaggagccagaggaagagctctatgacttgagcaaggttgtcttggctgggggcgtggcacctgcactgttccgggggatgccagctcacttctcggacagcgcccagactgaggcctgctaccacatgctgagccggccccagccgccacccgaccccctcctgctccagcgtctgccacggcccagctccctgtcagacaagacccagctccacagcaggtggctggactcgtcgcggtgtctcatgcagcagggcatcaaggccggggacgcactctggctgcgcttcaagtactacagcttcttcgatttggatcccaagacagaccccgtgcggctgacacagctgtatgagcaggcccggtgggacctgctgctggaggagattgactgcaccgaggaggagatgatggtgtttgccgccctgcagtaccacatcaacaagctgtcccagagcggggaggtgggggagccggctggcacagacccagggctggacgacctggatgtggccctgagcaacctggaggtgaagctggaggggtcggcgcccacagatgtgctggacagcctcaccaccatcccagagctcaaggaccatctccgaatctttcggccccggaagctgaccctgaagggctaccgccaacactgggtggtgttcaaggagaccacactgtcctactacaagagccaggacgaggcccctggggaccccattcagcagctcaacctcaagggctgtgaggtggttcccgatgttaacgtctccggccagaagttctgcattaaactcctagtgccctcccctgagggcatgagtgagatctacctgcggtgccaggatgagcagcagtatgcccgctggaatgggtggttgccgcttgcctcagccgtacaaggccgcaggcagttcacagcgaggggcaggcaatctggccacatggtgccctatctttcttcc

SEQ ID NO: 283893 - DNA, 3357 bp, Homo sapiens
accggcactgcggcgggcgggcgccgagtctgggcgcggggacgcggggcggcgcgaagcggggccctctgccgccccgcgctcccatgtacgccttttactcgttgctcatctacatcttctacagcctcttccgcagggatggtggcgccgcggcggccgcggagcccggggaccccgcccagagagcccgcaagccccggggtcgccggcgcccagacctgcccgcgccagagctgtggaccgagctgaccggcctggccgccagctccgagcctgaggatgggtcggaaggcgcagccgagggtcgcgcggccgcggtgtccctggaagaggccctactgcgcctcgccgagttcctctccgtccagctgggggcggaagagagctgcgggggcccggcggacctgggccagtctggcgaggtcccctcactgttgacagtgaccagtcagctcttggcccttctggcatggcttcgaagccccagggggaggcaggccctgctccaggggactcagccagcccctcgggtccggcccccctctccagatggatccacatcccaagaagaaagcccttcccacttcaccgcagtcccaggcgagccactgggggatgagacccagggacagcagcccctccagttggaggaggatcagagggcgtggcagcggctggagcagctcatcctgggacagctggaggagctgaagcagcagctggaacagcaggaggaggagttgggtcgactgcgcctgggcgtgggggcgacggactcagagaaaagggttcagcatctgactctggagaacgaggccctgaagcagagcctgagtctcatgcgggacctcctgctgcactggggccccgggccccccatcagggctccgcaggaggaggcggaggcattgctagagctccagggccggcttcaggaggcccaagacaccacagaagccctccgagcccagctgggggtgcaggaggtgcagctgcagggccttcaaggggccctccagcagctccagcaggagacggagcagaactgcaggcgtgagctacagcagatgcatgggcagctggcaggacttcgggcacggatggccagcctgcgtcagggctgcggggacctccgaggtttggtcagcacctttacccagagctgtcagggttcgctgagtgaggcccggggccaggtgtcctgggccttgggggcactgtcatctggagggcctggcactcagctccctgaggggcagcaagggcccccagccggatgcccagggcggctgccagaactcaagggaaatatccgtgtgctgtgtcggctgaggccagggacatcttctagccttgtgagtgtggagcctggcccagggggcaccgtcaccacctgctaccgggggcgccatcgtcgattccgcctagactgggtcttccctccagacgccagccaggaggaggtcttcagagagctggaacctgcggtgctgtcctgcctccgaggctacagcgtctgcatcttcacctatggccagacaggcaccgggaagacctacagcatggagggccctcctgaggaccccggcatagttcctagggcgctgcagtcgctgttccgggagatgggggccggccggcagcaccgggtgacactcagcatggtggagatctacaatgaggctgtcagggacctccttgctccagggcctcccgagcgcctggccgtgaggcagggcccagaaggccagggcgggatccaggtggctggcctcacccactgggacgtgcccaacctggagacattgcaccagatgctgaaactggggaggagcaaccgggccaccgccgccaccgccatgaaccagcgcagctcccgctcgcatgccctggtcacgctgacgctgcgcgcggcgtctccaccgcgcgctccaggcaccgcaggtaccacggccggtgcctgagccctgcggagtctccagagcacccgaggcccggccttcccccatgtcgggctcgctcgcccctctaggcacgctgcacctggtggacctggcgggatccgaacgcgcacggaaggcaggggcggccggcccgccgcggggagacccagacggcgcccggcgcctgcgggaggcccagaccataaaccgctcgctgctggcgctaggaggcgtgatggccgcactgcgggcccaccggccgcacgtgcccttccgcgactcgcagctcacgcgactgctgcagccggcgctgggcccaggcaccaccgcggtgctgctgctgcaggtgggcgccggggcggggcaggtgtgtgcgtgccggtcgccgcccacccgggcccgcccacccgcgcctcttgcccgcagatctccacgcggccggaggatctcggggagacagtctgctccctcaagttcgccgaccgagtgggtcaagtggagctggggccagcccggcgccgcagggtcccgcgctcctccgggacgccttcttccctcagcaccgacactccgctcaccgggaccccctgcacccctacgccgtcccctggcagtcctccatgccccagtcccgacaacggctcgggctcggctctcgcgcccgcagagggcctgcccctctagtcctgggtcgcggccctgcccatggggtctcaggccaggtctctgctggcagaggcggtagtaaagtccctgtaccccgtctcccagggcacaagctccctagcctctttggatccattgcccctgagctcccagagtcacccctccacctccgcagccagtgaagtgtgttgtgcctgctgaagtgatcaccccccgcccccagccctgcatcaggccacaggtcttggctttctccttatcaccatttgctgttatcacggcacacagcagggaatcccaggcccccccgccaagtggttacccaagtcaccactcctgacccaaaaatcaggcatggcattaaaacgttgcaaattcctttactgttatcccccccaccaccaggaccatgtagggtgcagtctttactccctaacccgtttcccgaaaaaggtgctacctcctttccagacagatgagagagggcaggacttcaggctggatccaccactgggctctccctcccccagcctggagcacgggaggggaggtgacggctggtgactgatggatgggtagtgggctgagaagaggggactaggaagggctattccaggctcagccctgctcctgcagctttgccgctgagtgtaggaaaaacaggcatgacagaccagggtgagggttgtgcccagctgggccacggccatgcgtggggtggcccaataaacaccgtggactccca

SEQ ID NO: 283894 - DNA, 3219 bp, Homo sapiens
aactcaggggcgagctgcgggggcccggcgacactgggccagtctggcgaggtcccctcactgttgacagtgaccagtcagctcttggcccttctggcatggcttcgaagccccagggggaggcaggccctgctccaggggactcagccagcccctcgggtccggcccccctctccagatggatccacatcccaagaagaaagcccttcccacttcaccgcagtcccaggcgagccactgggggatgagacccagggacagcagcccctccagttggaggaggatcagagggcgtggcagcggctggagcagctcatcctgggacaggtgaggtccctggagccagaagggattgccggctgggacgccagaaaaaggaggtccaccctgtctctcttacttctccccagctggaggagctgaagcagcagctggaacagcaggaggaggagttgggtcgactgcgcctgggcgtggtgaggctgcagggagacctggcagggccgggcatggagggggtgcttcaggtgagtgccgaggtttcctctccaccagggggcgacggactcagagaaaagggttcagcatctgactctggagaacgaggccctgaagcagagcctgagtctcatgcgggacctcctgctgcactggggccccgggccccccatcagggctccgcaggaggaggcggaggcattgctagagctccagggccggcttcaggaggcccaagacaccacagaagccctccgagcccagctgggggtgcaggaggtgcagctgcagggccttcaaggggccctccagcagctccagcaggagacggagcagaactgcaggcgtgagctacagcagatgcatgggcagctggcaggtaagggttggggttggggctcatgggaggccctggaggctgggccttcccttccaacagacttccctctccaggacttcgggcacggatggccagcctgcgtcagggctgcggggacctccgaggtttggtcagcacctttacccagagctgtcagggttcgctgagtgaggcccggggccaggtgtcctgggccttgggggcactgtcatctggagggcctggcactcagctccctgaggggcagcaagggcccccagccggatgcccagggcggctgccagaactcaagggaaatatccgtgtgctgtgtcggctgaggccagggacatcttctagccttgtgagtgtggagcctggcccagggggcaccgtcaccacctgctaccgggggcgccatcgtcgattccgcctagactgggtcttccctccagacgccagccaggaggaggtcttcagagagctggaacctgcggtgctgtcctgcctccgaggctacagcgtctgcatcttcacctatggccagacaggcaccgggaagacctacagcatggagggccctcctgaggaccccggcatagttcctagggcgctgcagtcgctgttccgggagatgggggccggccggcagcaccgggtgacactcagcatggtggagatctacaatgaggctgtcagggacctccttgctccagggcctcccgagcgcctggccgtgaggcagggcccagaaggccagggcgggatccaggtggctggcctcacccactgggacgtgcccaacctggagacattgcaccagatgctgaaactggggaggagcaaccgggccaccgccgccaccgccatgaaccagcgcagctcccgctcgcatgccctggtcacgctgacgctgcgcgcggcgtctccaccgcgcgctccaggcaccgcaggtaccacggccggtgcctgagccctgcggagtctccagagcacccgaggcccggccttcccccatgtcgggctcgctcgcccctctaggcacgctgcacctggtggacctggcgggatccgaacgcgcacggaaggcaggggcggccggcccgccgcggggagacccagacggcgcccggcgcctgcgggaggcccagaccataaaccgctcgctgctggcgctaggaggcgtgatggccgcactgcgggcccaccggccgcacgtgcccttccgcgactcgcagctcacgcgactgctgcagccggcgctgggcccaggcaccaccgcggtgctgctgctgcaggtgggcgccggggcggggcaggtgtgtgcgtgccggtcgccgcccacccgggcccgcccacccgcgcctcttgcccgcagatctccacgcggccggaggatctcggggagacagtctgctccctcaagttcgccgaccgagtgggtcaagtggagctggggccagcccggcgccgcagggtcccgcgctcctccgggacgccttcttccctcagcaccgacactccgctcaccgggaccccctgcacccctacgccgtcccctggcagtcctccatgccccagtcccgacaacggctcgggctcggctctcgcgcccgcagagggcctgcccctctagtcctgggtcgcggccctgcccatggggtctcaggccaggtctctgctggcagaggcggtagtaaagtccctgtaccccgtctcccagggcacaagctccctagcctctttggatccattgcccctgagctcccagagtcacccctccacctccgcagccagtgaagtgtgttgtgcctgctgaagtgatcaccccccgcccccagccctgcatcaggccacaggtcttggctttctccttatcaccatttgctgttatcacggcacacagcagggaatcccaggcccccccgccaagtggttacccaagtcaccactcctgacccaaaaatcaggcatggcattaaaacgttgcaaattcctttactgttatcccccccaccaccaggaccatgtagggtgcagtctttactccctaacccgtttcccgaaaaaggtgctacctcctttccagacagatgagagagggcaggacttcaggctggatccaccactgggctctccctcccccagcctggagcacgggaggggaggtgacggctggtgactgatggatgggtagtgggctgagaagaggggactaggaagggctattccaggctcagccctgctcctgcagctttgccgctgagtgtaggaaaaacaggcatgacagaccagggtgagggttgtgcccagctgggccacggccatgcgtggggtggcccaataaacaccgtggactccca

SEQ ID NO: 283895 - DNA, 3189 bp, Homo sapiens
accggcactgcggcgggcgggcgccgagtctgggcgcggggacgcggggcggcgcgaagcggggccctctgccgccccgcgctcccatgtacgccttttactcgttgctcatctacatcttctacagcctcttccgcagggatggtggcgccgcggcggccgcggagcccggggaccccgcccagagagcccgcaagccccggggtcgccggcgcccagacctgcccgcgccagagctgtggaccgagctgaccggcctggccgccagctccgagcctgaggatgggtcggaaggcgcagccgagggtcgcgcggccgcggtgtccctggaagaggccctactgcgcctcgccgagttcctctccgtccagctgggggcggaagagagctgcgggggcccggcggacctgggccagtctggcgaggtcccctcactgttgacagtgaccagtcagctcttggcccttctggcatggcttcgaagccccagggggaggcaggccctgctccaggggactcagccagcccctcgggtccggcccccctctccagatggatccacatcccaagaagaaagcccttcccacttcaccgcagtcccaggcgagccactgggggatgagacccagggacagcagcccctccagttggaggaggatcagagggcgtggcagcggctggagcagctcatcctgggacagctggaggagctgaagcagcagctggaacagcaggaggaggagttgggtcgactgcgcctgggcgtgggggcgacggactcagagaaaagggttcagcatctgactctggagaacgaggccctgaagcagagcctgagtctcatgcgggacctcctgctgcactggggccccgggccccccatcagggctccgcaggaggaggcggaggcattgctagagctccagggccggcttcaggaggcccaagacaccacagaagccctccgagcccagctgggggtgcaggaggtgcagctgcagggccttcaaggggccctccagcagctccagcaggagacggagcagaactgcaggcgtgagctacagcagatgcatgggcagctggcaggacttcgggcacggatggccagcctgcgtcagggctgcggggacctccgaggtttggtcagcacctttacccagagctgtcagggttcgctgagtgaggcccggggccaggtgtcctgggccttgggggcactgtcatctggagggcctggcactcagctccctgaggggcagcaagggcccccagccggatgcccagggcggctgccagaactcaagggaaatatccgtgtgctgtgtcggctgaggccagggacatcttctagccttgtgagtgtggagcctggcccagggggcaccgtcaccacctgctaccgggggcgccatcgtcgattccgcctagactgggtcttccctccagacgccagccaggaggaggtcttcagagagctggaacctgcggtgctgtcctgcctccgaggctacagcgtctgcatcttcacctatggccagacaggcaccgggaagacctacagcatggagggccctcctgaggaccccggcatagttcctagggcgctgcagtcgctgttccgggagatgggggccggccggcagcaccgggtgacactcagcatggtggagatctacaatgaggctgtcagggacctccttgctccagggcctcccgagcgcctggccgtgaggcagggcccagaaggccagggcgggatccaggtggctggcctcacccactgggacgtgcccaacctggagacattgcaccagatgctgaaactggggaggagcaaccgggccaccgccgccaccgccatgaaccagcgcagctcccgctcgcatgccctggtcacgctgacgctgcgcgcggcgtctccaccgcgcgctccaggcaccgcaggcacgctgcacctggtggacctggcgggatccgaacgcgcacggaaggcaggggcggccggcccgccgcggggagacccagacggcgcccggcgcctgcgggaggcccagaccataaaccgctcgctgctggcgctaggaggcgtgatggccgcactgcgggcccaccggccgcacgtgcccttccgcgactcgcagctcacgcgactgctgcagccggcgctgggcccaggcaccaccgcggtgctgctgctgcagatctccacgcggccggaggatctcggggagacagtctgctccctcaagttcgccgaccgagtgggtcaagtggagctggggccagcccggcgccgcagggtcccgcgctcctccgggacgccttcttccctcagcaccgacactccgctcaccgggaccccctgcacccctacgccgtcccctggcagtcctccatgccccagtcccgacaacggctcgggctcggctctcgcgcccgcagagggcctgcccctctagtcctgggtcgcggccctgcccatggggtctcaggccaggtctctgctggcagaggcggtagtaaagtccctgtaccccgtctcccagggcacaagctccctagcctctttggatccattgcccctgagctcccagagtcacccctccacctccgcagccagtgaagtgtgttgtgcctgctgaagtgatcaccccccgcccccagccctgcatcaggccacaggtcttggctttctccttatcaccatttgctgttatcacggcacacagcagggaatcccaggcccccccgccaagtggttacccaagtcaccactcctgacccaaaaatcaggcatggcattaaaacgttgcaaattcctttactgttatcccccccaccaccaggaccatgtagggtgcagtctttactccctaacccgtttcccgaaaaaggtgctacctcctttccagacagatgagagagggcaggacttcaggctggatccaccactgggctctccctcccccagcctggagcacgggaggggaggtgacggctggtgactgatggatgggtagtgggctgagaagaggggactaggaagggctattccaggctcagccctgctcctgcagctttgccgctgagtgtaggaaaaacaggcatgacagaccagggtgagggttgtgcccagctgggccacggccatgcgtggggtggcccaataaacaccgtggactccca

SEQ ID NO: 283896 - DNA, 3277 bp, Homo sapiens
accggcactgcggcgggcgggcgccgagtctgggcgcggggacgcggggcggcgcgaagcggggccctctgccgccccgcgctcccatgtacgccttttactcgttgctcatctacatcttctacagcctcttccgcagggatggtggcgccgcggcggccgcggagcccggggaccccgcccagagagcccgcaagccccggggtcgccggcgcccagacctgcccgcgccagagctgtggaccgagctgaccggcctggccgccagctccgagcctgaggatgggtcggaaggcgcagccgagggtcgcgcggccgcggtgtccctggaagaggccctactgcgcctcgccgagttcctctccgtccagctgggggcggaagagagctgcgggggcccggcggacctgggccagtctggcgaggtcccctcactgttgacagtgaccagtcagctcttggcccttctggcatggcttcgaagccccagggggaggcaggccctgctccaggggactcagccagcccctcgggtccggcccccctctccagatggatccacatcccaagaagaaagcccttcccacttcaccgcagtcccaggcgagccactgggggatgagacccagggacagcagcccctccagttggaggaggatcagagggcgtggcagcggctggagcagctcatcctgggacagctggaggagctgaagcagcagctggaacagcaggaggaggagttgggtcgactgcgcctgggcgtgggggcgacggactcagagaaaagggttcagcatctgactctggagaacgaggccctgaagcagagcctgagtctcatgcgggacctcctgctgcactggggccccgggccccccatcagggctccgcaggaggaggcggaggcattgctagagctccagggccggcttcaggaggcccaagacaccacagaagccctccgagcccagctgggggtgcaggaggtgcagctgcagggccttcaaggggccctccagcagctccagcaggagacggagcagaactgcaggcgtgagctacagcagatgcatgggcagctggcaggacttcgggcacggatggccagcctgcgtcagggctgcggggacctccgaggtttggtcagcacctttacccagagctgtcagggttcgctgagtgaggcccggggccaggtgtcctgggccttgggggcactgtcatctggagggcctggcactcagctccctgaggggcagcaagggcccccagccggatgcccagggcggctgccagaactcaagggaaatatccgtgtgctgtgtcggctgaggccagggacatcttctagccttgtgagtgtggagcctggcccagggggcaccgtcaccacctgctaccgggggcgccatcgtcgattccgcctagactgggtcttccctccagacgccagccaggaggaggtcttcagagagctggaacctgcggtgctgtcctgcctccgaggctacagcgtctgcatcttcacctatggccagacaggcaccgggaagacctacagcatggagggccctcctgaggaccccggcatagttcctagggcgctgcagtcgctgttccgggagatgggggccggccggcagcaccgggtgacactcagcatggtggagatctacaatgaggctgtcagggacctccttgctccagggcctcccgagcgcctggccgtgaggcagggcccagaaggccagggcgggatccaggtggctggcctcacccactgggacgtgcccaacctggagacattgcaccagatgctgaaactggggaggagcaaccgggccaccgccgccaccgccatgaaccagcgcagctcccgctcgcatgccctggtcacgctgacgctgcgcgcggcgtctccaccgcgcgctccaggcaccgcaggtaccacggccggtgcctgagccctgcggagtctccagagcacccgaggcccggccttcccccatgtcgggctcgctcgcccctctaggcacgctgcacctggtggacctggcgggatccgaacgcgcacggaaggcaggggcggccggcccgccgcggggagacccagacggcgcccggcgcctgcgggaggcccagaccataaaccgctcgctgctggcgctaggaggcgtgatggccgcactgcgggcccaccggccgcacgtgcccttccgcgactcgcagctcacgcgactgctgcagccggcgctgggcccaggcaccaccgcggtgctgctgctgcagatctccacgcggccggaggatctcggggagacagtctgctccctcaagttcgccgaccgagtgggtcaagtggagctggggccagcccggcgccgcagggtcccgcgctcctccgggacgccttcttccctcagcaccgacactccgctcaccgggaccccctgcacccctacgccgtcccctggcagtcctccatgccccagtcccgacaacggctcgggctcggctctcgcgcccgcagagggcctgcccctctagtcctgggtcgcggccctgcccatggggtctcaggccaggtctctgctggcagaggcggtagtaaagtccctgtaccccgtctcccagggcacaagctccctagcctctttggatccattgcccctgagctcccagagtcacccctccacctccgcagccagtgaagtgtgttgtgcctgctgaagtgatcaccccccgcccccagccctgcatcaggccacaggtcttggctttctccttatcaccatttgctgttatcacggcacacagcagggaatcccaggcccccccgccaagtggttacccaagtcaccactcctgacccaaaaatcaggcatggcattaaaacgttgcaaattcctttactgttatcccccccaccaccaggaccatgtagggtgcagtctttactccctaacccgtttcccgaaaaaggtgctacctcctttccagacagatgagagagggcaggacttcaggctggatccaccactgggctctccctcccccagcctggagcacgggaggggaggtgacggctggtgactgatggatgggtagtgggctgagaagaggggactaggaagggctattccaggctcagccctgctcctgcagctttgccgctgagtgtaggaaaaacaggcatgacagaccagggtgagggttgtgcccagctgggccacggccatgcgtggggtggcccaataaacaccgtggactccca

SEQ ID NO: 283897 - DNA, 3544 bp, Homo sapiens
  misc_feature (3204)..(3204): n is a, c, g, or t
  misc_feature (3206)..(3206): n is a, c, g, or t
  misc_feature (3222)..(3222): n is a, c, g, or t
accggcactgcggcgggcgggcgccgagtctgggcgcggggacgcggggcggcgcgaagcggggccctctgccgccccgcgctcccatgtacgccttttactcgttgctcatctacatcttctacagcctcttccgcagggatggtggcgccgcggcggccgcggagcccggggaccccgcccagagagcccgcaagccccggggtcgccggcgcccagacctgcccgcgccagagctgtggaccgagctgaccggcctggccgccagctccgagcctgaggatgggtcggaaggcgcagccgagggtcgcgcggccgcggtgtccctggaagaggccctactgcgcctcgccgagttcctctccgtccagctgggggcggaagagagctgcgggggcccggcggacctgggccagtctggcgaggtcccctcactgttgacagtgaccagtcagctcttggcccttctggcatggcttcgaagccccagggggaggcaggccctgctccaggggactcagccagcccctcgggtccggcccccctctccagatggatccacatcccaagaagaaagcccttcccacttcaccgcagtcccaggcgagccactgggggatgagacccagggacagcagcccctccagttggaggaggatcagagggcgtggcagcggctggagcagctcatcctgggacagctggaggagctgaagcagcagctggaacagcaggaggaggagttgggtcgactgcgcctgggcgtgggggcgacggactcagagaaaagggttcagcatctgactctggagaacgaggccctgaagcagagcctgagtctcatgcgggacctcctgctgcactggggccccgggccccccatcagggctccgcaggaggaggcggaggcattgctagagctccagggccggcttcaggaggcccaagacaccacagaagccctccgagcccagctgggggtgcaggaggtgcagctgcagggccttcaaggggccctccagcagctccagcaggagacggagcagaactgcaggcgtgagctacagcagatgcatgggcagctggcaggacttcgggcacggatggccagcctgcgtcagggctgcggggacctccgaggtttggtcagcacctttacccagagctgtcagggttcgctgagtgaggcccggggccaggtgtcctgggccttgggggcactgtcatctggagggcctggcactcagctccctgaggggcagcaagggcccccagccggatgcccagggcggctgccagaactcaagggaaatatccgtgtgctgtgtcggctgaggccagggacatcttctagccttgtgagtgtggagcctggcccagggggcaccgtcaccacctgctaccgggggcgccatcgtcgattccgcctagactgggtcttccctccagacgccagccaggaggaggtcttcagagagctggaacctgcggtgctgtcctgcctccgaggctacagcgtctgcatcttcacctatggccagacaggcaccgggaagacctacagcatggagggccctcctgaggaccccggcatagttcctagggcgctgcagtcgctgttccgggagatgggggccggccggcagcaccgggtgacactcagcatggtggagatctacaatgaggctgtcagggacctccttgctccagggcctcccgagcgcctggccgtgaggcagggcccagaaggccagggcgggatccaggtggctggcctcacccactgggacgtgcccaacctggagacattgcaccagatgctgaaactggggaggagcaaccgggccaccgccgccaccgccatgaaccagcgcagctcccgctcgcatgccctggtcacgctgacgctgcgcgcggcgtctccaccgcgcgctccaggcaccgcaggcacgctgcacctggtggacctggcgggatccgaacgcgcacggaaggcaggggcggccggcccgccgcggggagacccagacggcgcccggcgcctgcgggaggcccagaccataaaccgctcgctgctggcgctaggaggcgtgatggccgcactgcgggcccaccggccgcacgtgcccttccgcgactcgcagctcacgcgactgctgcagccggcgctgggcccaggcaccaccgcggtgctgctgctgcagatctccacgcggccggaggatctcggggagacagtctgctccctcaagttcgccgaccgagtgggtcaagtggagctggggccagcccggcgccgcagggtcccgcgctcctccgggacgccttcttccctcagcaccgacactccgctcaccgggaccccctgcacccctacgccgtcccctggcagtcctccatgccccagtcccgacaacggctcgggctcggctctcgcgcccgcagagggcctgcccctctagtcctgggtcgcggccctgcccatggggtctcaggccaggtctctgctggcagaggcggtagtaaagtccctgtaccccgtctcccagggcacaagctccctagcctctttggatccattgcccctgagctcccagagtcacccctccacctccgcagccagtgaagtgtgttgtgcctgctgaagtgatcaccccccgcccccagccctgcatcaggccacaggtcttggctttctccttatcaccatttgctgttatcacggcacacagcagggaatcccaggcccccccgccaagtggttacccaagtcaccactcctgacccaaaaatcaggcatggcattaaaacgttgcaaattcctttactgttatcccccccaccaccaggaccatgtagggtgcagtctttactccctaacccgtttcccgaaaaaggtgctacctcctttccagacagatgagagagggcaggacttcaggctggatccaccactgggctctccctcccccagcctggagcacgggaggggaggtgacggctggtgactgatggatgggtagtgggctgagaagaggggactaggaagggctattccaggctcagccctgctcctgcagctttgccgctgagtgtaggaaaaacaggcatgacagaccagggtgagggttgtgcccagctgggccacggccatgcgtggggtggcccaataaacaccgtggactcccaaaaaaaaaaaaaaananaaaaaacaaacaaaanaaaaaaaaaaaacataccagaacacaaataaaagaaaacggagggggcgggccctgacacagaagacccctcccccgcgaggcccccccaaatgcatagagtgccgcccagcaccacatgttcatgtgaccaccaaaagggggggcccccaacaacgggggcgacgcgccatcaataaacacacacagcgaggcgcgagcgacgcgtgaatcacaacccgctgcgtgatcgcgggaaaccacacgccgcgcgggacaactcttggggagcaaaacaccctcccaccggggggcggacacacaatcgggcgacacacagacca

SEQ ID NO: 283898 - DNA, 3136 bp, Homo sapiens
accggcactgcggcgggcgggcgccgagtctgggcgcggggacgcggggcggcgcgaagcggggccctctgccgccccgcgctcccatgtacgccttttactcgttgctcatctacatcttctacagcctcttccgcagggatggtggcgccgcggcggccgcggagcccggggaccccgcccagagagcccgcaagccccggggtcgccggcgcccagacctgcccgcgccagagctgtggaccgagctgaccggcctggccgccagctccgagcctgaggatgggtcggaaggcgcagccgagggtcgcgcggccgcggtgtccctggaagaggccctactgcgcctcgccgagttcctctccgtccagctgggggcggaagagagctgcgggggcccggcggacctgggccagtctggcgaggtcccctcactgttgacagtgaccagtcagctcttggcccttctggcatggcttcgaagccccagggggaggcaggccctgctccaggggactcagccagcccctcgggtccggcccccctctccagatggatccacatcccaagaagaaagcccttcccacttcaccgcagtcccaggcgagccactgggggatgagacccagggacagcagcccctccagttggaggaggatcagagggcgtggcagcggctggagcagctcatcctgggacagctggaggagctgaagcagcagctggaacagcaggaggaggagttgggtcgactgcgcctgggcgtgggggcgacggactcagagaaaagggttcagcatctgactctggagaacgaggccctgaagcagagcctgagtctcatgcgggacctcctgctgcactggggccccgggccccccatcagggctccgcaggaggaggcggaggcattgctagagctccagggccggcttcaggaggcccaagacaccacagaagccctccgagcccagctgggggtgcaggaggtgcagctgcagggccttcaaggggccctccagcagctccagcaggagacggagcagaactgcaggcgtgagctacagcagatgcatgggcagctggcaggacttcgggcacggatggccagcctgcgtcagggctgcggggacctccgaggtttggtcagcacctttacccagagctgtcagggttcgctgagtgaggcccggggccaggtgtcctgggccttgggggcactgtcatctggagggcctggcactcagctccctgaggggcagcaagggcccccagccggatgcccagggcggctgccagaactcaagggaaatatccgtgtgctgtgtcggctgaggccagggacatcttctagccttgtgagtgtggagcctggcccagggggcaccgtcaccacctgctaccgggggcgccatcgtcgattccgcctagactgggtcttccctccagacgccagccaggaggaggtcttcagagagctggaacctgcggtgctgtcctgcctccgaggctacagcgtctgcatcttcacctatggccagacaggcaccgggaagacctacagcatggagggccctcctgaggaccccggcatagttcctagggcgctgcagtcgctgttccgggagatgggggccggccggcagcaccgggtgacactcagcatggtggagatctacaatgaggctgtcagggacctccttgctccagggcctcccgagcgcctggccgtgaggcagggcccagaaggccagggcgggatccaggtggctggcctcacccactgggacgtgcccaacctggagacattgcaccagatgctgaaactggggaggagcaaccgggccaccgccgccaccgccatgaaccagcgcagctcccgctcgcatgccctggtcacgctgacgctgcgcgcggcgtctccaccgcgcgctccaggcaccgcaggcacgctgcacctggtggacctggcgggatccgaacgcgcacggaaggcaggggcggccggcccgccgcggggagacccagacggcgcccggcgcctgcgggaggcccagaccataaaccgctcgctgctggcgctaggaggcgtgatggccgcactgcgggcccaccggccgcacgtgcccttccgcgactcgcagctcacgcgactgctgcagccggcgctgggcccaggcaccaccgcggtgctgctgctgcagatctccacgcggccggaggatctcggggagacagtctgctccctcaagttcgccgaccgagtgggtcaagtggagctggggccagcccggcgccgcagggtcccgcgctcctccgggacgccttcttccctcagcaccgacactccgctcaccgggaccccctgcacccctacgccgtcccctggcagtcctccatgccccagtcccgacaacggctcgggctcggctctcgcgcccgcagagggcctgcccctctagtcctgggtcgcggccctgcccatggggtctcaggccaggtctctgctggcagaggcggtagtaaagtccctgtaccccgtctcccagggcacaagctccctagcctctttggatccattgcccctgagctcccagagtcacccctccacctccgcagccagtgaagtgtgttgtgcctgctgaagtgatcaccccccgcccccagccctgcatcaggccacaggtcttggctttctccttatcaccatttgctgttatcacggcacacagcagggaatcccaggcccccccgccaagtggttacccaagtcaccactcctgacccaaaaatcaggcatggcattaaaacgttgcaaattcctttactgttatcccccccaccaccaggaccatgtagggtgcagtctttactccctaacccgtttcccgaaaaaggtgctacctctctccctcccccagcctggagcacgggaggggaggtgacggctggtgactgatggatgggtagtgggctgagaagaggggactaggaagggctattccaggctcagccctgctcctgcagctttgccgctgagtgtaggaaaaacaggcatgacagaccagggtgagggttgtgcccagctgggccacggccatgcgtggggtggcccaataaacaccgtggactccca

SEQ ID NO: 283899 - DNA, 1534 bp, Homo sapiens
accggcactgcggcgggcgggcgccgagtctgggcgcggggacgcggggcggcgcgaagcggggccctctgccgccccgcgctcccatgtacgccttttactcgttgctcatctacatcttctacagcctcttccgcagggatggtggcgccgcggcggccgcggagcccggggaccccgcccagagagcccgcaagccccggggtcgccggcgcccagacctgcccgcgccagagctgtggaccgagctgaccggcctggccgccagctccgagcctgaggatgggtcggaaggcgcagccgagggtcgcgcggccgcggtgtccctggaagaggccctactgcgcctcgccgagttcctctccgtccagctgggggcggaagagagctgcgggggcccggcggacctgggccagtctggcgaggtcccctcactgttgacagtgaccagtcagctcttggcccttctggcatggcttcgaagccccagggggaggcaggccctgctccaggggactcagccagcccctcgggtccggcccccctctccagatggatccacatcccaagaagaaagcccttcccacttcaccgcagtcccaggcgagccactgggggatgagacccagggacagcagcccctccagttggaggaggatcagagggcgtggcagcggctggagcagctcatcctgggacagctggaggagctgaagcagcagctggaacagcaggaggaggagttgggtcgactgcgcctgggcgtgggggcgacggactcagagaaaagggttcagcatctgactctggagaacgaggccctgaagcagagcctgagtctcatgcgggacctcctgctgcactggggccccgggccccccatcagggctccgcaggaggaggcggaggcattgctagagctccagggccggcttcaggaggcccaagacaccacagaagccctccgagcccagctgggggtgcaggaggtgcagctgcagggccttcaaggggccctccagcagctccagcaggagacggagcagaactgcaggcgtgagctacagcagatgcatgggcagctggcaggtaagggttggggttggggctcatgggaggccctggaggctgggccttcccttccaacagacttccctctccaggacttcgggcacggatggccagcctgcgtcagggctgcggggacctccgaggtttggtcagcacctttacccagagctgtcagggttcgctgagtgaggcccggggccaggtgtcctgggccttgggggcactgtcatctggagggcctggcactcagctccctgaggggcagcaagggcccccagccggatgcccagggcggctgccagaactcaagggaaatatccgtgtgctgtgtcggctgaggccagggacatcttgctttgccgctgagtgtaggaaaaacaggcatgacagaccagggtgagggttgtgcccagctgggccacggccatgcgtggggtggcccaataaacaccgtggactccca

SEQ ID NO: 283900 - DNA, 1169 bp, Homo sapiens
accggcactgcggcgggcgggcgccgagtctgggcgcggggacgcggggcggcgcgaagcggggccctctgccgccccgcgctcccatgtacgccttttactcgttgctcatctacatcttctacagcctcttccgcagggatggtggcgccgcggcggccgcggagcccggggaccccgcccagagagcccgcaagccccggggtcgccggcgcccagacctgcccgcgccagagctgtggaccgagctgaccggcctggccgccagctccgagcctgaggatgggtcggaaggcgcagccgagggtcgcgcggccgcggtgtccctggaagaggccctactgcgcctcgccgagttcctctccgtccagctgggggcggaagagagctgcgggggcccggcggacctgggccagtctggcgaggtcccctcactgttgacagtgaccagtcagctcttggcccttctggcatggcttcgaagccccagggggaggcaggccctgctccaggggactcagccagcccctcgggtccggcccccctctccagatggatccacatcccaagaagaaagcccttcccacttcaccgcagtcccaggcgagccactgggggatgagacccagggacagcagcccctccagttggaggaggatcagagggcgtggcagcggctggagcagctcatcctgggacaggtgaggtccctggagccagaagggattgccggctgggacgccagaaaaaggaggtccaccctgtctctcttacttctccccagctggaggagctgaagcagcagctggaacagcaggaggaggagttgggtcgactgcgcctgggcgtggtgaggctgcagggagacctggcagggccgggcatggagggggtgcttcaggtgagtgccgaggtttcctctccaccagggggcgacggactcagagaaaagggttcagcatctgactctggagaacgaggccctgaagcagagcctgagtctcatgcgggacctcctgctgcactggggccccgggccccccatcagggctccgcaggaggaggcggaggcattgctagagctccagggccggcttcaggaggcccaagacaccacagaagccctccgagcccaggtgggcatggggcccagggatccatggctcagg

SEQ ID NO: 283901 - DNA, 3431 bp, Homo sapiens
accggcactgcggcgggcgggcgccgagtctgggcgcggggacgcggggcggcgcgaagcggggccctctgccgccccgcgctcccatgtacgccttttactcgttgctcatctacatcttctacagcctcttccgcagggatggtggcgccgcggcggccgcggagcccggggaccccgcccagagagcccgcaagccccggggtcgccggcgcccagacctgcccgcgccagagctgtggaccgagctgaccggcctggccgccagctccgagcctgaggatgggtcggaaggcgcagccgagggtcgcgcggccgcggtgtccctggaagaggccctactgcgcctcgccgagttcctctccgtccagctgggggcggaagagagctgcgggggcccggcggacctgggccagtctggcgaggtcccctcactgttgacagtgaccagtcagctcttggcccttctggcatggcttcgaagccccagggggaggcaggccctgctccaggggactcagccagcccctcgggtccggcccccctctccagatggatccacatcccaagaagaaagcccttcccacttcaccgcagtcccaggcgagccactgggggatgagacccagggacagcagcccctccagttggaggaggatcagagggcgtggcagcggctggagcagctcatcctgggacagctggaggagctgaagcagcagctggaacagcaggaggaggagttgggtcgactgcgcctgggcgtgggggcgacggactcagagaaaagggttcagcatctgactctggagaacgaggccctgaagcagagcctgagtctcatgcgggacctcctgctgcactggggccccgggccccccatcagggctccgcaggaggaggcggaggcattgctagagctccagggccggcttcaggaggcccaagacaccacagaagccctccgagcccagctgggggtgcaggaggtgcagctgcagggccttcaaggggccctccagcagctccagcaggagacggagcagaactgcaggcgtgagctacagcagatgcatgggcagctggcaggtaagggttggggttggggctcatgggaggccctggaggctgggccttcccttccaacagacttccctctccaggacttcgggcacggatggccagcctgcgtcagggctgcggggacctccgaggtttggtcagcacctttacccagagctgtcagggttcgctgagtgaggcccggggccaggtgtcctgggccttgggggcactgtcatctggagggcctggcactcagctccctgaggggcagcaagggcccccagccggatgcccagggcggctgccagaactcaagggaaatatccgtgtgctgtgtcggctgaggccagggacatcttctagccttgtgagtgtggagcctggcccagggggcaccgtcaccacctgctaccgggggcgccatcgtcgattccgcctagactgggtcttccctccagacgccagccaggaggaggtcttcagagagctggaacctgcggtgctgtcctgcctccgaggctacagcgtctgcatcttcacctatggccagacaggcaccgggaagacctacagcatggagggccctcctgaggaccccggcatagttcctagggcgctgcagtcgctgttccgggagatgggggccggccggcagcaccgggtgacactcagcatggtggagatctacaatgaggctgtcagggacctccttgctccagggcctcccgagcgcctggccgtgaggcagggcccagaaggccagggcgggatccaggtggctggcctcacccactgggacgtgcccaacctggagacattgcaccagatgctgaaactggggaggagcaaccgggccaccgccgccaccgccatgaaccagcgcagctcccgctcgcatgccctggtcacgctgacgctgcgcgcggcgtctccaccgcgcgctccaggcaccgcaggtaccacggccggtgcctgagccctgcggagtctccagagcacccgaggcccggccttcccccatgtcgggctcgctcgcccctctaggcacgctgcacctggtggacctggcgggatccgaacgcgcacggaaggcaggggcggccggcccgccgcggggagacccagacggcgcccggcgcctgcgggaggcccagaccataaaccgctcgctgctggcgctaggaggcgtgatggccgcactgcgggcccaccggccgcacgtgcccttccgcgactcgcagctcacgcgactgctgcagccggcgctgggcccaggcaccaccgcggtgctgctgctgcaggtgggcgccggggcggggcaggtgtgtgcgtgccggtcgccgcccacccgggcccgcccacccgcgcctcttgcccgcagatctccacgcggccggaggatctcggggagacagtctgctccctcaagttcgccgaccgagtgggtcaagtggagctggggccagcccggcgccgcagggtcccgcgctcctccgggacgccttcttccctcagcaccgacactccgctcaccgggaccccctgcacccctacgccgtcccctggcagtcctccatgccccagtcccgacaacggctcgggctcggctctcgcgcccgcagagggcctgcccctctagtcctgggtcgcggccctgcccatggggtctcaggccaggtctctgctggcagaggcggtagtaaagtccctgtaccccgtctcccagggcacaagctccctagcctctttggatccattgcccctgagctcccagagtcacccctccacctccgcagccagtgaagtgtgttgtgcctgctgaagtgatcaccccccgcccccagccctgcatcaggccacaggtcttggctttctccttatcaccatttgctgttatcacggcacacagcagggaatcccaggcccccccgccaagtggttacccaagtcaccactcctgacccaaaaatcaggcatggcattaaaacgttgcaaattcctttactgttatcccccccaccaccaggaccatgtagggtgcagtctttactccctaacccgtttcccgaaaaaggtgctacctcctttccagacagatgagagagggcaggacttcaggctggatccaccactgggctctccctcccccagcctggagcacgggaggggaggtgacggctggtgactgatggatgggtagtgggctgagaagaggggactaggaagggctattccaggctcagccctgctcctgcagctttgccgctgagtgtaggaaaaacaggcatgacagaccagggtgagggttgtgcccagctgggccacggccatgcgtggggtggcccaataaacaccgtggactccca

SEQ ID NO: 283902 - DNA, 1987 bp, Homo sapiens
cagagctgagagcccaccctgttagcagcgaccttctgggcataaaagccagccatgttgttgctcaaaagactgttggtgtccagtgccaatggggtcttcagagagctggaacctgcggtgctgtcctgcctccgaggctacagcgtctgcatcttcacctatggccagacaggcaccgggaagacctacagcatggagggccctcctgaggaccccggcatagttcctagggcgctgcagtcgctgttccgggagatgggggccggccggcagcaccgggtgacactcagcatggtggagatctacaatgaggctgtcagggacctccttgctccagggcctcccgagcgcctggccgtgaggcagggcccagaaggccagggcgggatccaggtggctggcctcacccactgggacgtgcccaacctggagacattgcaccagatgctgaaactggggaggagcaaccgggccaccgccgccaccgccatgaaccagcgcagctcccgctcgcatgccctggtcacgctgacgctgcgcgcggcgtctccaccgcgcgctccaggcaccgcaggtaccacggccggtgcctgagccctgcggagtctccagagcacccgaggcccggccttcccccatgtcgggctcgctcgcccctctaggcacgctgcacctggtggacctggcgggatccgaacgcgcacggaaggcaggggcggccggcccgccgcggggagacccagacggcgcccggcgcctgcgggaggcccagaccataaaccgctcgctgctggcgctaggaggcgtgatggccgcactgcgggcccaccggccgcacgtgcccttccgcgactcgcagctcacgcgactgctgcagccggcgctgggcccaggcaccaccgcggtgctgctgctgcaggtgggcgccggggcggggcaggtgtgtgcgtgccggtcgccgcccacccgggcccgcccacccgcgcctcttgcccgcagatctccacgcggccggaggatctcggggagacagtctgctccctcaagttcgccgaccgagtgggtcaagtggagctggggccagcccggcgccgcagggtcccgcgctcctccgggacgccttcttccctcagcaccgacactccgctcaccgggaccccctgcacccctacgccgtcccctggcagtcctccatgccccagtcccgacaacggctcgggctcggctctcgcgcccgcagagggcctgcccctctagtcctgggtcgcggccctgcccatggggtctcaggccaggtctctgctggcagaggcggtagtaaagtccctgtaccccgtctcccagggcacaagctccctagcctctttggatccattgcccctgagctcccagagtcacccctccacctccgcagccagtgaagtgtgttgtgcctgctgaagtgatcaccccccgcccccagccctgcatcaggccacaggtcttggctttctccttatcaccatttgctgttatcacggcacacagcagggaatcccaggcccccccgccaagtggttacccaagtcaccactcctgacccaaaaatcaggcatggcattaaaacgttgcaaattcctttactgttatcccccccaccaccaggaccatgtagggtgcagtctttactccctaacccgtttcccgaaaaaggtgctacctcctttccagacagatgagagagggcaggacttcaggctggatccaccactgggctctccctcccccagcctggagcacgggaggggaggtgacggctggtgactgatggatgggtagtgggctgagaagaggggactaggaagggctattccaggctcagccctgctcctgcagctttgccgctgagtgtaggaaaaacaggcatgacagaccagggtgagggttgtgcccagctgggccacggccatgcgtggggtggcccaataaacaccgtggactccca

SEQ ID NO: 283903 - DNA, 3269 bp, Homo sapiens
accggcactgcggcgggcgggcgccgagtctgggcgcggggacgcggggcggcgcgaagcggggccctctgccgccccgcgctcccatgtacgccttttactcgttgctcatctacatcttctacagcctcttccgcagggatggtggcgccgcggcggccgcggagcccggggaccccgcccagagagcccgcaagccccggggtcgccggcgcccagacctgcccgcgccagagctgtggaccgagctgaccggcctggccgccagctccgagcctgaggatgggtcggaaggcgcagccgagggtcgcgcggccgcggtgtccctggaagaggccctactgcgcctcgccgagttcctctccgtccagctgggggcggaagagagctgcgggggcccggcggacctgggccagtctggcgaggtcccctcactgttgacagtgaccagtcagctcttggcccttctggcatggcttcgaagccccagggggaggcaggccctgctccaggggactcagccagcccctcgggtccggcccccctctccagatggatccacatcccaagaagaaagcccttcccacttcaccgcagtcccaggcgagccactgggggatgagacccagggacagcagcccctccagttggaggaggatcagagggcgtggcagcggctggagcagctcatcctgggacagctggaggagctgaagcagcagctggaacagcaggaggaggagttgggtcgactgcgcctgggcgtgggggcgacggactcagagaaaagggttcagcatctgactctggagaacgaggccctgaagcagagcctgagtctcatgcgggacctcctgctgcactggggccccgggccccccatcagggctccgcaggaggaggcggaggcattgctagagctccagggccggcttcaggaggcccaagacaccacagaagccctccgagcccagctgggggtgcaggaggtgcagctgcagggccttcaaggggccctccagcagctccagcaggagacggagcagaactgcaggcgtgagctacagcagatgcatgggcagctggcaggacttcgggcacggatggccagcctgcgtcagggctgcggggacctccgaggtttggtcagcacctttacccagagctgtcagggttcgctgagtgaggcccggggccaggtgtcctgggccttgggggcactgtcatctggagggcctggcactcagctccctgaggggcagcaagggcccccagccggatgcccagggcggctgccagaactcaagggaaatatccgtgtgctgtgtcggctgaggccagggacatcttctagccttgtgagtgtggagcctggcccagggggcaccgtcaccacctgctaccgggggcgccatcgtcgattccgcctagactgggtcttccctccagacgccagccaggaggaggtcttcagagagctggaacctgcggtgctgtcctgcctccgaggctacagcgtctgcatcttcacctatggccagacaggcaccgggaagacctacagcatggagggccctcctgaggaccccggcatagttcctagggcgctgcagtcgctgttccgggagatgggggccggccggcagcaccgggtgacactcagcatggtggagatctacaatgaggctgtcagggacctccttgctccagggcctcccgagcgcctggccgtgaggcagggcccagaaggccagggcgggatccaggtggctggcctcacccactgggacgtgcccaacctggagacattgcaccagatgctgaaactggggaggagcaaccgggccaccgccgccaccgccatgaaccagcgcagctcccgctcgcatgccctggtcacgctgacgctgcgcgcggcgtctccaccgcgcgctccaggcaccgcaggcacgctgcacctggtggacctggcgggatccgaacgcgcacggaaggcaggggcggccggcccgccgcggggagacccagacggcgcccggcgcctgcgggaggcccagaccataaaccgctcgctgctggcgctaggaggcgtgatggccgcactgcgggcccaccggccgcacgtgcccttccgcgactcgcagctcacgcgactgctgcagccggcgctgggcccaggcaccaccgcggtgctgctgctgcaggtgggcgccggggcggggcaggtgtgtgcgtgccggtcgccgcccacccgggcccgcccacccgcgcctcttgcccgcagatctccacgcggccggaggatctcggggagacagtctgctccctcaagttcgccgaccgagtgggtcaagtggagctggggccagcccggcgccgcagggtcccgcgctcctccgggacgccttcttccctcagcaccgacactccgctcaccgggaccccctgcacccctacgccgtcccctggcagtcctccatgccccagtcccgacaacggctcgggctcggctctcgcgcccgcagagggcctgcccctctagtcctgggtcgcggccctgcccatggggtctcaggccaggtctctgctggcagaggcggtagtaaagtccctgtaccccgtctcccagggcacaagctccctagcctctttggatccattgcccctgagctcccagagtcacccctccacctccgcagccagtgaagtgtgttgtgcctgctgaagtgatcaccccccgcccccagccctgcatcaggccacaggtcttggctttctccttatcaccatttgctgttatcacggcacacagcagggaatcccaggcccccccgccaagtggttacccaagtcaccactcctgacccaaaaatcaggcatggcattaaaacgttgcaaattcctttactgttatcccccccaccaccaggaccatgtagggtgcagtctttactccctaacccgtttcccgaaaaaggtgctacctcctttccagacagatgagagagggcaggacttcaggctggatccaccactgggctctccctcccccagcctggagcacgggaggggaggtgacggctggtgactgatggatgggtagtgggctgagaagaggggactaggaagggctattccaggctcagccctgctcctgcagctttgccgctgagtgtaggaaaaacaggcatgacagaccagggtgagggttgtgcccagctgggccacggccatgcgtggggtggcccaataaacaccgtggactccca

SEQ ID NO: 283904 - DNA, 1538 bp, Homo sapiens
ggacgcgtcgcccacgcgtcggatctacaatgaggctgtcagggacctccttgctccagggcctcccgagcgcctggccgtgaggcagggcccagaaggccagggcgggatccaggtggctggcctcacccactgggacgtgcccaacctggagacattgcaccagatgctgaaactggggaggagcaaccgggccaccgccgccaccgccatgaaccagcgcagctcccgctcgcatgccctggtcacgctgacgctgcgcgcggcgtctccaccgcgcgctccaggcaccgcaggcacgctgcacctggtggacctggcgggatccgaacgcgcacggaaggcaggggcggccggcccgccgcggggagacccagacggcgcccggcgcctgcgggaggcccagaccataaaccgctcgctgctggcgctaggaggcgtgatggccgcactgcgggcccaccggccgcacgtgcccttccgcgactcgcagctcacgcgactgctgcagccggcgctgggcccaggcaccaccgcggtgctgctgctgcagatctccacgcggccggaggatctcggggagacagtctgctccctcaagttcgccgaccgagtgggtcaagtggagctggggccagcccggcgccgcagggtcccgcgctcctccgggacgccttcttccctcagcaccgacactccgctcaccgggaccccctgcacccctacgccgtcccctggcagtcctccatgccccagtcccgacaacggctcgggctcggctctcgcgcccgcagagggcctgcccctctagtcctgggtcgcggccctgcccatggggtctcaggccaggtctctgctggcagaggcggtagtaaagtccctgtaccccgtctcccagggcacaagctccctagcctctttggatccattgcccctgagctcccagagtcacccctccacctccgcagccagtgaagtgtgttgtgcctgctgaagtgatcaccccccgcccccagccctgcatcaggccacaggtcttggctttctccttatcaccatttgctgttatcacggcacacagcagggaatcccaggcccccccgccaagtggttacccaagtcaccactcctgacccaaaaatcaggcatggcattaaaacgttgcaaattcctttactgttatcccccccaccaccaggaccatgtagggtgcagtctttactccctaacccgtttcccgaaaaaggtgctacctcctttccagacagatgagagagggcaggacttcaggctggatccaccactgggctctccctcccccagcctggagcacgggaggggaggtgacggctggtgactgatggatgggtagtgggctgagaagaggggactaggaagggctattccaggctcagccctgctcctgcagctttgccgctgagtgtaggaaaaacaggcatgacagaccagggtgagggttgtgcccagctgggccacggccatgcgtggggtggcccaataaacaccgtggactccca

SEQ ID NO: 283905 - DNA, 3301 bp, Homo sapiens
accggcactgcggcgggcgggcgccgagtctgggcgcggggacgcggggcggcgcgaagcggggccctctgccgccccgcgctcccatgtacgccttttactcgttgctcatctacatcttctacagcctcttccgcagggatggtggcgccgcggcggccgcggagcccggggaccccgcccagagagcccgcaagccccggggtcgccggcgcccagacctgcccgcgccagagctgtggaccgagctgaccggcctggccgccagctccgagcctgaggatgggtcggaaggcgcagccgagggtcgcgcggccgcggtgtccctggaagaggccctactgcgcctcgccgagttcctctccgtccagctgggggcggaagagagctgcgggggcccggcggacctgggccagtctggcgaggtcccctcactgttgacagtgaccagtcagctcttggcccttctggcatggcttcgaagccccagggggaggcaggccctgctccaggggactcagccagcccctcgggtccggcccccctctccagatggatccacatcccaagaagaaagcccttcccacttcaccgcagtcccaggcgagccactgggggatgagacccagggacagcagcccctccagttggaggaggatcagagggcgtggcagcggctggagcagctcatcctgggacagctggaggagctgaagcagcagctggaacagcaggaggaggagttgggtcgactgcgcctgggcgtgggggcgacggactcagagaaaagggttcagcatctgactctggagaacgaggccctgaagcagagcctgagtctcatgcgggacctcctgctgcactggggccccgggccccccatcagggctccgcaggaggaggcggaggcattgctagagctccagggccggcttcaggaggcccaagacaccacagaagccctccgagcccagctgggggtgcaggaggtgcagctgcagggccttcaaggggccctccagcagctccagcaggagacggagcagaactgcaggcgtgagctacagcagatgcatgggcagctggcaggacttcgggcacggatggccagcctgcgtcagggctgcggggacctccgaggtttggtcagcacctttacccagagctgtcagggttcgctgagtgaggcccggggccaggtgtcctgggccttgggggcactgtcatctggagggcctggcactcagctccctgaggggcagcaagggcccccagccggatgcccagggcggctgccagaactcaagggaaatatccgtgtgctgtgtcggctgaggccagggacatcttctagccttgtgagtgtggagcctggcccagggggcaccgtcaccacctgctaccgggggcgccatcgtcgattccgcctagactgggtcttccctccagacgccagccaggaggaggtcttcagagagctggaacctgcggtgctgtcctgcctccgaggctacagcgtctgcatcttcacctatggccagacaggcaccgggaagacctacagcatggagggccctcctgaggaccccggcatagttcctagggcgctgcagtcgctgttccgggagatgggggccggccggcagcaccgggtgacactcagcatggtggagatctacaatgaggctgtcagggacctccttgctccagggcctcccgagcgcctggccgtgaggcagggcccagaaggccagggcgggatccaggtggctggcctcacccactgggacgtgcccaacctggagacattgcaccagatgctgaaactggggaggagcaaccgggccaccgccgccaccgccatgaaccagcgcagctcccgctcgcatgccctggtcacgctgacgctgcgcgcggcgtctccaccgcgcgctccaggcaccgcaggcacgctgcacctggtggacctggcgggatccgaacgcgcacggaaggcaggggcggccggcccgccgcggggagacccagacggcgcccggcgcctgcgggaggcccagaccataaaccgctcgctgctggcgctaggaggcgtgatggccgcactgcgggcccaccggccgcacgtgcccttccgcgactcgcagctcacgcgactgctgcagccggcgctgggcccaggcaccaccgcggtgctgctgctgcagatctccacgcggccggaggatctcggggagacagtctgctccctcaagttcgccgaccgagtgggtcaagtggagctggggccagcccggcgccgcagggtcccgcgctcctccgggacgccttcttccctcagcaccgacactccgctcaccgggaccccctgcacccctacgccgtcccctggcagtcctccatgccccagtcccgacaacggctcgggctcggctctcgcgcccgcagagggcctgcccctctagtcctgggtcgcggccctgcccatggggtctcaggccaggtctctgctggcagaggcggtagtaaagtccctgtaccccgtctcccagggcacaagctccctagcctctttggatccattgcccctgagctcccagagtcacccctccacctccgcagccagtgaagtgtgttgtgcctgctgaagtgatcaccccccgcccccagccctgcatcaggccacaggtcttggctttctccttatcaccatttgctgttatcacggcacacagcagggaatcccaggcccccccgccaagtggttacccaagtcaccactcctgacccaaaaatcaggcatggcattaaaacgttgcaaattcctttactgttatcccccccaccaccaggaccatgtagggtgcagtctttactccctaacccgtttcccgaaaaaggtgctacctctctccctcccccagcctggagcacgggaggggaggtgacggctggtgactgatggatgggtagtgggctgagaagaggggactaggaagggctattccaggctcagccctgctcctgcagctttgccgctgagtgtaggaaaaacaggcatgacagaccagggtgagggttgtgcccagctgggccacggccatgcgtggggtggcccaataaacaccgtggactcccaaaaaactaaaaacctacaatagaaaacaactttaaggaactacaatatttaaccaaaatatatatgcgcaactgaaaaagaattgattcaaaaaaaaaagcaaaaagcctgggggggggggctttcccccatggggccctctggtggactttgtgaatatgatgg

SEQ ID NO: 283906 - DNA, 255 bp, Homo sapiens
aaaagggttcagcatctgactctggagaacgaggccctgaagcagagcctgagtctcatgcgggacctcctgctgcactggggccccgggccccccatcagggctccgcaggtactctgctcccgagctgcagccgttcctgcagcctggggctcttgcacacctggcatgcagccacagggcccgagcctcctcaggacctcccgggatggtctgtgtagggcagccccatcagggaggctgatgccaatggga

SEQ ID NO: 283907 - DNA, 593 bp, Homo sapiens
actgctctgagtaggggtatggagggccgaacagagacggaagtggaaggggaggcagctgggtgctcacccaggtagttggagctaggccggagctgggcaatctggagccgcaaggctcccgctggaatccacaagatcttctgatagcccagggggccccctcggtcagtgaggttccccgaaacaaggcgacaggtagaatcatcacccccacagactccacagccatcaggacgcctgccagagccaaggatcccatcacagccggggctctggagagagtgaggtgaggcagtggccacagaacgccagacaccacctcaaccccaccccggtcccctcgggagcctcagctcactaccctgctttttgtgccacaagtgagagcacaaaaacagccccaccatccccagccagacccagggacatggacaggtgcccgatcagatccttcaggctctgctcagcgcagcttggcaggtgagaattctccctcagtgatctcagtatggtgttttgttgttgaattgagactgtgcaaatacgtgtgtgtgcatgtgtgcatgtgttcatgcatgtgtgtctacatg

SEQ ID NO: 283908 - DNA, 366 bp, Homo sapiens
ggtcagttgaggtcaccgagaccatcaaggggactctgaactgagagaggagcaatccctgatgcccatgattctgtgtgttcagagctcttgagtgcttatcccggtgtcaagttaacacaggcctaaaatgaagcggatggtaacctgggagcaaccgatacgacagtgcccaggatgcgtggcacacccccaccgggctgtcacggctggacaggatctctcccaccatggccctcttgtgtcacagccacctgacccccagtgatggccttcccaggggagtccggacaaagcgtgtctcccacacctcctcctcccaccccgacccttctgcagaccactcaccacctgtgctgtctcctg

SEQ ID NO: 283909 - DNA, 709 bp, Homo sapiens
ctcacctggctccaaggagagccaacttcccaatggccacagaggcgcagctggcaagactgggtgatgttgggccgggggagatgtccacagcgctccgggggcaccgaggagccaccccccccaaattcctgccggcactgcagctggcggtgctgggtgccggggccacaggagcggctgcaggatgtccactcgccagcctcccagctgcaggcaccagcagggcagggaagaggcggagacatagatgagatgtgtggggctgccgtggcagcagagatggaagacacactggacgtgggggcctcagagccaggagatgttgcgttgagtgcagagttcaggacccagggggatccacagcccagttcccattgatgatggaccggcccccagggccacgaagtgctgcgggtcagagactccacagccatcaggacgcctgccagagccaaggatcccatcacagccggggctctggagagagtgagtgagagcacaaaaacagccccaccatccccagccagacccagggacatggacaggtgcccgatcagatccttcaggctctgctcagcgcagcttggcagccacctgacccccagtgatggccttcccaggggagtccggacaaagcgtgtctcccacacctcctcctcccaccccgacccttctgcagaccactcaccacctgtgctgtctcctg

SEQ ID NO: 283910 - DNA, 729 bp, Homo sapiens
ggggcggagctggagggggtggttcggcgtgggggccgttggctccagacaaataaacatggagtccatcttccacgagaaacaagaaggctcactttgtgctcaacattgcctgaataacttattgcaaggagaatattttagccctgtggaattatcctcaattgcacatcagctggatgaggaggagaggatgagaatggcagaaggaggagttactagtgaagattatcgcacgtttttacagcagccttctggaaatatggatgacagtggttttttctctattcaggttataagcaatgccttgaaagtttggggtttagaactaatcctgttcaacagtccagagtatcagaggctcaggatcgatcctataaatgaaagatcatttatatgcaattataaggaacactggtttacagttagaaaattaggaaaacagtggtttaacttgaattctctcttgacgggtccagaattaatatcagataagtgcactgtggcagtgccgcttgctcaggacccagccctgcagcccttctgtgtgtgctccctcgttaagttcatttgctgttattacacacacaggccttcctgtctggtcgttagaaaagccgggcttccaaagcactgttgaacacaggattctgttgttagtgtggatgttcaatgagttgtattttaaatatcaaagattattaaataaagataatgtttgcttttcta

SEQ ID NO: 283911 - DNA, 1722 bp, Homo sapiens
ggggcggagctggagggggtggttcggcgtgggggccgttggctccagacaaataaacatggagtccatcttccacgagaaacagccttctggaaatatggatgacagtggttttttctctattcaggttataagcaatgccttgaaagtttggggtttagaactaatcctgttcaacagtccagagtatcagaggctcaggatcgatcctataaatgaaagatcatttatatgcaattataaggaacactggtttacagttagaaaattaggaaaacagtggtttaacttgaattctctcttgacgggtccagaattaatatcagatacatatcttgcacttttcttggctcaattacaacaggaaggttattctatatttgtcgttaagggtgatctgccagattgcgaagctgaccaactcctgcagatgattagggtccaacagatgcatcgaccaaaacttattggagaagaattagcacaactaaaagagcaaagagtccataaaacagacctggaacgagtgttagaagcaaatgatggctcaggaatgttagacgaagatgaggaggatttgcagagggctctggcactaagtcgccaagaaattgacatggaagatgaggaagcagatctccgcagggctattcagctaagtatgcaaggtagttccagaaacatatctcaagatatgacacagacatcaggtacaaatcttacttcagaagagcttcggaagagacgagaagcctactttgaaaaagcagcagcaaaagcagcagcagcagcagcagcagcagcagcagggggacctatcaggacagagttcacatccatgtgaaaggccagccaccagttcaggagcacttgggagtgatctaggtgatgctatgagtgaagaagacatgcttcaggcagctgtgaccatgtctttagaaactgtcagaaatgatttgaaaacagaaggaaaaaaataatacctttaaaaaataatttagatattcatactttccaacattatcctgtgtgattacagcatagggtccactttggtaatgtgtcaaagagatgaggaaataagacttttagcggtttgcaaacaaaatgatgggaaagtggaacaatgcgtcggttgtaggactaaataatgatcttccaaatattagccaaagaggcattcagcaattaaagacatttaaaatagttttctaaatgtttctttttcttttttgagtgtgcaatatgtaacatgtctaaagttagggcatttttcttggatctttttgcagactagctaattagctctcgcctcaggctttttccatatagtttgttttctttttctgtcttgtaggtaagttggctcacatcatgtaatagtggctttcatttcttattaaccaaattaacctttcaggaaagtatctctactttcctgatgttgataatagtaatggttctagaaggatgaacagttctcccttcaactgtataccgtgtgctccagtgttttcttgtgttgttttctctgatcacaacttttctgctacctggttttcattattttcccacaattcttttgaaagatggtaatcttttctgaggtttagcgttttaagccctacgatgggatcattatttcatgactggtgcgttcctaaactctgaaatcagccttgcacaagtacttgagaataaatgagcattttttaaaatgtg

SEQ ID NO: 283912 - DNA, 933 bp, Homo sapiens
atatatatgtgaccctaattaagaactaccagattggatcaactaatcatgtcagcaatgtaaataactttatttttcatattcaaaataaaaactttcttttatttctggcccctttataaccagcatctttttgctttaaaaaatgacctggctttgtatttttttagtcttaaacataataaaaatatttttgttctaatttgctttcatgagtgaagattattgacatcgttggtaaattctagaattttgattttgttttttaatttgaagaaaatctttgctattattattttttccaagtggtctggcattttaagaattagtgctaataacgtaacttctaaatttgtcgtaattggcatgtttaatagcatatcaaaaaacattttaagcctgtggattcatagacaaagcaatgagaaacattagtaaaatataaatggatattcctgatgcatttaggaagctctcaattgtctcttgcatagttcaaggaatgttttctgaatttttttaatgctttttttttttttgaaagaggaaaacatacatttttaaatgtgattatctaatttttacaacactgggctattaggaataactttttaaaaattactgttctgtataaatatttgaaattcaagtacagaaaatatctgaaacaaaaagcattgttgtttggccatgatacaagtgcactgtggcagtgccgcttgctcaggacccagccctgcagcccttctgtgtgtgctccctcgttaagttcatttgctgttattacacacacaggccttcctgtctggtcgttagaaaagccgggcttccaaagcactgttgaacacaggattctgttgttagtgtggatgttcaatgagttgtattttaaatatcaaagattattaaataaagataatgtttgcttttcta

SEQ ID NO: 283913 - DNA, 1117 bp, Homo sapiens
atatatatgtgaccctaattaagaactaccagattggatcaactaatcatgtcagcaatgtaaataactttatttttcatattcaaaataaaaactttcttttatttctggcccctttataaccagcatctttttgctttaaaaaatgacctggctttgtatttttttagtcttaaacataataaaaatatttttgttctaatttgctttcatgagtgaagattattgacatcgttggtaaattctagaattttgattttgttttttaatttgaagaaaatctttgctattattattttttccaagtggtctggcattttaagaattagtgctaataacgtaacttctaaatttgtcgtaattggcatgtttaatagcatatcaaaaaacattttaagcctgtggattcatagacaaagcaatgagaaacattagtaaaatataaatggatattcctgatgcatttaggaagctctcaattgtctcttgcatagttcaaggaatgttttctgaatttttttaatgctttttttttttttgaaagaggaaaacatacatttttaaatgtgattatctaatttttacaacactgggctattaggaataactttttaaaaattactgttctgtataaatatttgaaattcaagtacagaaaatatctgaaacaaaaagcattgttgtttggccatgatacaagtgcactgtggcagtgccgcttgctcaggacccagccctgcagcccttctgtgtgtgctccctcgttaagttcatttgctgttattacacacacaggccttcctgtctggtcgttagaaaagccgggcttccaaagcactgttgaacacaggattctgttgttagtgtggatgttcaatgagttgtattttaaatatcaaagattattaaataaagataatgtttgcttttctatttccttttgaatttgtgtttattgttaattcatagctattcaaagtgtgattagagctgggcttggtggcttgcatctacagttccagctacccaggaggcaggggcaggaggattgcttgagcctaggagttcgaggctgcagtgagctatgatcctgccactgaattctagcctgggcgac

SEQ ID NO: 283914 - DNA, 1175 bp, Homo sapiens
ggggcggagctggagggggtggttcggcgtgggggccgttggctccagacaaataaacatggagtccatcttccacgagaaacaagaaggctcactttgtgctcaacattgcctgaataacttattgcaaggagaatattttagccctgtggaattatcctcaattgcacatcagctggatgaggaggagaggatgagaatggcagaaggaggagttactagtgaagattatcgcacgtttttacaggttataagcaatgccttgaaagtttggggtttagaactaatcctgttcaacagtccagagtatcagaggctcaggatcgatcctataaatgaaagatcatttatatgcaattataaggaacactggtttacagttagaaaattaggaaaacagtggtttaacttgaattctctcttgacgggtccagaattaatatcagatacatatcttgcacttttcttggctcaattacaacaggaaggttattctatatttgtcgttaagggtgatctgccagattgcgaagctgaccaactcctgcagatgattagggtccaacagatgcatcgaccaaaacttattggagaagaattagcacaactaaaagagcaaagtcctaaacagaccggacggtgtgaagcaatgtggggccgatgttccaaatagggattgcgaagggcgtgcaagtccaatgttgtgaagggagacctgggacttagagctgggccacaccttggtcgccgaacatgcgggagaccaagagtgtgttcctcctccgtccgcccgcactctatcttttctttctctctttttcccgaaccaaaaacagcacgagggacgggagggacgagagcccggacaggacggcggggacgacggcaccggagcagacaagcacagcgacgcaacgaagagaaaccggaacgcgacgcagcgagccagcacactcagaggagccgaggcgggagcaaggaacgccaagagcgcgggcgacgcggaagaggcgcggggcgcaagaggaggagggggggggaagagagggaagagacgaagagagggcgagagagcagagagcgggaggagaaggggacaggggcggagagggacgacgggcaagcgcaagcacgaggagagaaaagacagccgaccagagccgcaccgacgacca

SEQ ID NO: 283915 - DNA, 445 bp, Homo sapiens
ggggcggagctggagggggtggttcggcgtgggggccgttggctccagacaaataaacatggagtccatcttccacgagaaacaagaaggctcactttgtgctcaacattgcctgaataacttattgcaaggagaatattttagccctgtggaattatcctcaattgcacatcagctggatgaggaggagaggatgagaatggcagaaggaggagttactagtgaagattatcgcacgtttttacagcagccttctggaaatatggatgacagtggttttttctctattcaggttataagcaatgccttgaaagtttggggtttagaactaatcctgttcaacagtccagagtatcagaggctcaggatcgatcctatactttcctatttcacctttgtgatgtccatgagcatctgccctgtagccttcctggcaccccagtgt

SEQ ID NO: 283916 - DNA, 1830 bp, Homo sapiens
ggggcggagctggagggggtggttcggcgtgggggccgttggctccagacaaataaacatggagtccatcttccacgagaaacaagaaggctcactttgtgctcaacattgcctgaataacttattgcaaggagaatattttagccctgtggaattatcctcaattgcacatcagctggatgaggaggagaggatgagaatggcagaaggaggagttactagtgaagattatcgcacgtttttacagcagccttctggaaatatggatgacagtggttttttctctattcagaaatgaaagatcatttatatgcaattataaggaacactggtttacagttagaaaattaggaaaacagtggtttaacttgaattctctcttgacgggtccagaattaatatcagatacatatcttgcacttttcttggctcaattacaacaggaaggttattctatatttgtcgttaagggtgatctgccagattgcgaagctgaccaactcctgcagatgattagggtccaacagatgcatcgaccaaaacttattggagaagaattagcacaactaaaagagcaaagagtccataaaacagacctggaacgagtgttagaagcaaatgatggctcaggaatgttagacgaagatgaggaggatttgcagagggctctggcactaagtcgccaagaaattgacatggaagatgaggaagcagatctccgcagggctattcagctaagtatgcaaggtagttccagaaacatatctcaagatatgacacagacatcaggtacaaatcttacttcagaagagcttcggaagagacgagaagcctactttgaaaaacagcagcaaaagcagcaacagcagcagcagcagcagcaaaagcagcagcagcagcagcagcagcagcagcagggggacctatcaggacagagttcacatccatgtgaaaggccagccaccagttcaggagcacttgggagtgatctaggtgatgctatgagtgaagaagacatgcttcaggcagctgtgaccatgtctttagaaactgtcagaaatgatttgaaaacagaaggaaaaaaataatacctttaaaaaataatttagatattcatactttccaacattatcctgtgtgattacagcatagggtccactttggtaatgtgtcaaagagatgaggaaataagacttttagcggtttgcaaacaaaatgatgggaaagtggaacaatgcgtcggttgtaggactaaataatgatcttccaaatattagccaaagaggcattcagcaattaaagacatttaaaatagttttctaaatgtttctttttcttttttgagtgtgcaatatgtaacatgtctaaagttagggcatttttcttggatctttttgcagactagctaattagctctcgcctcaggctttttccatatagtttgttttctttttctgtcttgtaggtaagttggctcacatcatgtaatagtggctttcatttcttattaaccaaattaacctttcaggaaagtatctctactttcctgatgttgataatagtaatggttctagaaggatgaacagttctcccttcaactgtataccgtgtgctccagtgttttcttgtgttgttttctctgatcacaacttttctgctacctggttttcattattttcccacaattcttttgaaagatggtaatcttttctgaggtttagcgttttaagccctacgatgggatcattatttcatgactggtgcgttcctaaactctgaaatcagccttgcacaagtacttgagaataaatgagcattttttaaaatgtg

SEQ ID NO: 283917 - DNA, 1952 bp, Homo sapiens
ggggcggagctggagggggtggttcggcgtgggggccgttggctccagacaaataaacatggagtccatcttccacgagaaacaagaaggctcactttgtgctcaacattgcctgaataacttattgcaaggagaatattttagccctgtggaattatcctcaattgcacatcagctggatgaggaggagaggatgagaatggcagaaggaggagttactagtgaagattatcgcacgtttttacagcagccttctggaaatatggatgacagtggttttttctctattcaggttataagcaatgccttgaaagtttggggtttagaactaatcctgttcaacagtccagagtatcagaggctcaggatcgatcctataaatgaaagatcatttatatgcaattataaggaacactggtttacagttagaaaattaggaaaacagtggtttaacttgaattctctcttgacgggtccagaattaatatcagatacatatcttgcacttttcttggctcaattacaacaggaaggttattctatatttgtcgttaagggtgatctgccagattgcgaagctgaccaactcctgcagatgattagggtccaacagatgcatcgaccaaaacttattggagaagaattagcacaactaaaagagcaaagagtccataaaacagacctggaacgagtgttagaagcaaatgatggctcaggaatgttagacgaagatgaggaggatttgcagagggctctggcactaagtcgccaagaaattgacatggaagatgaggaagcagatctccgcagggctattcagctaagtatgcaaggtagttccagaaacatatctcaagatatgacacagacatcaggtacaaatcttacttcagaagagcttcggaagagacgagaagcctactttgaaaaacagcagcaaaagcagcaacagcagcagcagcagcagcagcagcagcagcagcagcagcagcagcagcagcagcaaaagcagcagcagcagcagcagcagcagcagcagggggacctatcaggacagagttcacatccatgtgaaaggccagccaccagttcaggagcacttgggagtgatctaggtgatgctatgagtgaagaagacatgcttcaggcagctgtgaccatgtctttagaaactgtcagaaatgatttgaaaacagaaggaaaaaaataatacctttaaaaaataatttagatattcatactttccaacattatcctgtgtgattacagcatagggtccactttggtaatgtgtcaaagagatgaggaaataagacttttagcggtttgcaaacaaaatgatgggaaagtggaacaatgcgtcggttgtaggactaaataatgatcttccaaatattagccaaagaggcattcagcaattaaagacatttaaaatagttttctaaatgtttctttttcttttttgagtgtgcaatatgtaacatgtctaaagttagggcatttttcttggatctttttgcagactagctaattagctctcgcctcaggctttttccatatagtttgttttctttttctgtcttgtaggtaagttggctcacatcatgtaatagtggctttcatttcttattaaccaaattaacctttcaggaaagtatctctactttcctgatgttgataatagtaatggttctagaaggatgaacagttctcccttcaactgtataccgtgtgctccagtgttttcttgtgttgttttctctgatcacaacttttctgctacctggttttcattattttcccacaattcttttgaaagatggtaatcttttctgaggtttagcgttttaagccctacgatgggatcattatttcatgactggtgcgttcctaaactctgaaatcagccttgcacaagtacttgagaataaatgagcattttttaaaatgtg

SEQ ID NO: 283918 - DNA, 1726 bp, Homo sapiens
gtccatctttcacgagaaacacgaggcaagaaggctcactttgtgctcaacattgcctgaataacttattgcaaggagaatattttagccctgtggaattatcctcaattgcacatcagctggatgaggaggagaggatgagaatggcagaaggaggagttactagtgaagattatcgcacgtttttacagcagccttctggaaatatggatgacagtggttttttctctattcagaaatgaaagatcatttatatgcaattataaggaacactggtttacagttagaaaattaggaaaacagacatatcttgcacttttcttggctcaattacaacaggaaggttattctatatttgtcgttaagggtgatctgccagattgcgaagctgaccaactcctgcagatgattagggtccaacagatgcatcgaccaaaacttattggagaagaattagcacaactaaaagagcaaagagtccataaaacagacctggaacgagtgttagaagcaaatgatggctcaggaatgttagacgaagatgaggaggatttgcagagggctctggcactaagtcgccaagaaattgacatggaagatgaggaagcagatctccgcagggctattcagctaagtatgcaaggtagttccagaaacatatctcaagatatgacacagacatcaggtacaaatcttacttcagaagagcttcggaagagacgagaagcctactttgaaaaacagcagcaaaagcagcaacagcagcagcagcagcagcaaaagcagcagcagcagcagcagcagcagcagcagggggacctatcaggacagagttcacatccatgtgaaaggccagccaccagttcaggagcacttgggagtgatctaggtgatgctatgagtgaagaagacatgcttcaggcagctgtgaccatgtctttagaaactgtcagaaatgatttgaaaacagaaggaaaaaaataatacctttaaaaaataatttagatattcatactttccaacattatcctgtgtgattacagcatagggtccactttggtaatgtgtcaaagagatgaggaaataagacttttagcggtttgcaaacaaaatgatgggaaagtggaacaatgcgtcggttgtaggactaaataatgatcttccaaatattagccaaagaggcattcagcaattaaagacatttaaaatagttttctaaatgtttctttttcttttttgagtgtgcaatatgtaacatgtctaaagttagggcatttttcttggatctttttgcagactagctaattagctctcgcctcaggctttttccatatagtttgttttctttttctgtcttgtaggtaagttggctcacatcatgtaatagtggctttcatttcttattaaccaaattaacctttcaggaaagtatctctactttcctgatgttgataatagtaatggttctagaaggatgaacagttctcccttcaactgtataccgtgtgctccagtgttttcttgtgttgttttctctgatcacaacttttctgctacctggttttcattattttcccacaattcttttgaaagatggtaatcttttctgaggtttagcgttttaagccctacgatgggatcattatttcatgactggtgcgttcctaaactctgaaatcagccttgcacaagtacttgagaataaatgagcattttttaaaatgtg

SEQ ID NO: 283919 - DNA, 1286 bp, Homo sapiens
  misc_feature (1231)..(1231): n is a, c, g, or t
ggggcggagctggagggggtggttcggcgtgggggccgttggctccagacaaataaacatggagtccatcttccacgagaaacaagaaggctcactttgtgctcaacattgcctgaataacttattgcaaggagaatattttagccctgtggaattatcctcaattgcacatcagctggatgaggaggagaggatgagaatggcagaaggaggagttactagtgaagattatcgcacgtttttacagcagccttctggaaatatggatgacagtggttttttctctattcaggttataagcaatgccttgaaagtttggggtttagaactaatcctgttcaacagtccagagtatcagaggctcaggatcgatcctataaatgaaagatcatttatatgcaattataaggaacactggtttacagttagaaaattaggaaaacagtggtttaacttgaattctctcttgacgggtccagaattaatatcagatacatatcttgcacttttcttggctcaattacaacaggaaggttattctatatttgtcgttaagggtgatctgccagattgcgaagctgaccaactcctgcagatgattagggtccaacagatgcatcgaccaaaacttattggagaagaattagcacaactaaaagagcaaagagtccataaaacagacctggaacgagtgttagaagcaaatgatggctcaggaatgttagacgaagatgaggaggatttgcagagggctctggcactaagtcgccaagaaattgacatggaagatgaggaagcagatctccgcagggctattcagctaagtatgcaaggtagttccagaaacatatctcaagatatgacacagacatcaggtacaaatcttacttcagaagagcttcggaagagacgagaagcctactttgaaaaacagcagcaaaagcagcaacagcagcagcagcagcagcagcagcagcagcagcagcagcagcagcagcagcagcaaaagcagcagcagcagcagcagcagcagcagcagggggacctatcaggacagagttcacatccatgtgaaaggccagccaccagttcaggagcacttgggagtgatctaggtaaggcctgctcaccattcatcatgttcgctaccttcacactttatctgacatacgagctccatgtgatttttgctttacattattcttcattccctctttaatcatattaagantcttaagtaaatttgtaatctactaaatttccctggattaaggagcagttaccaa

SEQ ID NO: 283920 - DNA, 1209 bp, Homo sapiens
aatgcattatgctacgtgaaagaagccatattcaaaaggctacatacctactgatgccttttatatgacgtgcaggaaaagataaaactgtaggacagagaatatactggtggctatctgggattaggaaatggggatcgaccacaaaggggcagcatgggggaattttctggggcaatggaatggttgtgtatcttgatggtgtatttgtcaaaatatatagaactataaaagtaaattttgctttatatgtattaaatcaaaaaaagaaactcgtgctcaaatagaaatacattttctgagaacttgccttttgatgactttgagaattttctggaaattttaaagaaatgtggttttgtttcccaacaggtgatgctatgagtgaagaagacatgcttcaggcagctgtgaccatgtctttagaaactgtcagaaatgatttgaaaacagaaggaaaaaaataatacctttaaaaaataatttagatattcatactttccaacattatcctgtgtgattacagcatagggtccactttggtaatgtgtcaaagagatgaggaaataagacttttagcggtttgcaaacaaaatgatgggaaagtggaacaatgcgtcggttgtaggactaaataatgatcttccaaatattagccaaagaggcattcagcaattaaagacatttaaaatagttttctaaatgtttctttttcttttttgagtgtgcaatatgtaacatgtctaaagttagggcatttttcttggatctttttgcagactagctaattagctctcgcctcaggctttttccatatagtttgttttctttttctgtcttgtaggtaagttggctcacatcatgtaatagtggctttcatttcttattaaccaaattaacctttcaggaaagtatctctactttcctgatgttgataatagtaatggttctagaaggatgaacagttctcccttcaactgtataccgtgtgctccagtgttttcttgtgttgttttctctgatcacaacttttctgctacctggttttcattattttcccacaattcttttgaaagatggtaatcttttctgaggtttagcgttttaagccctacgatgggatcattatttcatgactggtgcgttcctaaactctgaaatcagccttgcacaagtacttgagaataaatgagcattttttaaaatgtg

SEQ ID NO: 283921 - DNA, 1062 bp, Homo sapiens
atatatatgtgaccctaattaagaactaccagattggatcaactaatcatgtcagcaatgtaaataactttatttttcatattcaaaataaaaactttcttttatttctggcccctttataaccagcatctttttgctttaaaaaatgacctggctttgtatttttttagtcttaaacataataaaaatatttttgttctaatttgctttcatgagtgaagattattgacatcgttggtaaattctagaattttgattttgttttttaatttgaagaaaatctttgctattattattttttccaagtggtctggcattttaagaattagtgctaataacgtaacttctaaatttgtcgtaattggcatgtttaatagcatatcaaaaaacattttaagcctgtggattcatagacaaagcaatgagaaacattagtaaaatataaatggatattcctgatgcatttaggaagctctcaattgtctcttgcatagttcaaggaatgttttctgaatttttttaatgctttttttttttttgaaagaggaaaacatacatttttaaatgtgattatctaatttttacaacactgggctattaggaataactttttaaaaattactgttctgtataaatatttgaaattcaagtacagaaaatatctgaaaccaggacccagccctgcagcccttctgtgtgtgctccctcgttaagttcatttgctgttattacacacacaggccttcctgtctggtcgttagaaaagccgggcttccaaagcactgttgaacacaggattctgttgttagtgtggatgttcaatgagttgtattttaaatatcaaagattattaaataaagataatgtttgcttttctatttccttttgaatttgtgtttattgttaattcatagctattcaaagtgtgattagagctgggcttggtggcttgcatctacagttccagctacccaggaggcaggggcaggaggattgcttgagcctaggagttcgaggctgcagtgagctatgatcctgccactgaattctagcctgggcgac

SEQ ID NO: 283922 - DNA, 450 bp, Homo sapiens
  misc_feature (397)..(397): n is a, c, g, or t
aaagtaatctgtatcagactaactgctcttgcattcttttaataccagtgactactttgattcgtgaaacaatgtattttccttatgaatagtttttctcatggtgtatttattcttttaagttttgttttttaaatatacttcacttttgaatgtttcagagcagcagcaaaagcagcagcagcagcagcagcagcagcagcagggggacctatcaggacagagttcacatccatgtgaaaggccagccaccagttcaggagcacttgggagtgatctaggtaaggcctgctcaccattcatcatgttcgctaccttcacactttatctgacatacgagctccatgtgatttttgctttacattattcttcattccctctttaatcatattaagantcttaagtaaatttgtaatctactaaatttccctggattaaggagcagttacc

SEQ ID NO: 283923 - DNA, 1887 bp, Homo sapiens
ggggcggagctggagggggtggttcggcgtgggggccgttggctccagacaaataaacatggagtccatcttccacgagaaacaagaaggctcactttgtgctcaacattgcctgaataacttattgcaaggagaatattttagccctgtggaattatcctcaattgcacatcagctggatgaggaggagaggatgagaatggcagaaggaggagttactagtgaagattatcgcacgtttttacagcagccttctggaaatatggatgacagtggttttttctctattcaggttataagcaatgccttgaaagtttggggtttagaactaatcctgttcaacagtccagagtatcagaggctcaggatcgatcctataaatgaaagatcatttatatgcaattataaggaacactggtttacagttagaaaattaggaaaacagtggtttaacttgaattctctcttgacgggtccagaattaatatcagatacatatcttgcacttttcttggctcaattacaacaggaaggttattctatatttgtcgttaagggtgatctgccagattgcgaagctgaccaactcctgcagatgattagggtccaacagatgcatcgaccaaaacttattggagaagaattagcacaactaaaagagcaaagagtccataaaacagacctggaacgagtgttagaagcaaatgatggctcaggaatgttagacgaagatgaggaggatttgcagagggctctggcactaagtcgccaagaaattgacatggaagatgaggaagcagatctccgcagggctattcagctaagtatgcaaggtagttccagaaacatatctcaagatatgacacagacatcaggtacaaatcttacttcagaagagcttcggaagagacgagaagcctactttgaaaaagcagcagcaaaagcagcagcagcagcagcagcagcagcagcagggggacctatcaggacagagttcacatccatgtgaaaggccagccaccagttcaggagcacttgggagtgatctaggtgatgctatgagtgaagaagacatgcttcaggcagctgtgaccatgtctttagaaactgtcagaaatgatttgaaaacagaaggaaaaaaataatacctttaaaaaataatttagatattcatactttccaacattatcctgtgtgattacagcatagggtccactttggtaatgtgtcaaagagatgaggaaataagacttttagcggtttgcaaacaaaatgatgggaaagtggaacaatgcgtcggttgtaggactaaataatgatcttccaaatattagccaaagaggcattcagcaattaaagacatttaaaatagttttctaaatgtttctttttcttttttgagtgtgcaatatgtaacatgtctaaagttagggcatttttcttggatctttttgcagactagctaattagctctcgcctcaggctttttccatatagtttgttttctttttctgtcttgtaggtaagttggctcacatcatgtaatagtggctttcatttcttattaaccaaattaacctttcaggaaagtatctctactttcctgatgttgataatagtaatggttctagaaggatgaacagttctcccttcaactgtataccgtgtgctccagtgttttcttgtgttgttttctctgatcacaacttttctgctacctggttttcattattttcccacaattcttttgaaagatggtaatcttttctgaggtttagcgttttaagccctacgatgggatcattatttcatgactggtgcgttcctaaactctgaaatcagccttgcacaagtacttgagaataaatgagcattttttaaaatgtg

SEQ ID NO: 283924 - DNA, 1221 bp, Homo sapiens
  misc_feature (1166)..(1166): n is a, c, g, or t
ggggcggagctggagggggtggttcggcgtgggggccgttggctccagacaaataaacatggagtccatcttccacgagaaacaagaaggctcactttgtgctcaacattgcctgaataacttattgcaaggagaatattttagccctgtggaattatcctcaattgcacatcagctggatgaggaggagaggatgagaatggcagaaggaggagttactagtgaagattatcgcacgtttttacagcagccttctggaaatatggatgacagtggttttttctctattcaggttataagcaatgccttgaaagtttggggtttagaactaatcctgttcaacagtccagagtatcagaggctcaggatcgatcctataaatgaaagatcatttatatgcaattataaggaacactggtttacagttagaaaattaggaaaacagtggtttaacttgaattctctcttgacgggtccagaattaatatcagatacatatcttgcacttttcttggctcaattacaacaggaaggttattctatatttgtcgttaagggtgatctgccagattgcgaagctgaccaactcctgcagatgattagggtccaacagatgcatcgaccaaaacttattggagaagaattagcacaactaaaagagcaaagagtccataaaacagacctggaacgagtgttagaagcaaatgatggctcaggaatgttagacgaagatgaggaggatttgcagagggctctggcactaagtcgccaagaaattgacatggaagatgaggaagcagatctccgcagggctattcagctaagtatgcaaggtagttccagaaacatatctcaagatatgacacagacatcaggtacaaatcttacttcagaagagcttcggaagagacgagaagcctactttgaaaaagcagcagcaaaagcagcagcagcagcagcagcagcagcagcagggggacctatcaggacagagttcacatccatgtgaaaggccagccaccagttcaggagcacttgggagtgatctaggtaaggcctgctcaccattcatcatgttcgctaccttcacactttatctgacatacgagctccatgtgatttttgctttacattattcttcattccctctttaatcatattaagantcttaagtaaatttgtaatctactaaatttccctggattaaggagcagttaccaa

SEQ ID NO: 283925 - DNA, 1916 bp, Homo sapiens
ggggcggagctggagggggtggttcggcgtgggggccgttggctccagacaaataaacatggagtccatcttccacgagaaacaagaaggctcactttgtgctcaacattgcctgaataacttattgcaaggagaatattttagccctgtggaattatcctcaattgcacatcagctggatgaggaggagaggatgagaatggcagaaggaggagttactagtgaagattatcgcacgtttttacagcagccttctggaaatatggatgacagtggttttttctctattcaggttataagcaatgccttgaaagtttggggtttagaactaatcctgttcaacagtccagagtatcagaggctcaggatcgatcctataaatgaaagatcatttatatgcaattataaggaacactggtttacagttagaaaattaggaaaacagtggtttaacttgaattctctcttgacgggtccagaattaatatcagatacatatcttgcacttttcttggctcaattacaacaggaaggttattctatatttgtcgttaagggtgatctgccagattgcgaagctgaccaactcctgcagatgattagggtccaacagatgcatcgaccaaaacttattggagaagaattagcacaactaaaagagcaaagagtccataaaacagacctggaacgagtgttagaagcaaatgatggctcaggaatgttagacgaagatgaggaggatttgcagagggctctggcactaagtcgccaagaaattgacatggaagatgaggaagcagatctccgcagggctattcagctaagtatgcaaggtagttccagaaacatatctcaagatatgacacagacatcaggtacaaatcttacttcagaagagcttcggaagagacgagaagcctactttgaaaaacagcagcaaaagcagcaacagcagcagcagcagcagcaaaagcagcagcagcagcagcagcagcagcagcagggggacctatcaggacagagttcacatccatgtgaaaggccagccaccagttcaggagcacttgggagtgatctaggtgatgctatgagtgaagaagacatgcttcaggcagctgtgaccatgtctttagaaactgtcagaaatgatttgaaaacagaaggaaaaaaataatacctttaaaaaataatttagatattcatactttccaacattatcctgtgtgattacagcatagggtccactttggtaatgtgtcaaagagatgaggaaataagacttttagcggtttgcaaacaaaatgatgggaaagtggaacaatgcgtcggttgtaggactaaataatgatcttccaaatattagccaaagaggcattcagcaattaaagacatttaaaatagttttctaaatgtttctttttcttttttgagtgtgcaatatgtaacatgtctaaagttagggcatttttcttggatctttttgcagactagctaattagctctcgcctcaggctttttccatatagtttgttttctttttctgtcttgtaggtaagttggctcacatcatgtaatagtggctttcatttcttattaaccaaattaacctttcaggaaagtatctctactttcctgatgttgataatagtaatggttctagaaggatgaacagttctcccttcaactgtataccgtgtgctccagtgttttcttgtgttgttttctctgatcacaacttttctgctacctggttttcattattttcccacaattcttttgaaagatggtaatcttttctgaggtttagcgttttaagccctacgatgggatcattatttcatgactggtgcgttcctaaactctgaaatcagccttgcacaagtacttgagaataaatgagcattttttaaaatgtg

SEQ ID NO: 283926 - DNA, 1815 bp, Homo sapiens
gtccatctttcacgagaaacacgaggcaagaaggctcactttgtgctcaacattgcctgaataacttattgcaaggagaatattttagccctgtggaattatcctcaattgcacatcagctggatgaggaggagaggatgagaatggcagaaggaggagttactagtgaagattatcgcacgtttttacaggttataagcaatgccttgaaagtttggggtttagaactaatcctgttcaacagtccagagtatcagaggctcaggatcgatcctataaatgaaagatcatttatatgcaattataaggaacactggtttacagttagaaaattaggaaaacagtggtttaacttgaattctctcttgacgggtccagaattaatatcagatacatatcttgcacttttcttggctcaattacaacaggaaggttattctatatttgtcgttaagggtgatctgccagattgcgaagctgaccaactcctgcagatgattagggtccaacagatgcatcgaccaaaacttattggagaagaattagcacaactaaaagagcaaagagtccataaaacagacctggaacgagtgttagaagcaaatgatggctcaggaatgttagacgaagatgaggaggatttgcagagggctctggcactaagtcgccaagaaattgacatggaagatgaggaagcagatctccgcagggctattcagctaagtatgcaaggtagttccagaaacatatctcaagatatgacacagacatcaggtacaaatcttacttcagaagagcttcggaagagacgagaagcctactttgaaaaacagcagcaaaagcagcaacagcagcagcagcagcagcaaaagcagcagcagcagcagcagcagcagcagcagggggacctatcaggacagagttcacatccatgtgaaaggccagccaccagttcaggagcacttgggagtgatctaggtgatgctatgagtgaagaagacatgcttcaggcagctgtgaccatgtctttagaaactgtcagaaatgatttgaaaacagaaggaaaaaaataatacctttaaaaaataatttagatattcatactttccaacattatcctgtgtgattacagcatagggtccactttggtaatgtgtcaaagagatgaggaaataagacttttagcggtttgcaaacaaaatgatgggaaagtggaacaatgcgtcggttgtaggactaaataatgatcttccaaatattagccaaagaggcattcagcaattaaagacatttaaaatagttttctaaatgtttctttttcttttttgagtgtgcaatatgtaacatgtctaaagttagggcatttttcttggatctttttgcagactagctaattagctctcgcctcaggctttttccatatagtttgttttctttttctgtcttgtaggtaagttggctcacatcatgtaatagtggctttcatttcttattaaccaaattaacctttcaggaaagtatctctactttcctgatgttgataatagtaatggttctagaaggatgaacagttctcccttcaactgtataccgtgtgctccagtgttttcttgtgttgttttctctgatcacaacttttctgctacctggttttcattattttcccacaattcttttgaaagatggtaatcttttctgaggtttagcgttttaagccctacgatgggatcattatttcatgactggtgcgttcctaaactctgaaatcagccttgcacaagtacttgagaataaatgagcattttttaaaatgtg

SEQ ID NO: 283927 - DNA, 913 bp, Homo sapiens
ggggcggagctggagggggtggttcggcgtgggggccgttggctccagacaaataaacatggagtccatcttccacgagaaacaagaaggctcactttgtgctcaacattgcctgaataacttattgcaaggagaatattttagccctgtggaattatcctcaattgcacatcagctggatgaggaggagaggatgagaatggcagaaggaggagttactagtgaagattatcgcacgtttttacagcagccttctggaaatatggatgacagtggttttttctctattcaggttataagcaatgccttgaaagtttggggtttagaactaatcctgttcaacagtccagagtatcagaggctcaggatcgatcctataaatgaaagatcatttatatgcaattataaggaacactggtttacagttagaaaattaggaaaacagtggtttaacttgaattctctcttgacgggtccagaattaatatcagataagtgcactgtggcagtgccgcttgctcaggacccagccctgcagcccttctgtgtgtgctccctcgttaagttcatttgctgttattacacacacaggccttcctgtctggtcgttagaaaagccgggcttccaaagcactgttgaacacaggattctgttgttagtgtggatgttcaatgagttgtattttaaatatcaaagattattaaataaagataatgtttgcttttctatttccttttgaatttgtgtttattgttaattcatagctattcaaagtgtgattagagctgggcttggtggcttgcatctacagttccagctacccaggaggcaggggcaggaggattgcttgagcctaggagttcgaggctgcagtgagctatgatcctgccactgaattctagcctgggcgac

SEQ ID NO: 283928 - DNA, 548 bp, Homo sapiens
cgtggcttccgcttctatgtccgtcacactgaaaaggtccaggatgggaccctgtgtcagcctggagcccctgacatctgtgtggctggacgctgtctgagccccggctgtgatgggatccttggctctggcaggcgtcctgatggctgtggagtctgtgggggtgatgattctacctgtcgccttgtttcggggaacctcactgaccgagggggccccctgggctatcagaagatcttgtggattccagcgggagccttgcggctccagattgcccagctccggcctagctccaactacctggcacttcgtggccctgggggccggtccatcatcaatgggaactgggctgtggatccccctgggtcctacagggccggcgggaccgtctttcgatataaccgtcctcccagggaggagggcaaaggggagagtctgtcggctgaaggccccaacacccagcctgtggatgtctatatgatctttcaggaggaaaacccaggcgtttttatcagtatgtcatctcttcacctcctccaatccttgag

SEQ ID NO: 283929 - DNA, 771 bp, Homo sapiens
cttcctatagtcccaggctgctccagagccaagctaccctccggcatcgggtccctggtttccagaggagcccagaccctgtatgtcccacagaatctggacagagccaaaggggctccgccaggccaggaggaaaagttaaccccagcaggcggctgaagcccacgggaggaagaccccctggcccactcgggaggctgaggcaggaggatcgcgtgagcccaggagattgaggctgcagtgagctgtgactgcaccgctgcactccagcctgagcaatagagcaagactctgtctcaaaaataaattcacggaccaaaaggaggtctagaagccctggtctgagccccctccaatggagggtgaaattcccacgtgagccccagggcgggagaaggaggcgctccggagacgctgactctgcggccaggacgagtaggcgggactacagacccgcgccaccacaaccagctaatattttaattttttgtagagatggggcctccctatgttgcccatgctggtctcaaactcctgggatcaagaaatcctcctgccttggcttcccaaggtgctgggattacagatgtgagcctggtctgtgaatttgaatggggaaaaatccgacctttattctcaaatggcctctgatgtgactgcattcctctaattcattcaattgcggatataaggaagaagccacattcatagttgcagggcctgtgactttgtcaccaacagaattcacaggtacggtaatatttgggtaga

SEQ ID NO: 283930 - DNA, 452 bp, Homo sapiens
catggatcccccaatagcaactgcagattaagccaacaggcaggctgctgatagaacctgctccccttcttaccttggaatgcccacacagggctgtgagggaccaaccaaatatgaagctgttgatttctccaaaataaccatcaaaagtctgatgagataaagagcacactggaaactgggaatgctttgatggaaattctgcaagtaatggacgctctggcttgccttggtgactgtcaaataaaagcaagtatatactcagttctctccacacttcccacatacttaccaagcaaaaagcccatgaaaaatctgcagcagcctctgatagcaggaagacattatgtggtactcctgaactttcactcctggtccatcaactacaccgtgattctcagcagctaaacactaaaaataaaaatgattttaggacagttgcttcagtaatt

SEQ ID NO: 283931 - DNA, 438 bp, Homo sapiens
tttcaggttgagaaaatccactcctaaggaagtcaagacggagtttcaccgtgttagccaggacggtctcgatctcctgacctcatgatctgcccgcctcggcctcccaaagtgctgggattacaggcgtgagccactgcgcctggtcggtggacgtatgctttcatttcccttgattaaatacctaaggatggaatggctgagtcacatgtgccttggtgactgtcaaataaaagcaagtatatactcagttctctccacacttcccacatacttaccaagcaaaaagcccatgaaaaatctgcagcagcctctgatagcaggaagacattatgtggtactcctgaactttcactcctggtccatcaactacaccgtgattctcagcagctaaacactaaaaataaaaatgattttaggacagttgcttcagtaatt

SEQ ID NO: 283932 - DNA, 577 bp, Homo sapiens
ccggatggtgggactgggcccaggttcccaccgcatcgtccgcctcagccagaaccttctggtccccgcccccggatagggacccaggaggcccaagccccttcttccggcggggagtgggagcctctcgcactctcggcagctccagaccctcgggatctccgtttacagttcaggacctcagctgcactttggcgctaacgccctgtttcccagggctgtgagggaccaaccaaatatgaagctgttgatttctccaaaataaccatcaaaagtctgatgagataaagagcacactggaaactgggaatgctttgatggaaattctgcaagtaatggacgctctggcttgccttggtgactgtcaaataaaagcaagtatatactcagttctctccacacttcccacatacttaccaagcaaaaagcccatgaaaaatctgcagcagcctctgatagcaggaagacattatgtggtactcctgaactttcactcctggtccatcaactacaccgtgattctcagcagctaaacactaaaaataaaaatgattttaggacagttgcttcagtaatt

SEQ ID NO: 283933 - DNA, 614 bp, Homo sapiens
ccggatggtgggactgggcccaggttcccaccgcatcgtccgcctcagccagaaccttctggtccccgcccccggatagggacccaggaggcccaagccccttcttccggcggggagtgggagcctctcgcactctcggcagctccagaccctcgggatctccgtttacagttcaggacctcagctgcactttggcgctaacgccctgtttcccaggactgtcaatggcaggataccagctctggtcaccatggaccccactggatgagagtttccaatggctgcggcacacgacacctacaccttcctccaagcacccattcaaggcctccccctgcttcccacacacaccgtccgaccttgaagtgcagctgtgctttcaagaggtcactctagtcctagacagcccattcctggaatctggaagatggagtttcaccacattgcccaagctggtcttgaactcctggactcaagcaatgccttggcctcggcctcccaaagtgttgggattacagcggtgacccacaatatctggcctttgtagcgttcttgtaactaggttaggtataactcagaaaatggaaataaacattacatatacaaagttaaca

SEQ ID NO: 283934 - DNA, 1065 bp, Homo sapiens
ccggatggtgggactgggcccaggttcccaccgcatcgtccgcctcagccagaaccttctggtccccgcccccggatagggacccaggaggcccaagccccttcttccggcggggagtgggagcctctcgcactctcggcagctccagaccctcgggatctccgtttacagttcaggacctcagctgcactttggcgctaacgccctgtttcccaggactgtcaatggcaggataccagctctggtcaccatggaccccactggatgagagtttccaatggctgcggcacacgacacctacaccttcctccaagcacccattcaaggcctccccctgcttcccacacacaccgtccgaccttgaagtgcagctgtgctttcaagaggtcactctagtcctagacagcccattcctggaatctggagtgagtcccaagttaccctgccacacatcagagttgcgcacgatgaacaacaaaggactggtcaggaagccccagcccatccgcctcagtggagtagattctgtctttggcagggttatcacagctcagccaccaaagtggaccgggactttcagagtttcagacaagtcagccttttgcaaaatcattagcagggagcaccagtggcccattggactgaaggagcctcagattcagatgacagtcactatgtgcaaacagatgctgcgctctatcctcttgctgtatgcaacttacaaaaagtgcacctttgccttgcagcactccaagtaaagggtcctcatttgatccccatttactcacaccatgccctttggtatgtacctaaagcttacagaaacctgtccatgtaaatgaaactgtgacattgtcccagccatcttgcttttgtttcaagcagtgatgattcaggagcccctttcatcccttcccctccaaaaaaggaccaatgatagagaacaaggaagaacattcccattgtaaggttgaaccatttagagtcaaactagcattgacatgtccatgtgataaccgttaaacaaatgatataaaccaatgagcctagtgtgaactcacataa

SEQ ID NO: 283935 - DNA, 788 bp, Homo sapiens
cccccagcgcccggcacagcccggaccccggtgtaaagtcgggcatctgcgcagtaaacatctggcctcggagctgtcctccgcgccttggctgccccagccaggggaaggatatgcggagggctctaagtcaaagcgggcgtttttgcgggtgtagacactgcggcgcctgggtctgcaggaggggcagattttcaggtggccgggacaggtgaaggcagagaggagtggctgtccacctggggaagcatcctgaaaacatcacacacagtggaccacgctttgccctcagagtgactgctccgacccggaaggagaggtcaacgacccctcaggacacaaagggtttcttaggttgttctgcgcagtcacatggcttccagaaccagaacgttcagctcttaaagtctgcacagaagaactgatagaatctgctcctttcaatggaatctgtgactgtttgggaaggatgtgcatggagaagggtctgatgaggctcctgatccaggcggtccacgtgcgttcagtgtgtttggaccctaggcacctctgtctattgctcggtcttgcgtacatagtccatagcttggcatcagcacagatcgatgcttagtgagcacaattaagaaaccaaactatggaaaattaaggacagtaacaaaagtatcatcaacaaaaatcaagcattttcctctttttgaaacaagaaaagcgcatcgtagaaaccaagattctgtacaatattctaacattatatgtacataaaattatattactcataaaaatat

SEQ ID NO: 283936 - DNA, 874 bp, Homo sapiens
agtgaacagtaagagctggctagtaatggccttaaaaagaaaaagggtaactctctgaaacaaagatcactttagtgtggcattgtggatgctgttaattctgcatagggaaactttggaacagcatgctaattacatggctgtaagcaaagccctgtcctctgtctctgcaccataccttcattggacttcaccaacccatccatactccatgtaaacctcagttctctcatgcctgccctaagtcagttgacatcagtgcagtggcattgaggagaaatgagaggtgtctctgattttactgaaagttattatcattttcacaggtgcctgagatttggtatctactttgtgttcttgattcttaggtgaaaaatctgaaatagttccctgtgcattaaaataaattattttgagaggactcctgctccgtcgattcagcagacctatgctgcagaaggtaactgcggaagctctcttttgctgtcagggctctgagcttgaagggagaaggtgcagtggtgcctagaagtgatatgcaaaccacctcacatgccagcctctggcctccttcccatcccagagtcacagacaggggacccagtgacaatgatgataaatccatgtgtggaggtgttttacttatttttctttccgtaggatttcatggtgctttaaaaaaaaaggcattttacagaaaataatgtggggggagggagatttcataatgttcttagggaaagtacaaaacaaatttgcttgtgacatttcaataagctgtgctgctattgtctttatttgatgatgtaatttttttttcaatgatggagaaaaattgcaacaaagaccttctggaagatccaatccaatgtct

SEQ ID NO: 283937 - DNA, 1404 bp, Homo sapiens
gtattagttgctgtctgaccttcctaggctaacccactgattcacctttctagagccagctttgtgttctttaaataaatgcacacaatggctcatgcctgtgatgccagcactttgggaggccaaggcagtcagatcccttgaggtcaggagttctagaccagcctggccaacatggtgaaaccctgtcgctaataaaaataaaaaatcagccaggcgtggtactgcacacctgactagggaggctgaggcaggagaatagcttaaacttgggaggtggaggttgcagtgagctgagatggtgccactgcactccagcctggacaacagagtgagactccatctcaaaaaataataaagtaataactaactaaataaataaatgcacatctgtgtgtctggtctgtatttgtattttcaggatctaatgaacagggagaagaaaaacaaaatcccaagtatgcaagttgggttcatagatgccatctgcttgcaactgtatgaggtatttatatgaaaactactagacttgctaaacttggactgttgtgaattagaacctaaaattgaagagattaatattaggcgcctatattttgcttctaaatcaagaaataaaattattagcagtatggtttcttttactgatgaacatgtttgtattgaacaaggaacacatactaatatctattgagtgcctactatgtgctaatctccaacaaattgatttggggatgctaagaagaattatgtgccagtgttaccctcaaggagcaatactgtatatactatgcgttagcatattctttttttaagtctaaattttagcctaaataaagaaaagtaatccaactttttctcattgtcataatgtggctttactctagttataaaaattcttctgagattaaaaggaaggaggtagaatattgcaggttcccatttccacgtatctgctggcttggcttttggagggggggtggttattgtaggcaaatagattctccctaaaacatctaacttattagtttagatgtttatgactcaaatgcagaaagaagaagttgtctttgtctttgaaggtttaaacggaaatgttttaagttttaattatttggaaaaagaacatttgtcatggagttatcatagaatgtcaagagcagaaaaaaaacctagaaatattctaatccagatatttcagatttagtaattgaacttgtaaagttcatctcccaacgagacagactatttgccccaaacaggtggttagtgggagaggtgcatctacagtccagttctcactcctactccaggattctcgccatcaaaagaatttaatataaagaactgtggctgacagggaaaggaaggagagataccaaaagaaccatggagaaaaaaaaa

SEQ ID NO: 283938 - DNA, 555 bp, Homo sapiens
gacatggactacttgtcttcgggtatcaagctgctgcttatttgctataaaatggagatatacagctcctaacagggccttcattcacggtctctgttttaaagaatgatatgcttttcattgtcaaaactgagtctgttatttatttcagatagcagaacttgtagcaactgaattttttgatcaaggagacagagagagaaaagaactcaacatagaacccactgtaagtatgaaaccttgttggtaggaattattcaaattgttttttttttaattgtagactcctttttatggctctatgggatctttccttaggaccacaatttctcattttattttttaaaacttttttctcattggaagaattatacatgttcattacagaaagcaaaaccaataaaaggcataataaagactcttgggttcatcatattgtatcagtgttctttgtaatttgtttttttccgcttaagtattagaaaccacttttcattttaacaaatattcttatgtattatcatgattacatgaaatcgatgtaaccataattta

SEQ ID NO: 283939 - DNA, 393 bp, Homo sapiens
agtgggcacatggtagaagtttgttattatatactcagagacagaagtgataaggactttaacaacactttgtttacacagaggtaggctgggtcatcaaagtgacctctgtgaggtcactcctcacagagaccactaggctcagaaatattgactacgtgtttaacttttatttctaagtagtcatttttatttgcataattatttgcagaatcaaaagttttctgcaaatttgattctgttggatacagaggtgtagatttgaaatttgagactgcttatgtcagttgcctcctttctgcattctattttgtatgtaaccgtgtgtgtgtgtgtgtgtgtgtgtgtgtgtgtgtgtgtatgtttaacttctggtttctcagtaaggaaagg

SEQ ID NO: 283940 - DNA, 373 bp, Homo sapiens
atcaacgaaaagcaggaagagttttaactcctggaatcatctgagaaactatttcaaactataaatttatataccctacttctgaaagttctgattcagcaagtcttgggtagaagctgggaatctgtatgactaccaagctcccccaggtgactctgaatgtgcaggtagcgagtgaagaaaccactggctcccagggactgaccgaggaacactctttctcacaaaggaccagccgactccaacagggttctgtcgtatcatgcttcagcagcagaggaagaaacaagagagctacagtcgttagcgggatgcaaagtcactgataatacaaagcaaaaggcattaaataacttatactgactgtgtaata

SEQ ID NO: 283941 - DNA, 5150 bp, Homo sapiens
gccgccgccgccgccgccgcctcctgggaaccaggggactgaagagcctgcgagagcggaacactgccggaccccgggtgggggggcgcagcagctgcgcctggccccgcccaccacacctgggcgcccgtagaaccgcgcggggcggggcggggcaggaggctggcctggcgctccggccgctttgtcgaaagccggcccgactggagcaggacgaagggggagggtctcgaggccgagtcctgttcttctgagggacggaccccagctggggtggaaaagcagtaccagagagcctccgaggcgcgcggtgccaaccatggagcgggccggccccagcttcgggcagcagcgacagcagcagcagccccagcagcagaagcagcagcagagggatcaggactcggtcgaagcatggctggacgatcactgggactttaccttctcatactttgttagaaaagccaccagagaaatggtcaatgcatggtttgctgagagagttcacaccatccctgtgtgcaaggaaggtatcagaggccacaccgaatcttgctcttgtcccttgcagcagagtcctcgtgcagataacagtgtccctggaacaccaaccaggaaaatctctgcctctgaatttgaccggcctcttagacccattgttgtcaaggattctgagggaactgtgagcttcctctctgactcagaaaagaaggaacagatgcctctaacccctccaaggtttgatcatgatgaaggggaccagtgctcaagactcttggaattagtgaaggatatttctagtcatttggatgtcacagccttatgtcacaaaattttcttgcatatccatggactgatatctgctgaccgctattccctgttccttgtctgtgaagacagctccaatgacaagtttcttatcagccgcctctttgatgttgctgaaggttcaacactggaagaagtttcaaataactgtatccgcttagaatggaacaaaggcattgtgggacatgtggcagcgcttggtgagcccttgaacatcaaagatgcatatgaggatcctcggttcaatgcagaagttgaccaaattacaggctacaagacacaaagcattctttgtatgccaattaagaatcatagggaagaggttgttggtgtagcccaggccatcaacaagaaatcaggaaacggtgggacatttactgaaaaagatgaaaaggactttgctgcttatttggcattttgtggtattgttcttcataatgctcagctctatgagacttcactgctggagaacaagagaaatcaggtgctgcttgaccttgctagtttaatttttgaagaacaacaatcattagaagtaattttgaagaaaatagctgccactattatctctttcatgcaagtgcagaaatgcaccattttcatagtggatgaagattgctccgattctttttctagtgtgtttcacatggagtgtgaggaattagaaaaatcatctgatacattaacaagggaacatgatgcaaacaaaatcaattacatgtatgctcagtatgtcaaaaatactatggaaccacttaatatcccagatgtcagtaaggataaaagatttccctggacaactgaaaatacaggaaatgtaaaccagcagtgcattagaagtttgctttgtacacctataaaaaatggaaagaagaataaagttataggggtttgccaacttgttaataagatggaggagaatactggcaaggttaagcctttcaaccgaaatgacgaacagtttctggaagcttttgtcatcttttgtggcttggggatccagaacacgcagatgtatgaagcagtggagagagccatggccaagcaaatggtcacattggaggttctgtcgtatcatgcttcagcagcagaggaagaaacaagagagctacagtcgttagcggctgctgtggtgccatctgcccagacccttaaaattactgactttagcttcagtgactttgagctgtctgatctggaaacagcactgtgtacaattcggatgtttactgacctcaaccttgtgcagaacttccagatgaaacatgaggttctttgcagatggattttaagtgttaagaagaattatcggaagaatgttgcctatcataattggagacatgcctttaatacagctcagtgcatgtttgctgctctaaaagcaggcaaaattcagaacaagctgactgacctggagatacttgcattgctgattgctgcactaagccacgatttggatcaccgtggtgtgaataactcttacatacagcgaagtgaacatccacttgcccagctttactgccattcaatcatggaacaccatcattttgaccagtgcctgatgattcttaatagtccaggcaatcagattctcagtggcctctccattgaagaatataagaccacgttgaaaataatcaagcaagctattttagctacagacctagcactgtacattaagaggcgaggagaattttttgaacttataagaaaaaatcaattcaatttggaagatcctcatcaaaaggagttgtttttggcaatgctgatgacagcttgtgatctttctgcaattacaaaaccctggcctattcaacaacggatagcagaacttgtagcaactgaattttttgatcaaggagacagagagagaaaagaactcaacatagaacccactgatctaatgaacagggagaagaaaaacaaaatcccaagtatgcaagttgggttcatagatgccatctgcttgcaactgtatgaggccctgacccacgtgtcagaggactgtttccctttgctagatggctgcagaaagaacaggcagaaatggcaggcccttgcagaacagcaggagaagatgctgattaatggggaaagcggccaggccaagcggaactgagtggcctatttcatgcagagttgaagtttacagagatggtgtgttctgcaatatgcctagtttcttacacactgtctgtatagtgtctgtatttggtatatactttgccactgctgtatttttatttttgcacaacttttgagagtatagcatgaatgtttttagaggactattacatattttttgtatatttgttttatgctactgaactgaaaggatcaacaacatccactgttagcacattgataaaagcattgtttgtgatatttcgtgtactgcaaagtgtatgcagtattcttgcactgaggtttttttgcttggggattattttaaataattggtttttgtgttttctgaattaccattttttcaagaatgtttggaatctttcctttttcaaaagtaggttaggagcaaattatcatacattctgtgacatttaaagcctttataggatagtgaaaaatgctggctgagtggattttaagagaaataattgtatttgttaacagtgtctttttttaaaaagttaaggcactctgaaacaaatggaaagtcctatgaaactgtattgtaaagaaaacattatttaattgatatgctgttttgtgagagaacaggcaagacagaactttgtcacttcagtgcagtacatttttctgaaagctacccataaaatcactttcatctcacctacctgatgcaaagcaggtgaaaccttaggagatgatccagtcactgacttgattgagggataagtgtgatttagaaatggaatggccttggatgtctatcagtgaagaaaaatgttctgttagaagatctctctaagagtttttttccttctgagcttccttttcaaaataaaagtgacaattgtagcattgacttgaagtgagacatggttatagataagagagtacaaaatgactctttttcctgtcaattgaaatttaaagaaaagttttaattatataaatagcaaagggctattgccaatactagggtcaaaaatgaatttgagggaacagtgggtaagaaactttatgcctgaataacatttagcagtattgtgattgaaaaattgccatattttgatgtataggacaagtcaactgagatccagagaatcctggatgtgaatgctaaacactggcccttaactcacattcaatgtattttcttcccataacatttagtatagttaatattttcttagaatttgagcccatttaagtggattaatattctacatgtgtgcccctaaagacacatttactcaatattggagaagtagataatgaattaagcaactggtctaggaaaggaaaatttgtttcaaatatgcaggaatgtttggatttggggagagtagaaggagagatttgcttgatttgttaacttctacctccaacccacaaaaaagatatttgatctgagtttctatcactaatttggatagaaaatttctaagggacatggtaatccagcattctcaaggacctttcgccaaaatgtgttttccatctatgtcccgattcccctaaattttgcctaaaattcagtatgttccttaagtttttaaaattctgagtgtgtacaaatatcttgacataatgcagttttatttttatcattctggtaaaaaaacaaaaaatagaagcaaaacacattgtattgccattattttgtatttggtaaaggttaatctaggaagttaccaactgtttaatgctatatgtattgtatacttgtattttcaggatattttattttttttgccatacagataaaatttgtaaggttgcccctttgtggcactggtgtgtaaaatacacagactatcactaaaataatagttatatatacatacaggtgtatacttatgcatgcatacataaatccttagtatagaaaaattgcataaagaatagcaatctttaataaacctttttattacattgtgatttagcagttatgctaaaatatgtacttatgctttagtagtttgtttggtcccctctagtatgtgtcactgagaaattttttaaagacatggtagatcgtgtttagaggctttgtatgtgtgtcattttaataagcaagaagatatatttagattagaaatggtttggtctgcctttgaatattgtttattttactttactagttgagacattaaaggaagctgggcaatgcctat

SEQ ID NO: 283942 - DNA, 3721 bp, Homo sapiens
  misc_feature (4)..(7): n is a, c, g, or t
  misc_feature (9)..(9): n is a, c, g, or t
  misc_feature (271)..(271): n is a, c, g, or t
gaannnngngtggagcagagagtgcttggcgggcgggtgccccgaagcctgaggaattgatgcatagtcggggtgcgtggactccaggacgcgcccctttgcagaaagagtccgtgccccgctgccgcctgctctgggcagcgccgtcgggcagcgggtgctgcctcttgccgggaggtgacacacgccggcagtgatggtcgaggagccgcccgggttcgacgcccgggtcccactcgccggcgcgcggccgcggctctgccggtcgctncgccagggggcggcgcagcgcggggcgagcgggaggcgacgggcggcggcgcggaggccggggccgtgagggagctggttctgagtcgccgacctcacctcacctcacctgcgcgcgttgttgcccctacggagcctcctggagtccaggatcggcggagttcgaaaacgaacttcccacgtttgctatgttgccctttggagacaaaacaagagaaatggtcaatgcatggtttgctgagagagttcacaccatccctgtgtgcaaggaaggtatcagaggccacaccgaatcttgctcttgtcccttgcagcagagtcctcgtgcagataacagtgtccctggaacaccaaccaggaaaatctctgcctctgaatttgaccggcctcttagacccattgttgtcaaggattctgagggaactgtgagcttcctctctgactcagaaaagaaggaacagatgcctctaacccctccaaggtttgatcatgatgaaggggaccagtgctcaagactcttggaattagtgaaggatatttctagtcatttggatgtcacagccttatgtcacaaaattttcttgcatatccatggactgatatctgctgaccgctattccctgttccttgtctgtgaagacagctccaatgacaagtttcttatcagccgcctctttgatgttgctgaaggttcaacactggaagaagtttcaaataactgtatccgcttagaatggaacaaaggcattgtgggacatgtggcagcgcttggtgagcccttgaacatcaaagatgcatatgaggatcctcggttcaatgcagaagttgaccaaattacaggctacaagacacaaagcattctttgtatgccaattaagaatcatagggaagaggttgttggtgtagcccaggccatcaacaagaaatcaggaaacggtgggacatttactgaaaaagatgaaaaggactttgctgcttatttggcattttgtggtattgttcttcataatgctcagctctatgagacttcactgctggagaacaagagaaatcaggtgctgcttgaccttgctagtttaatttttgaagaacaacaatcattagaagtaattttgaagaaaatagctgccactattatctctttcatgcaagtgcagaaatgcaccattttcatagtggatgaagattgctccgattctttttctagtgtgtttcacatggagtgtgaggaattagaaaaatcatctgatacattaacaagggaacatgatgcaaacaaaatcaattacatgtatgctcagtatgtcaaaaatactatggaaccacttaatatcccagatgtcagtaaggataaaagatttccctggacaactgaaaatacaggaaatgtaaaccagcagtgcattagaagtttgctttgtacacctataaaaaatggaaagaagaataaagttataggggtttgccaacttgttaataagatggaggagaatactggcaaggttaagcctttcaaccgaaatgacgaacagtttctggaagcttttgtcatcttttgtggcttggggatccagaacacgcagatgtatgaagcagtggagagagccatggccaagcaaatggtcacattggaggttctgtcgtatcatgcttcagcagcagaggaagaaacaagagagctacagtcgttagcggctgctgtggtgccatctgcccagacccttaaaattactgactttagcttcagtgactttgagctgtctgatctggaaacagcactgtgtacaattcggatgtttactgacctcaaccttgtgcagaacttccagatgaaacatgaggttctttgcagatggattttaagtgttaagaagaattatcggaagaatgttgcctatcataattggagacatgcctttaatacagctcagtgcatgtttgctgctctaaaagcaggcaaaattcagaacaagctgactgacctggagatacttgcattgctgattgctgcactaagccacgatttggatcaccgtggtgtgaataactcttacatacagcgaagtgaacatccacttgcccagctttactgccattcaatcatggaacaccatcattttgaccagtgcctgatgattcttaatagtccaggcaatcagattctcagtggcctctccattgaagaatataagaccacgttgaaaataatcaagcaagctattttagctacagacctagcactgtacattaagaggcgaggagaattttttgaacttataagaaaaaatcaattcaatttggaagatcctcatcaaaaggagttgtttttggcaatgctgatgacagcttgtgatctttctgcaattacaaaaccctggcctattcaacaacggatagcagaacttgtagcaactgaattttttgatcaaggagacagagagagaaaagaactcaacatagaacccactgatctaatgaacagggagaagaaaaacaaaatcccaagtatgcaagttgggttcatagatgccatctgcttgcaactgtatgaggtatttatatgaaaactactagacttgctaaacttggactgttgtgaattagaacctaaaattgaagagattaatattaggcgcctatattttgcttctaaatcaagaaataaaattattagcagtatggtttcttttactgatgaacatgtttgtattgaacaaggaacacatactaatatctattgagtgcctactatgtgctaatctccaacaaattgatttggggatgctaagaagaattatgtgccagtgttaccctcaaggagcaatactgtatatactatgcgttagcatattctttttttaagtctaaattttagcctaaataaagaaaagtaatccaactttttctcattgtcataatgtggctttactctagttataaaaattcttctgagattaaaaggaaggaggtagaatattgcaggttcccatttccacgtatctgctggcttggcttttggagggggggtggttattgtaggcaaatagattctccctaaaacatctaacttattagtttagatgtttatgactcaaatgcagaaagaagaagttgtctttgtctttgaaggtttaaacggaaatgttttaagttttaattatttggaaaaagaacatttgtcatggagttatcatagaatgtcaagagcagaaaaaaaacctagaaatattctaatccagatatttcagatttagtaattgaacttgtaaagttcatctcccaacgagacagactatttgccccaaacaggtggttagtgggagaggtgcatctacagtccagttctcactcctactccaggattctcgccatcaaaagaatttaatataaagaactgtggctgacagggaaaggaaggagagataccaaaagaaccatggagaaaaaaaaa

SEQ ID NO: 283943 - DNA, 1839 bp, Homo sapiens
  misc_feature (4)..(7): n is a, c, g, or t
  misc_feature (9)..(9): n is a, c, g, or t
  misc_feature (271)..(271): n is a, c, g, or t
gaannnngngtggagcagagagtgcttggcgggcgggtgccccgaagcctgaggaattgatgcatagtcggggtgcgtggactccaggacgcgcccctttgcagaaagagtccgtgccccgctgccgcctgctctgggcagcgccgtcgggcagcgggtgctgcctcttgccgggaggtgacacacgccggcagtgatggtcgaggagccgcccgggttcgacgcccgggtcccactcgccggcgcgcggccgcggctctgccggtcgctncgccagggggcggcgcagcgcggggcgagcgggaggcgacgggcggcggcgcggaggccggggccgtgagggagctggttctgagtcgccgacctcacctcacctcacctgcgcgcgttgttgcccctacggagcctcctggagtccaggatcggcggagttcgaaaacgaacttcccacgtttgctatgttgccctttggagacaaaacaagagaaatggtcaatgcatggtttgctgagagagttcacaccatccctgtgtgcaaggaaggtatcagaggccacaccgaatcttgctcttgtcccttgcagcagagtcctcgtgcagataacagtgtccctggaacaccaaccaggaaaatctctgcctctgaatttgaccggcctcttagacccattgttgtcaaggattctgagggaactgtgagcttcctctctgactcagaaaagaaggaacagatgcctctaacccctccaaggtttgatcatgatgaaggggaccagtgctcaagactcttggaattagtgaaggatatttctagtcatttggatgtcacagccttatgtcacaaaattttcttgcatatccatggactgatatctgctgaccgctattccctgttccttgtctgtgaagacagctccaatgacaagtttcttatcagccgcctctttgatgttgctgaaggttcaacactggaagaagtttcaaataactgtatccgcttagaatggaacaaaggcattgtgggacatgtggcagcgcttggtgagcccttgaacatcaaagatgcatatgaggatcctcggttcaatgcagaagttgaccaaattacaggctacaagacacaaagcattctttgtatgccaattaagaatcatagggaagaggttgttggtgtagcccaggccatcaacaagaaatcaggaaacggtgggacatttactgaaaaagatgaaaaggactttgctgcttatttggcattttgtggtattgttcttcataatgctcagctctatgagacttcactgctggagaacaagagaaatcaggtgctgcttgaccttgctagtttaatttttgaagaacaacaatcattagaagtaattttgaagaaaatagctgccactattatctctttcatgcaagtgcagaaatgcaccattttcatagtggatgaagattgctccgattctttttctagtgtgtttcacatggagtgtgaggaattagaaaaatcatctgatacattaacaagggaacatgatgcaaacaaaatcaattacatgtatgctcagtatgtcaaaaatactatggaaccacttaatatcccagatgtcagtaaggataaaagatttccctggacaactgaaaatacaggaaatgtaaaccagcagtgcattagaagtttgctttgtacacctataaaaaatggaaagaagaataaagttataggtaaaacctttcctttaacctatactctaaacttatttttaaaaatgtattcccagctatacttctttctttcaaatgtaaagaataaaatgttttaaaaaagataaaatt

SEQ ID NO: 283944 - DNA, 1969 bp, Homo sapiens
  misc_feature (4)..(7): n is a, c, g, or t
  misc_feature (9)..(9): n is a, c, g, or t
  misc_feature (271)..(271): n is a, c, g, or t
gaannnngngtggagcagagagtgcttggcgggcgggtgccccgaagcctgaggaattgatgcatagtcggggtgcgtggactccaggacgcgcccctttgcagaaagagtccgtgccccgctgccgcctgctctgggcagcgccgtcgggcagcgggtgctgcctcttgccgggaggtgacacacgccggcagtgatggtcgaggagccgcccgggttcgacgcccgggtcccactcgccggcgcgcggccgcggctctgccggtcgctncgccagggggcggcgcagcgcggggcgagcgggaggcgacgggcggcggcgcggaggccggggccgtgagggagctggttctgagtcgccgacctcacctcacctcacctgcgcgcgttgttgcccctacggagcctcctggagtccaggatcggcggagttcgaaaacgaacttcccacgtttgctatgttgccctttggagacaaaacaagagaaatggtcaatgcatggtttgctgagagagttcacaccatccctgtgtgcaaggaaggtatcagaggccacaccgaatcttgctcttgtcccttgcagcagagtcctcgtgcagataacagtgtccctggaacaccaaccaggaaaatctctgcctctgaatttgaccggcctcttagacccattgttgtcaaggattctgagggaactgtgagcttcctctctgactcagaaaagaaggaacagatgcctctaacccctccaaggtttgatcatgatgaaggggaccagtgctcaagactcttggaattagtgaaggatatttctagtcatttggatgtcacagccttatgtcacaaaattttcttgcatatccatggactgatatctgctgaccgctattccctgttccttgtctgtgaagacagctccaatgacaagtttcttatcagccgcctctttgatgttgctgaaggttcaacactggaagaagtttcaaataactgtatccgcttagaatggaacaaaggcattgtgggacatgtggcagcgcttggtgagcccttgaacatcaaagatgcatatgaggatcctcggttcaatgcagaagttgaccaaattacaggctacaagacacaaagcattctttgtatgccaattaagaatcatagggaagaggttgttggtgtagcccaggccatcaacaagaaatcaggaaacggtgggacatttactgaaaaagatgaaaaggactttgctgcttatttggcattttgtggtattgttcttcataatgctcagctctatgagacttcactgctggagaacaagagaaatcaggtgctgcttgaccttgctagtttaatttttgaagaacaacaatcattagaagtaattttgaagaaaatagctgccactattatctctttcatgcaagtgcagaaatgcaccattttcatagtggatgaagattgctccgattctttttctagtgtgtttcacatggagtgtgaggaattagaaaaatcatctgatacattaacaagggaacatgatgcaaacaaaatcaattacatgtatgctcagtatgtcaaaaatactatggaaccacttaatatcccagatgtcagtaaggataaaagatttccctggacaactgaaaatacaggaaatgtaaaccagcagtgcattagaagtttgctttgtacacctataaaaaatggaaagaagaataaagttataggggtttgccaacttgttaataagatggaggagaatactggcaaggttaagcctttcaaccgaaatgacgaacagtttctggaagcttttgtcatcttttgtggcttggggatccagaacacgcagatgtatgaagcagtggagagagccatggccaagcaaatggtcacattggaggtgggtgaagtttagggacctctcacactgtacagccaaaccctcatcttttacctttccctcat

SEQ ID NO: 283945 - DNA, 4415 bp, Homo sapiens
gccgccgccgccgccgccgcctcctgggaaccaggggactgaagagcctgcgagagcggaacactgccggaccccgggtgggggggcgcagcagctgcgcctggccccgcccaccacacctgggcgcccgtagaaccgcgcggggcggggcggggcaggaggctggcctggcgctccggccgctttgtcgaaagccggcccgactggagcaggacgaagggggagggtctcgaggccgagtcctgttcttctgagggacggaccccagctggggtggaaaagcagtaccagagagcctccgaggcgcgcggtgccaaccatggagcgggccggccccagcttcgggcagcagcgacagcagcagcagccccagcagcagaagcagcagcagagggatcaggactcggtcgaagcatggctggacgatcactgggactttaccttctcatactttgttagaaaagccaccagagaaatggtcaatgcatggtttgctgagagagttcacaccatccctgtgtgcaaggaaggtatcagaggccacaccgaatcttgctcttgtcccttgcagcagagtcctcgtgcagataacagtgtccctggaacaccaaccaggaaaatctctgcctctgaatttgaccggcctcttagacccattgttgtcaaggattctgagggaactgtgagcttcctctctgactcagaaaagaaggaacagatgcctctaacccctccaaggtttgatcatgatgaaggggaccagtgctcaagactcttggaattagtgaaggatatttctagtcatttggatgtcacagccttatgtcacaaaattttcttgcatatccatggactgatatctgctgaccgctattccctgttccttgtctgtgaagacagctccaatgacaagtttcttatcagccgcctctttgatgttgctgaaggttcaacactggaagaagtttcaaataactgtatccgcttagaatggaacaaaggcattgtgggacatgtggcagcgcttggtgagcccttgaacatcaaagatgcatatgaggatcctcggttcaatgcagaagttgaccaaattacaggctacaagacacaaagcattctttgtatgccaattaagaatcatagggaagaggttgttggtgtagcccaggccatcaacaagaaatcaggaaacggtgggacatttactgaaaaagatgaaaaggactttgctgcttatttggcattttgtggtattgttcttcataatgctcagctctatgagacttcactgctggagaacaagagaaatcaggtgctgcttgaccttgctagtttaatttttgaagaacaacaatcattagaagtaattttgaagaaaatagctgccactattatctctttcatgcaagtgcagaaatgcaccattttcatagtggatgaagattgctccgattctttttctagtgtgtttcacatggagtgtgaggaattagaaaaatcatctgatacattaacaagggaacatgatgcaaacaaaatcaattacatgtatgctcagtatgtcaaaaatactatggaaccacttaatatcccagatgtcagtaaggataaaagatttccctggacaactgaaaatacaggaaatgtaaaccagcagtgcattagaagtttgctttgtacacctataaaaaatggaaagaagaataaagttataggggtttgccaacttgttaataagatggaggagaatactggcaaggttaagcctttcaaccgaaatgacgaacagtttctggaagcttttgtcatcttttgtggcttggggatccagaacacgcagatgtatgaagcagtggagagagccatggccaagcaaatggtcacattggaggttctgtcgtatcatgcttcagcagcagaggaagaaacaagagagctacagtcgttagcggctgctgtggtgccatctgcccagacccttaaaattactgactttagcttcagtgactttgagctgtctgatctggaaacagcactgtgtacaattcggatgtttactgacctcaaccttgtgcagaacttccagatgaaacatgaggttctttgcagatggattttaagtgttaagaagaattatcggaagaatgttgcctatcataattggagacatgcctttaatacagctcagtgcatgtttgctgctctaaaagcaggcaaaattcagaacaagctgactgacctggagatacttgcattgctgattgctgcactaagccacgatttggatcaccgtggtgtgaataactcttacatacagcgaagtgaacatccacttgcccagctttactgccattcaatcatggaacaccatcattttgaccagtgcctgatgattcttaatagtccaggcaatcagattctcagtggcctctccattgaagaatataagaccacgttgaaaataatcaagcaagctattttagctacagacctagcactgtacattaagaggcgaggagaattttttgaacttataagaaaaaatcaattcaatttggaagatcctcatcaaaaggagttgtttttggcaatgctgatgacagcttgtgatctttctgcaattacaaaaccctggcctattcaacaacggatagcagaacttgtagcaactgaattttttgatcaaggagacagagagagaaaagaactcaacatagaacccactgatctaatgaacagggagaagaaaaacaaaatcccaagtatgcaagttgggttcatagatgccatctgcttgcaactgtatgaggccctgacccacgtgtcagaggactgtttccctttgctagatggctgcagaaagaacaggcagaaatggcaggcccttgcagaacagcaggagaagatgctgattaatggggaaagcggccaggccaagcggaactgagtggcctatttcatgcagagttgaagtttacagagatggtgtgttctgcaatatgcctagtttcttacacactgtctgtatagtgtctgtatttggtatatactttgccactgctgtatttttatttttgcacaacttttgagagtatagcatgaatgtttttagaggactattacatattttttgtatatttgttttatgctactgaactgaaaggatcaacaacatccactgttagcacattgataaaagcattgtttgtgatatttcgtgtactgcaaagtgtatgcagtattcttgcactgaggtttttttgcttggggattattttaaataattggtttttgtgttttctgaattaccattttttcaagaatgtttggaatctttcctttttcaaaagtaggttaggagcaaattatcatacattctgtgacatttaaagcctttataggatagtgaaaaatgctggctgagtggattttaagagaaataattgtatttgttaacagtgtctttttttaaaaagttaaggcactctgaaacaaatggaaagtcctatgaaactgtattgtaaagaaaacattatttaattgatatgctgttttgtgagagaacaggcaagacagaactttgtcacttcagtgcagtacatttttctgaaagctacccataaaatcactttcatctcacctacctgatgcaaagcaggtgaaaccttaggagatgatccagtcactgacttgattgagggataagtgtgatttagaaatggaatggccttggatgtctatcagtgaagaaaaatgttctgttagaagatctctctaagagtttttttccttctgagcttccttttcaaaataaaagtgacaattgtagcattgacttgaagtgagacatggttatagataagagagtacaaaatgactctttttcctgtcaattgaaatttaaagaaaagttttaattatataaatagcaaagggctattgccaatactagggtcaaaaatgaatttgagggaacagtgggtaagaaactttatgcctgaataacatttagcagtattgtgattgaaaaattgccatattttgatgtataggacaagtcaactgagatccagagaatcctggatgtgaatgctaaacactggcccttaactcacattcaatgtattttcttcccataacatttagtatagttaatattttcttagaatttgagcccatttaagtggattaatattctacatgtgtgcccctaaagacacatttcttgagatgagatggaatctactcctcgtgaagaggctgtgaacattgttgaaatgacaataggatttagaatagtacacacatttagttgataaagaagtggcagggtttgagaggattgactccagcatacaagcaggcccggtaatgggcctccacgatgtccctgccataggctctgtcccgaattc

SEQ ID NO: 283946 - DNA, 5163 bp, Homo sapiens
  misc_feature (4)..(7): n is a, c, g, or t
  misc_feature (9)..(9): n is a, c, g, or t
  misc_feature (271)..(271): n is a, c, g, or t
gaannnngngtggagcagagagtgcttggcgggcgggtgccccgaagcctgaggaattgatgcatagtcggggtgcgtggactccaggacgcgcccctttgcagaaagagtccgtgccccgctgccgcctgctctgggcagcgccgtcgggcagcgggtgctgcctcttgccgggaggtgacacacgccggcagtgatggtcgaggagccgcccgggttcgacgcccgggtcccactcgccggcgcgcggccgcggctctgccggtcgctncgccagggggcggcgcagcgcggggcgagcgggaggcgacgggcggcggcgcggaggccggggccgtgagggagctggttctgagtcgccgacctcacctcacctcacctgcgcgcgttgttgcccctacggagcctcctggagtccaggatcggcggagttcgaaaacgaacttcccacgtttgctatgttgccctttggagacaaaacaagagaaatggtcaatgcatggtttgctgagagagttcacaccatccctgtgtgcaaggaaggtatcagaggccacaccgaatcttgctcttgtcccttgcagcagagtcctcgtgcagataacagtgtccctggaacaccaaccaggaaaatctctgcctctgaatttgaccggcctcttagacccattgttgtcaaggattctgagggaactgtgagcttcctctctgactcagaaaagaaggaacagatgcctctaacccctccaaggtttgatcatgatgaaggggaccagtgctcaagactcttggaattagtgaaggatatttctagtcatttggatgtcacagccttatgtcacaaaattttcttgcatatccatggactgatatctgctgaccgctattccctgttccttgtctgtgaagacagctccaatgacaagtttcttatcagccgcctctttgatgttgctgaaggttcaacactggaagaagtttcaaataactgtatccgcttagaatggaacaaaggcattgtgggacatgtggcagcgcttggtgagcccttgaacatcaaagatgcatatgaggatcctcggttcaatgcagaagttgaccaaattacaggctacaagacacaaagcattctttgtatgccaattaagaatcatagggaagaggttgttggtgtagcccaggccatcaacaagaaatcaggaaacggtgggacatttactgaaaaagatgaaaaggactttgctgcttatttggcattttgtggtattgttcttcataatgctcagctctatgagacttcactgctggagaacaagagaaatcaggtgctgcttgaccttgctagtttaatttttgaagaacaacaatcattagaagtaattttgaagaaaatagctgccactattatctctttcatgcaagtgcagaaatgcaccattttcatagtggatgaagattgctccgattctttttctagtgtgtttcacatggagtgtgaggaattagaaaaatcatctgatacattaacaagggaacatgatgcaaacaaaatcaattacatgtatgctcagtatgtcaaaaatactatggaaccacttaatatcccagatgtcagtaaggataaaagatttccctggacaactgaaaatacaggaaatgtaaaccagcagtgcattagaagtttgctttgtacacctataaaaaatggaaagaagaataaagttataggggtttgccaacttgttaataagatggaggagaatactggcaaggttaagcctttcaaccgaaatgacgaacagtttctggaagcttttgtcatcttttgtggcttggggatccagaacacgcagatgtatgaagcagtggagagagccatggccaagcaaatggtcacattggaggttctgtcgtatcatgcttcagcagcagaggaagaaacaagagagctacagtcgttagcggctgctgtggtgccatctgcccagacccttaaaattactgactttagcttcagtgactttgagctgtctgatctggaaacagcactgtgtacaattcggatgtttactgacctcaaccttgtgcagaacttccagatgaaacatgaggttctttgcagatggattttaagtgttaagaagaattatcggaagaatgttgcctatcataattggagacatgcctttaatacagctcagtgcatgtttgctgctctaaaagcaggcaaaattcagaacaagctgactgacctggagatacttgcattgctgattgctgcactaagccacgatttggatcaccgtggtgtgaataactcttacatacagcgaagtgaacatccacttgcccagctttactgccattcaatcatggaacaccatcattttgaccagtgcctgatgattcttaatagtccaggcaatcagattctcagtggcctctccattgaagaatataagaccacgttgaaaataatcaagcaagctattttagctacagacctagcactgtacattaagaggcgaggagaattttttgaacttataagaaaaaatcaattcaatttggaagatcctcatcaaaaggagttgtttttggcaatgctgatgacagcttgtgatctttctgcaattacaaaaccctggcctattcaacaacggatagcagaacttgtagcaactgaattttttgatcaaggagacagagagagaaaagaactcaacatagaacccactgatctaatgaacagggagaagaaaaacaaaatcccaagtatgcaagttgggttcatagatgccatctgcttgcaactgtatgaggccctgacccacgtgtcagaggactgtttccctttgctagatggctgcagaaagaacaggcagaaatggcaggcccttgcagaacagcaggagaagatgctgattaatggggaaagcggccaggccaagcggaactgagtggcctatttcatgcagagttgaagtttacagagatggtgtgttctgcaatatgcctagtttcttacacactgtctgtatagtgtctgtatttggtatatactttgccactgctgtatttttatttttgcacaacttttgagagtatagcatgaatgtttttagaggactattacatattttttgtatatttgttttatgctactgaactgaaaggatcaacaacatccactgttagcacattgataaaagcattgtttgtgatatttcgtgtactgcaaagtgtatgcagtattcttgcactgaggtttttttgcttggggattattttaaataattggtttttgtgttttctgaattaccattttttcaagaatgtttggaatctttcctttttcaaaagtaggttaggagcaaattatcatacattctgtgacatttaaagcctttataggatagtgaaaaatgctggctgagtggattttaagagaaataattgtatttgttaacagtgtctttttttaaaaagttaaggcactctgaaacaaatggaaagtcctatgaaactgtattgtaaagaaaacattatttaattgatatgctgttttgtgagagaacaggcaagacagaactttgtcacttcagtgcagtacatttttctgaaagctacccataaaatcactttcatctcacctacctgatgcaaagcaggtgaaaccttaggagatgatccagtcactgacttgattgagggataagtgtgatttagaaatggaatggccttggatgtctatcagtgaagaaaaatgttctgttagaagatctctctaagagtttttttccttctgagcttccttttcaaaataaaagtgacaattgtagcattgacttgaagtgagacatggttatagataagagagtacaaaatgactctttttcctgtcaattgaaatttaaagaaaagttttaattatataaatagcaaagggctattgccaatactagggtcaaaaatgaatttgagggaacagtgggtaagaaactttatgcctgaataacatttagcagtattgtgattgaaaaattgccatattttgatgtataggacaagtcaactgagatccagagaatcctggatgtgaatgctaaacactggcccttaactcacattcaatgtattttcttcccataacatttagtatagttaatattttcttagaatttgagcccatttaagtggattaatattctacatgtgtgcccctaaagacacatttactcaatattggagaagtagataatgaattaagcaactggtctaggaaaggaaaatttgtttcaaatatgcaggaatgtttggatttggggagagtagaaggagagatttgcttgatttgttaacttctacctccaacccacaaaaaagatatttgatctgagtttctatcactaatttggatagaaaatttctaagggacatggtaatccagcattctcaaggacctttcgccaaaatgtgttttccatctatgtcccgattcccctaaattttgcctaaaattcagtatgttccttaagtttttaaaattctgagtgtgtacaaatatcttgacataatgcagttttatttttatcattctggtaaaaaaacaaaaaatagaagcaaaacacattgtattgccattattttgtatttggtaaaggttaatctaggaagttaccaactgtttaatgctatatgtattgtatacttgtattttcaggatattttattttttttgccatacagataaaatttgtaaggttgcccctttgtggcactggtgtgtaaaatacacagactatcactaaaataatagttatatatacatacaggtgtatacttatgcatgcatacataaatccttagtatagaaaaattgcataaagaatagcaatctttaataaacctttttattacattgtgatttagcagttatgctaaaatatgtacttatgctttagtagtttgtttggtcccctctagtatgtgtcactgagaaattttttaaagacatggtagatcgtgtttagaggctttgtatgtgtgtcattttaataagcaagaagatatatttagattagaaatggtttggtctgcctttgaatattgtttattttactttactagttgagacattaaaggaagctgggcaatgcctat

SEQ ID NO: 283947 - DNA, 3643 bp, Homo sapiens
aaccagttaagatttatcctaatgttgatgtaatcttccatttttattgactacgtgtttaacttttatttctaagtagtcatttttatttgcataattatttgcagaatcaaaagttttctgcaaatttgattctgttggatacagaggtgtagatttgaaatttgagactgcttatgtcagttgcctcctttctgcattctattttgggtttgccaacttgttaataagatggaggagaatactggcaaggttaagcctttcaaccgaaatgacgaacagtttctggaagcttttgtcatcttttgtggcttggggatccagaacacgcagatgtatgaagcagtggagagagccatggccaagcaaatggtcacattggaggttctgtcgtatcatgcttcagcagcagaggaagaaacaagagagctacagtcgttagcggctgctgtggtgccatctgcccagacccttaaaattactgactttagcttcagtgactttgagctgtctgatctggaaacagcactgtgtacaattcggatgtttactgacctcaaccttgtgcagaacttccagatgaaacatgaggttctttgcagatggattttaagtgttaagaagaattatcggaagaatgttgcctatcataattggagacatgcctttaatacagctcagtgcatgtttgctgctctaaaagcaggcaaaattcagaacaagctgactgacctggagatacttgcattgctgattgctgcactaagccacgatttggatcaccgtggtgtgaataactcttacatacagcgaagtgaacatccacttgcccagctttactgccattcaatcatggaacaccatcattttgaccagtgcctgatgattcttaatagtccaggcaatcagattctcagtggcctctccattgaagaatataagaccacgttgaaaataatcaagcaagctattttagctacagacctagcactgtacattaagaggcgaggagaattttttgaacttataagaaaaaatcaattcaatttggaagatcctcatcaaaaggagttgtttttggcaatgctgatgacagcttgtgatctttctgcaattacaaaaccctggcctattcaacaacggatagcagaacttgtagcaactgaattttttgatcaaggagacagagagagaaaagaactcaacatagaacccactgatctaatgaacagggagaagaaaaacaaaatcccaagtatgcaagttgggttcatagatgccatctgcttgcaactgtatgaggccctgacccacgtgtcagaggactgtttccctttgctagatggctgcagaaagaacaggcagaaatggcaggcccttgcagaacagcaggagaagatgctgattaatggggaaagcggccaggccaagcggaactgagtggcctatttcatgcagagttgaagtttacagagatggtgtgttctgcaatatgcctagtttcttacacactgtctgtatagtgtctgtatttggtatatactttgccactgctgtatttttatttttgcacaacttttgagagtatagcatgaatgtttttagaggactattacatattttttgtatatttgttttatgctactgaactgaaaggatcaacaacatccactgttagcacattgataaaagcattgtttgtgatatttcgtgtactgcaaagtgtatgcagtattcttgcactgaggtttttttgcttggggattattttaaataattggtttttgtgttttctgaattaccattttttcaagaatgtttggaatctttcctttttcaaaagtaggttaggagcaaattatcatacattctgtgacatttaaagcctttataggatagtgaaaaatgctggctgagtggattttaagagaaataattgtatttgttaacagtgtctttttttaaaaagttaaggcactctgaaacaaatggaaagtcctatgaaactgtattgtaaagaaaacattatttaattgatatgctgttttgtgagagaacaggcaagacagaactttgtcacttcagtgcagtacatttttctgaaagctacccataaaatcactttcatctcacctacctgatgcaaagcaggtgaaaccttaggagatgatccagtcactgacttgattgagggataagtgtgatttagaaatggaatggccttggatgtctatcagtgaagaaaaatgttctgttagaagatctctctaagagtttttttccttctgagcttccttttcaaaataaaagtgacaattgtagcattgacttgaagtgagacatggttatagataagagagtacaaaatgactctttttcctgtcaattgaaatttaaagaaaagttttaattatataaatagcaaagggctattgccaatactagggtcaaaaatgaatttgagggaacagtgggtaagaaactttatgcctgaataacatttagcagtattgtgattgaaaaattgccatattttgatgtataggacaagtcaactgagatccagagaatcctggatgtgaatgctaaacactggcccttaactcacattcaatgtattttcttcccataacatttagtatagttaatattttcttagaatttgagcccatttaagtggattaatattctacatgtgtgcccctaaagacacatttactcaatattggagaagtagataatgaattaagcaactggtctaggaaaggaaaatttgtttcaaatatgcaggaatgtttggatttggggagagtagaaggagagatttgcttgatttgttaacttctacctccaacccacaaaaaagatatttgatctgagtttctatcactaatttggatagaaaatttctaagggacatggtaatccagcattctcaaggacctttcgccaaaatgtgttttccatctatgtcccgattcccctaaattttgcctaaaattcagtatgttccttaagtttttaaaattctgagtgtgtacaaatatcttgacataatgcagttttatttttatcattctggtaaaaaaacaaaaaatagaagcaaaacacattgtattgccattattttgtatttggtaaaggttaatctaggaagttaccaactgtttaatgctatatgtattgtatacttgtattttcaggatattttattttttttgccatacagataaaatttgtaaggttgcccctttgtggcactggtgtgtaaaatacacagactatcactaaaataatagttatatatacatacaggtgtatacttatgcatgcatacataaatccttagtatagaaaaattgcataaagaatagcaatctttaataaacctttttattacattgtgatttagcagttatgctaaaatatgtacttatgctttagtagtttgtttggtcccctctagtatgtgtcactgagaaattttttaaagacatggtagatcgtgtttagaggctttgtatgtgtgtcattttaataagcaagaagatatatttagattagaaatggtttggtctgcctttgaatattgtttattttactttactagttgagacattaaaggaagctgggcaatgcctat

SEQ ID NO: 283948 - DNA, 604 bp, Homo sapiens
aacttgcttctgtgtttgtgtcttcaaaacagctgctatcaccaataattaaaccataaaaaaccgaaattatttttccctctggggtgattacaaccacacgggagctgtgatgagagctcagcaatcctgtgatataggcaaagcagacctgacagtcacaggggttccatctccaaagtgaccttaagatctgaggtgaccactgcaactccaagccatcctggttcaccaactgctagaaacacccagattttaactttccaactcacttcttccaagaagctccccctggtatatggccacctcctctgagaccacttcatcccactgtccattgtcaagagcatgtctttcactcagagaatcaaaacttttgttgaagacagaccttacaccatctggcctaatgatttgcaacttgtttttcagagccctttctgcaagtaaaaacatatgtgaaaccccaacatgatggataaaatgaataaaatgtagaatgggatggggcagaggagccccaagtcacttcagaacatagttagaaaagataatatcttgccctcattttatgaataaagacattgctgcccaaagatagaat

SEQ ID NO: 283949 - DNA, 637 bp, Homo sapiens
aacttgcttctgtgtttgtgtcttcaaaacagctgctatcaccaataattaaaccataaaaaaccgaaattatttttccctctggggtgattacaaccacacgggagctgtgatgagagtcacaggggttccatctccaaagtgaccttaagatctgaggtgaccactgcaactccaagccatcctgaaagctattcttgtgaccaaatcaacagctctttccaagaaaaaaagaccttattgatgtgaagtcttgacactgcctcctgggagcatcgtcctgtaatcaagggcagaaaactctgtgtgtgtacatgtgtgtaaatgcatgtgtgtgcccatagggccaccattaggctaaaaggcccttatgacatccatgtgggaattatttcctcctccctccaggcagatgcagccccatgctaacttgtggaacaggtttggtttcaggccgcacttactcttttgaccaaagttacaactgttcacaacacctgtgtgtgtgtgtgcgggggggggggggggtgtctatatgcgaagatttcaaaaacatatcagaaattactcccaagaggtatccctttttatctggagggcataacatcgttctagatttatacagggaggtggatat

SEQ ID NO: 283950 - DNA, 291 bp, Homo sapiens
aacttgcttctgtgtttgtgtcttcaaaacagctgctatcaccaataattaaaccataaaaaaccgaaattatttttccctctggggtgattacaaccacacgggagctgtgatgagagatgaaagaactgaccctcaaggagaccaagggataatgaccatgatgatcacatgatagcccagtcaaactggccacttggttctcaaaccctggccttttaagtcaaaattgtattactacactaaatgtaaaatggcatcttaccaaaataaatggaatctttgaagaga

SEQ ID NO: 283951 - DNA, 587 bp, Homo sapiens
tctgaacctcacgtgtgctgttgcctcaggccctccacgcgcccatccctgtcctgggagcgcctttcccagatgcatgctcggctcctctcccacttgcgtaggcctgtactcagatgacttcctcttagtcatcttgttagcaaagctttccttgaatatcctgccgaaaatattcctgctgggtgcagcggctcacgcctgtgatgcaaacactttgggaggccgaggtggaagggctgcttggggccagaagttcaagaccagcctgggcaacctggagcctggtccaaagacagctgacccccgaacatcacacggtgtgaattgcgtcggtccagttatacttacgcgcttacccatggattttcctccacccctgagacagcaagaccagcccctctcctacctcctcctcctcctccgcctactcaacgcgaagactacaaggaggaagacctttatgatgatctacttaataaatagcgagtacattttctcttccttaggatattcttagtaacatttttttctttagctacttgattataagaatacagcatatagtacggccgggcgcggtggct

SEQ ID NO: 283952 - DNA, 840 bp, Homo sapiens
ggtcaccttctgtgttcaggttggagtgcagtgagctgagatcgcacgactgcactccagactgggtgatagagtgagactctgtcgcataaaaaaaaagaaataaaaatagaaaatacaagcgcccgtttccgggcgcggtaatgggggtatgaatgggagaggcgtgattgtcactgtgggccaggcttggttcggctgaaacggggaacatccagcgggtcaccgccatgatgaggcatcacactatatatgggagagacgacggagggaaaggggcgtgcttgagagggacagtaggaacaagacagcctgggcaaccctgcccccaccctccaggcggtcagccctgtgctgagtctcacctcctcttcaggaagaaaatcagcaggcccacgaggatgagaaacaggaggatgcccacaaaggctccggcaatgacccctgtggggaggaggcatcgggaaccctcagagcgcaggtctgagctgctcatctgtctccaaccctgcccagcctttcctcttccccaggagcctggtccaaagacagctgacccccgaacatcacacggtgtgaattgcgtcggtccagttatacttacgcgcttacccatggattttcctccacccctgagacagcaagaccagcccctctcctacctcctcctcctcctccgcctactcaacgcgaagactacaaggaggaagacctttatgatgatctacttaataaatagcgagtacattttctcttccttaggatattcttagtaacatttttttctttagctacttgattataagaatacagcatatagtacggccgggcgcggtggct

SEQ ID NO: 283953 - DNA, 1144 bp, Homo sapiens
aaactgtgctttatttagggctaagctggagaaagcgtcatccaatagttacagaaggttacaaggagttttagggagttgagtgtgaaaagagcagttgtactgaactgcagctgttttcttttttttttctttttttcttttttttttttttttttttacatctggacatcctaaaaggaggagtcaagagaaaaaaagaaaatgaaaaacaacaacaacaacaaaattgacagaaagaaaggaaaggcaggaggccctagaggaactggaaatttgttcttctaaagggaaactggtaggtctgagaacccccggcctccagatgacctggacatcaatgagaaggaatcaaggcagaatgccaaagcaatcttcccaagggtgcaaataaattataataaatatgttatactttaaaatatatgtgttcttaaataattcagtgttttttctgattctgagttttttaagcaatgtctttaactgctctaaagtcatttaccaaagataaatatcgtgctttcattaaatagttttccttgtttttttctctatcattacaattaaaagtcctacaaaatatgcaaatttatttacagaaaaacagagccggcatcatttaaacatccctgtttttcaaaattccttgtaaacagtttcagaaattcttcaaagattgtttatttttctctctcttttttaaggttttgtgtgtgtgtgtgttgtctagttgttttaagatgaaagttcccagttctcccttgcccggaaagtctctggagcaagcgtggaaggcgagtgaagcggaaggtgagtgaagcgcgcgcagctcccagagggaagcgagaggcgaggatgacggcggcggcggcggcggcgacccgggcgacgcgaccgttcccgaccgacggcgtggcctccaccggcgtcggcagccaggcgcccgcaggtgtggggcgagttcggcctggcccttggggacaacggcatccgactgcactcgcggggagaagggattgatgctctgtctaaactctacaaaagtacagtcctacaacatctgggattttagcagtaatgctaacttctataggttttttttttccttttttattttttttttttattttttgctttcctc

SEQ ID NO: 283954 - DNA, 1143 bp, Homo sapiens
aaactgtgctttatttagggctaagctggagaaagcgtcatccaatagttacagaaggttacaaggagttttagggagttgagtgtgaaaagagcagttgtactgaactgcagctgttttcttttttttttctttttttcttttttttttttttttttttacatctggacatcctaaaaggaggagtcaagagaaaaaaagaaaatgaaaaacaacaacaacaacaaaattgacagaaagaaaggaaaggcaggaggccctagaggaactggaaatttgttcttctaaagggaaactggtaggtctgagaacccccggcctccagatgacctggacatcaatgagaaggaatcaaggcagaatgccaaagcaatcttcccaagggtgcaaataaattataataaatatgttatactttaaaatatatgtgttcttaaataattcagtgttttttctgattctgagttttttaagcaatgtctttaactgctctaaagtcatttaccaaagataaatatcgtgctttcattaaatagttttccttgtttttttctctatcattacaattaaaagtcctacaaaatatgcaaatttatttacagaaaaacagagccggcatcatttaaacatccctgtttttcaaaattccttgtaaacagtttcagaaattcttcaaagattgtttatttttctctctcttttttaaggttttgtgtgtgtgtgtgttgtctagttgttttaagatgaaagttcccagttctcccttgcccggaaagtctctggagcaagcgtggaaggcgagtgaagcggaagagaagcataaaaaaacgctgaacaagaaaaaccaaacaacagaaagtaaaaccactgcaagcaccaagaacgaaacgaaaatgagcacagcaaaaaagattgtggcagcacaaaagtcaagaaaatgcacgtgtgatcatgactggccaatcatcaactgatacaacatccaagaaaaacgctccaatcacagcacctccacgaaacttgacggcaattgtcatgcaaccgattcttagccttgttacatgacgccatcatgtcacactgtgaactttgagttgatttgaacttacggatgggggacttttctccactctcatgtgatta

SEQ ID NO: 283955 - DNA, 622 bp, Homo sapiens
ttttttccctttgaagtgagattgaaaatagcctaactggaaaaagaccagacctaggaaagtgtcaattgaaaaaggcccccaaatttctagaaaaaaataaaatcacaatattttcaagtgcaagtaaatcaaccacgcatagatatttttaagatgttttccttatttttaagaaaaaaataatggtttgcacaggtaaatgatcccatgtttgataattcaggaattcatctttattttgactattttttgttcttttgttttgtttttttctctatgtgacatctagagaagcataaaaaaacgctgaacaagaaaaaccaaacaacagaaagtaaaaccactgcaagcaccaagaacgaaacgaaaatgagcacagcaaaaaagattgtggcagcacaaaagtcaagaaaatgcacgtgtgatcatgactggccaatcatcaactgatacaacatccaagaaaaacgctccaatcacagcacctccacgaaacttgacggcaattgtcatgcaaccgattcttagccttgttacatgacgccatcatgtcacactgtgaactttgagttgatttgaacttacggatgggggacttttctccactctcatgtgatta

SEQ ID NO: 283956 - DNA, 593 bp, Homo sapiens
ctgcacctggtgctgtccatggggctgcagctgtacggtttcaggcagcggcagcgagccagaaaggagtggaggctgcaccgcggcctgtctcaccgcagcgcctgctgggagggtcacacgttcagttggcacagagcacgttagaaccaggcctctcactggcatggggagtgcccggcagaaacgatcaagccagggggcaggttcagggagtctgaggtgcctgcttcgtagcctagcatgacggagaggcctgagctccagaccagccttggcatcaccagtgcagaaagagtcttagctatgaggctggcagagcaggtgaggatgtggggatgtccagggaccacctctcagaaaaggaggcggggagcggaaatgtggggctgcagacgctgcccaccagctaccctgctacagggaccgaagccccagtgtaacaaggcacgtggccccagggacactgctgccaccctcctgctggtgacacaggtagcttctgaccgtgccactgaaggacagctggctgccctcggcttcccgtgtcactttccactggctgggaaatggagacagccagacagcctcag

SEQ ID NO: 283957 - DNA, 396 bp, Homo sapiens
atgcagcccagtatcctgccctaagttccagaggaccattttccacatgaaaagtcttacggatagacaaacttccattcaagccaatgtcaagttttcattgcaagaaagtagcagccgtgtttaagagttcgctccaaatgctcatcttcttcttcggccctggatgtcagacaaacaggacaaacaggaaacaaaattatttttcttcgtggagggcagagcagcactcccccgtcgcccagtatttggatccccagcgggaatggggagcaccaggccagtgggaggctgccccggccctcccgcgacctctggattgaactttccgcacacttctcggcccctcggcaggtggcccagcctcgacccgaccccactgcccactcactgctt

SEQ ID NO: 283958 - DNA, 1908 bp, Homo sapiens
  misc_feature (1207)..(1207): n is a, c, g, or t
  misc_feature (1877)..(1877): n is a, c, g, or t
actcatcttgactctttcacatggtccaggcagtgaggggtggtgggggttatacagggcaatcttttgagtttctgatctcatcttttccttgggggaagtggaggtttagccacctcctatctactgagcagccttttttgggttgcagatggaccggggtgaattccagcaagactcagtcctgaaacagctggaggtcctcaaagaagaggagaaagagtttcagaacctgaaggaccccaccaatggctactacagcgtcaacaccttcaaagagcaccactcaaccccgaccatctccctctccagctgccagcccgacctgcgtcctgcgggtaagcagcgtgtgcccacaggcatgtccttcaccaacatctacagcaccctgagcggccagggccgcctctacgactacgggcagcggtttgttgctgggcatgggcagctcgtccatcgagctttgtgagcgggagttccagagaggctccctcagcgacagcagctccttcctggacacgcagtgtgacagcagcgtcagcagcagcggcaagcaggatggctatgtgcagttcgacaaggccagcaaggcttctgcttcctcctcccaccactcccagtcctcgtcccagaactctgaccccagtcgacccctgcagcggcggatgcagactcacgtctaaggatcacacaccgcgggtggggacgggccagggaagaggtcagggcacgttctggttgtccagggacgaggggtactttgcagaggacaccagaattggccacttccaggacagcctcccagcgcctctgccactgccttccttcgaagctctgatcaagcacaaatctgggtccccaggtgctgtgtgccagaggtgggcgggtggggagacagacagaggctgcggctgagtgcgctgtgcttagtgctggacacccgtgtccccggccctttcctggaggcccctctaccacctgctctgcccacaggcacaagtggcagctataactctgctttcatgaaactgcggtccactctctggtctctctgtgggctctacccctcgctgaccagaagctctacctacccctgtgcctgtgctcccatacagccctggggagaaggggatgacgtcttcccagcactgagctgccccagaaaccccggctccccactgctgctcatagcccataccctggaggntgacaagccagaaatggccttggctaaaggagcctctctctcaccaggctggccgggagcccacccccaatttgtttggtgttttgtgtccatactcttgcagttctgtccttggacttgatgccgctgaactctgcggtgggaccggtcccgtcaagagcctggtgtactggggggagggagggaggagggagcctgtgctgacggagcacctcgcccgggtgttgcccctccctgggctgtgtgaccccagcctccccacccacctcctgctttgtgtactcctcccctccccctcagcacaatcggagttcatataagaagtgcgggagcttctctggtcagggttctctgaacacttatggagagagtgcttcctgggaagtgtggcgtttgaaggggctggagggcaggtctttaagatggcgagactgcccttctcagctgataaacacaagaacggcgatcctgtcttcagtaaggctccacgagaagagaggaagtatatctacacctcaaccctcctagtcaccacctgaaataaatgttagggacactactccaacatgtttgttctgttcttttgttcctacaaagccacaggaagaacccaagagctcatagaatgcgttgggaacccaaggttctctgccctcctttgattcaatcntcctagacaataaaggcagttgatagctctg

SEQ ID NO: 283959 - DNA, 3813 bp, Homo sapiens
  misc_feature (3112)..(3112): n is a, c, g, or t
  misc_feature (3782)..(3782): n is a, c, g, or t
cttctccgagtggggacattgctgacaatcccggcttcccgaggcggctaagaacaggcagtttgtgtcggctggctgcagatacccagaggcacaaagagaccgaagccacccggagggacccacggacggacagatggtaggcgcgaacccgagaggaccggcggaggctgagcaccgagagccgccaaggaagagaaactaaccacagccaagttaccccgccggctttccttcgctgcgctaaggaatgaaacccttccagctcgatctgctcttcgtctgcttcttcctcttcagtcaagagctgggcctccagaagagaggatgctgtctggtgctgggctacatggccaaggacaagtttcggagaatgaatgaaggccaagtctattccttcagccagcagccccaggaccaggtggtggtgtcgggacagccagtgacgctactttgcgccatccccgaatacgatggcttcgttctgtggatcaaggacggcttggctctgggtgtgggcagggacctctcaagttacccacagtacctggtggtagggaaccacctgtcaggggagcaccacctgaagatcctgagggcagagctgcaagacgatgcggtgtacgagtgccaggccatccaggccgccatccgctcccgccccgcacgcctcacagtcctggtgccgcctgatgaccccgtcatcctggggggccctgtgatcagcctgcgtgcgggggaccctctcaacctcacctgccacgcagacaatgccaagcctgcagcctccatcatctggttgcgaaagggagaggtcatcaatggggccacctactccaagaccctgcttcgggacggcaagcgggagagcatcgtcagcaccctcttcatctcccctggtgacgtggagaatggccagagcatcgtgtgtcgtgccaccaacaaagccatccccggaggaaaggagacgtcggtcaccattgacatccagcaccctccactggtcaacctctcggtggagccacagccagtgctggaggacaacgtcgtcactttccactgctctgcaaaggccaacccagctgtcacccagtacaggtgggccaagcggggccagatcatcaaggaggcatctggagaggtgtacaggaccacagtggactacacgtacttctcagagcccgtctcctgtgaggtgaccaacgccctgggcagcaccaacctcagccgcacggttgacgtctactttgggccccggatgaccacagaaccccaatccttgctcgtggatctgggctctgatgccatcttcagctgcgcctggaccggcaacccatccctgaccatcgtctggatgaagcggggctccggagtggtcctgagcaatgagaagaccctgaccctcaaatccgtgcgccaggaggacgcgggcaagtacgtgtgccgggctgtggtgccccgtgtgggagccggggagagagaggtgaccctgaccgtcaatggaccccccatcatctccagcacccagacccagcacgccctccacggcgagaagggccagatcaagtgcttcatccggagcacgccgccgccggaccgcatcgcctggtcctggaaggagaacgttctggagtcgggcacatcggggcgctatacggtggagaccatcagcaccgaggagggcgtcatctccaccctgaccatcagcaacatcgtgcgggccgacttccagaccatctacaactgcacggcctggaacagcttcggctccgacactgagatcatccggctcaaggagcaaggttcggaaatgaagtcgggagccgggctggaagcagagtctgtgccgatggccgtcatcattggggtggccgtaggagctggtgtggccttcctcgtccttatggcaaccatcgtggcgttctgctgtgcccgttcccagagaaatctcaaaggtgttgtgtcagccaaaaatgatatccgagtggaaattgtccacaaggaaccagcctctggtcgggagggtgaggagcactccaccatcaagcagctgatgatggaccggggtgaattccagcaagactcagtcctgaaacagctggaggtcctcaaagaagaggagaaagagtttcagaacctgaaggaccccaccaatggctactacagcgtcaacaccttcaaagagcaccactcaaccccgaccatctccctctccagctgccagcccgacctgcgtcctgcgggtaagcagcgtgtgcccacaggcatgtccttcaccaacatctacagcaccctgagcggccagggccgcctctacgactacgggcagcggtttgttgctgggcatgggcagctcgtccatcgagctttgtgagcgggagttccagagaggctccctcagcgacagcagctccttcctggacacgcagtgtgacagcagcgtcagcagcagcggcaagcaggatggctatgtgcagttcgacaaggccagcaaggcttctgcttcctcctcccaccactcccagtcctcgtcccagaactctgaccccagtcgacccctgcagcggcggatgcagactcacgtctaaggatcacacaccgcgggtggggacgggccagggaagaggtcagggcacgttctggttgtccagggacgaggggtactttgcagaggacaccagaattggccacttccaggacagcctcccagcgcctctgccactgccttccttcgaagctctgatcaagcacaaatctgggtccccaggtgctgtgtgccagaggtgggcgggtggggagacagacagaggctgcggctgagtgcgctgtgcttagtgctggacacccgtgtccccggccctttcctggaggcccctctaccacctgctctgcccacaggcacaagtggcagctataactctgctttcatgaaactgcggtccactctctggtctctctgtgggctctacccctcgctgaccagaagctctacctacccctgtgcctgtgctcccatacagccctggggagaaggggatgacgtcttcccagcactgagctgccccagaaaccccggctccccactgctgctcatagcccataccctggaggntgacaagccagaaatggccttggctaaaggagcctctctctcaccaggctggccgggagcccacccccaatttgtttggtgttttgtgtccatactcttgcagttctgtccttggacttgatgccgctgaactctgcggtgggaccggtcccgtcaagagcctggtgtactggggggagggagggaggagggagcctgtgctgacggagcacctcgcccgggtgttgcccctccctgggctgtgtgaccccagcctccccacccacctcctgctttgtgtactcctcccctccccctcagcacaatcggagttcatataagaagtgcgggagcttctctggtcagggttctctgaacacttatggagagagtgcttcctgggaagtgtggcgtttgaaggggctggagggcaggtctttaagatggcgagactgcccttctcagctgataaacacaagaacggcgatcctgtcttcagtaaggctccacgagaagagaggaagtatatctacacctcaaccctcctagtcaccacctgaaataaatgttagggacactactccaacatgtttgttctgttcttttgttcctacaaagccacaggaagaacccaagagctcatagaatgcgttgggaacccaaggttctctgccctcctttgattcaatcntcctagacaataaaggcagttgatagctctg

SEQ ID NO: 283960 - DNA, 884 bp, Homo sapiens
tttggggtgaggggagaaagtgctaggagctgggacccctcccccatccctcactctcatcagaagaggagaggagaagagaggttgggaccagtcttcaccccctggaatgtcgctgatgataaaaccataatggtggcagccccagcatttacaaagaggagggatgcggcacggccatcttgctgaaagcccgaactaaaggaagctgtgtttggacaacaggcacaatttggggtggtggcacagggccacacacctccggttaccccttggatcaaccacagcaggtgcacctgtccctgactcagagccctggaaccacactcaccagttctcaggactccttctccagccaactcagcatggggccttgtcttgctatctatattctctgcctaggtgatctcatccatactcgtggctttaaataccatctatatgccagtgactcacaaatgtatatttccagcccagacctctccttggagctccagactccgagatgtctgtttgtgatgtccaaatacatctccaaggcaatggatcacaaatggagtcctactccagacctgctctgctcccatcttttcgtctcagtggatggtcccatcattcctctagatggtctgctcaacacagaaacctaggaatcatcctgcttccttatctctcacctaatgaaccccaaattgagacctgttaggccaggttcgggggctcatgcctgtaatccgagaaatttgggaagccgaggtgggaggatcactggaggccaggagttcaaggttgaagtgagccatgatcgtgctgctacactccaagctgggtgacagagaatcccatctgtaaaagataagaataaaaagatctgttggttcaat

SEQ ID NO: 283961 - DNA, 893 bp, Homo sapiens
gggtggatataactaatgttattcttgagatgcatgaattaatgtttttgcaccacagacggaacatgattaattactagatgaaggcgttgattaattattactcactgattcactatggatgtcgaaggaaaaatcgaatgaataatattgtcctcccgccaggaggcatatgaaagaatcgttcccatgtgcgtggtggtggatgtgtggctccacgacactcggaaggtgtttcaccacccccctcctcagtggttagtgtcttctcctcctccggggtgggctgcccgcgagtgtcatcctgagtttgctccttcctgcttccagctcgcgaggtgttttgctactttcttcgtcacgtctgcttccagacgcgtgtcatgaatatagatgggctactttggtggcgcgccctcttgtcgtatctccgaatacgatggtcgttgttgtggcgtcggctgggtgctaccagggggagttgtgtctggtggctgctcctccgctcgctctctttttttttttttttttttttttttttttttctttttttttttttttttttttttttttttttttttttttttttttttttttttttaaacaaacccagagccactcctttaatacagaaacttcattgaaaaaacctagccctgtacagctgcccttttaaagaggtggccattgcagggtctctgcctccccagcaggtggcagatgctcccggccactcgtttaaataactgtcccctggagggggccggggtttgaaggcagggcccctgccaccctcctgggggacacccgtgcatgtttacgccttttctggttgtgtcagtggccggagcatggcagctgggcatcaataaacacctccgaggaaactggac

SEQ ID NO: 283962 - DNA, 874 bp, Homo sapiens
  misc_feature (874)..(874): n is a, c, g, or t
agtagttggggaacacccggcgattctggcggctgcttcctggtggcgcagggagcccgcgtgtttgcgagtgcgtgtgtgtgcgaagttctccggctcgactccgcgctctcctcgccggccgccgccgcccagcctgcgcccgccgtccccccagtgcctgggcacctgttggaggcagagccaggggtgctgcatgaggggccgcaggggcgatcgcatgaccatcaacatccaggagcacatggccatcaacgtgtgccccgggcccatccggcccatccgccagatctctgactacttcccccggggaccaggacctgaagggggcggcgggggcggcggggagggctcagagcatgtggtcgcgccttggggtctgggaccctgcttgcaagcctatcctttggtggctcagcagcggcctgaggagtgggtagcgcgcaggtagtgcccagggtagtgagatcgggcattgatgtgcactcgctctctgtcgcgctggcagtgtgatcgttctctatgagctgtgcctcgcttgaatcgtcatgacaatgtgtttcgaatccatcgaagggccaaagggagcactcatggcccctgagaatgctcaatgagcccgtcgcacgaacaccttgtatctgcttcaagtcgtggatcgcgtatgtcttgtccttgcgaaggcccttgttacagtgaccgggtatacaacgtaagagaagcgaatcgaactcaagaaggaaccatccctgtaggatctccagtgtgtagcatgggagacccttgagctttgggacgacggcggattctccacgaaaaccgatagctgtctcgaaccaaaggaggcgccaggatctcggccggcctgtgatan

SEQ ID NO: 283963 - DNA, 474 bp, Homo sapiens
tttggggtgaggggagaaagtgctaggagctgggacccctcccccatccctcactctcatcagaagaggagaggagaagagaggttgggaccagtcttcaccccctggaatgtcgctgatgataaaaccataatggtggcagccccagcatttacaaagaggagggatgcggcacggccatcttgctgaaagcccgaactaaaggaagctgtgtttggacaacaggcacaatttggggtggtggcacagggccacacacctccggttaccccttggatcaaccacaggtaacctatgcatgtggcacaaaattcaaaaaatacaaaaggatgtacgttgaaaacttgtcaagagacacagttaccattcttgtgcaggcctccagaaacaacatatgaacaactaagcaaacacggctaagctctttccctctcaaatggcagtattccaagcatgcttctctgcacttgcttt

SEQ ID NO: 283964 - DNA, 3060 bp, Homo sapiens
ccctaggaaaggcgcagcggggcggactcccgggcctcctcccgcctcttccacaggttgcatccgcggctgcaggaaaacggatggctgggaatggccgtcgggggttggtcagaggaagtccctcggccctttccgaggcacatctcttggccatccacgcgtccttcgcagactccgctccctgcacctccgtttcctcttctgtggccggcggctcccccgtggccaccccatctcccatctctgccacctcccaacagccatttccactcctgcggccccatcccagctaaggagagcgcccttctgattggcaggtgggcctgtctgtcacgggcatgttccatcccacccaagcccaaggacactccagggtttccttagtttcacaacgaaggtgcgtgctcagcggactctgcagacccagtgccgcgacttcccctaaagccaggcgtgtatctgcgcgtgtgaggtgctctgccgcaaccctatgcagagagcaggtaacctatgcatgtggcacaaaattcaaaaaatacaaaaggatgtacgttgaaaaggtctcactctgttacccaggctggagtgcagtggagtgattatagcttactgcagccttgaccttctgggctcaagagatcctcccaccatcacgaggtcaggagatcgagaccatcttggctaagaagagactgtgtctcactgtgttgcccaggctggcttcactcaagcgatcctctcgccgcagtccctggagtagctgggattacaggcacccgccaccactctcggccccatttctcttatttaaaaaaaaaaaaattgccgtgaaatacgcatatcgaaatgtaccatcttcaccatttttaagggtaagattaggtggtgttaggtatgttcagttgtcgtgcaaccagattgctgttttaaataacagcacttagagatgccgacttcgtgccaggcccagtttgggacattagggactcccagatgaatcagccgctccagtggaactccctgctggtgggggaggcactggcgaagcggtgctgagccgagtcctgacggcgctggagctgaggggcagtgcgggatgccccaggaaggctcctaggaagaggggacccacggtgacttcctaaggaagcgcggttcccagccaggggtgctgcatgaggggccgcaggggcgatcgcatgaccatcaacatccaggagcacatggccatcaacgtgtgccccgggcccatccggcccatccgccagatctctgactacttcccccggggaccaggacctgaagggggcggcgggggcggcggggaggcccccgcccatctggtccccctggctctggccccccctgcagccctccttggggccaccacgcctgaggatggtgcggaggtggacagctatgactcggatgatgccaccgccctaggcacgctggagtttgaccttctctacgaccgggcctcctgcactctgcactgtagcatcctcagggccaagggcctcaagcccatggatttcaatggcctcgccgacccctacgtcaagctgcacttgctgcctggagcctgtaaggccaataagctaaaaacgaagactcagaggaacacactgaatcccgtgtggaatgaggacctgacttacagcgggatcacagatgacgacatcacgcacaaggtgctcaggatcgccgtctgtgatgaggacaagctgagtcacaatgagtttattggggagatccgcgtgcccctccgccgcctcaagccttcgcagaagaagcattttaacatctgcctcgagcgccaagtcccgctggcgtccccctcttccatgtcagcggcgctgaggggcatctcctgttatctgaaggagttggagcaggcggagcaggggcaggggctgctggaggagcgtggccgcatcctgctgagtctcagctacagctcgcggcgccggggactgctggtaggcatcttgcgctgcgcccatctggctgccatggacgtcaacggttactcggacccctacgtcaagacgtacctgaggcccgatgtggacaagaaatccaagcataagacgtgtgtgaagaagaagactctcaacccagaatttaacgaggagtttttctacgagatagagctctccactctggccaccaagaccctggaagtcaccgtctgggactatgacattggcaaatccaatgacttcattggtggcgtgtccctggggccaggtgcccgaggcgaggctcggaagcactggagtgactgcctgcagcagccggacgcagccctggagcgctggcacaccctgaccagtgagctgccccctgcggccggggctctgtcctcagcctgagtggacagcagtgtcccggcacaggcccatcgagccgggtccagtacccaaccttcgcacgagtgtgttgcacgtttacacagggtgggctgcccccaccctgcactacctatttttgtgagtctccgtgacccgggtctgtctgctcatgaggggctgcggagttctatattcacatatgcaaacctcctgcctgactcgctagtccctgcaaatatgcaaaccccccatcatctgcacacccgggcagtgctcagagcccggccccaggcccccgcgctcctcactcctgcctctccacgctgccccgtccctctcccccaacagggaggaggtcggattaggggaggttcagaggaggagaatgtctcaaaaaaaaaggacaaaaaacaaacccagagccactcctttaatacagaaacttcattgaaaaaacctagccctgtacagctgcccttttaaagaggtggccattgcagggtctctgcctccccagcaggtggcagatgctcccggccactcgtttaaataactgtcccctggagggggccggggtttgaaggcagggcccctgccaccctcctgggggacacccgtgcatgtttacgccttttctggttgtgtcagtggccggagcatggcagctgggcatcaataaacacctccgaggaaactggac

SEQ ID NO: 283965 - DNA, 3147 bp, Homo sapiens
ccctaggaaaggcgcagcggggcggactcccgggcctcctcccgcctcttccacaggttgcatccgcggctgcaggaaaacggatggctgggaatggccgtcgggggttggtcagaggaagtccctcggccctttccgaggcacatctcttggccatccacgcgtccttcgcagactccgctccctgcacctccgtttcctcttctgtggccggcggctcccccgtggccaccccatctcccatctctgccacctcccaacagccatttccactcctgcggccccatcccagctaaggagagcgcccttctgattggcaggtgggcctgtctgtcacgggcatgttccatcccacccaagcccaaggacactccagggtttccttagtttcacaacgaaggtgcgtgctcagcggactctgcagacccagtgccgcgacttcccctaaagccaggcgtgtatctgcgcgtgtgaggtgctctgccgcaaccctatgcagagagcaggtaacctatgcatgtggcacaaaattcaaaaaatacaaaaggatgtacgttgaaaaggtctcactctgttacccaggctggagtgcagtggagtgattatagcttactgcagccttgaccttctgggctcaagagatcctcccaccatcacgaggtcaggagatcgagaccatcttggctaagaagagactgtgtctcactgtgttgcccaggctggcttcactcaagcgatcctctcgccgcagtccctggagtagctgggattacaggcacccgccaccactctcggccccatttctcttatttaaaaaaaaaaaaattgccgtgaaatacgcatatcgaaatgtaccatcttcaccatttttaagggtaagattaggtggtgttaggtatgttcagttgtcgtgcaaccagattgctgttttaaataacagcacttagagatgccgacttcgtgccaggcccagtttgggacattagggactcccagatgaatcagccgctccagtggaactccctgctggtgggggaggcactggcgaagcggtgctgagccgagtcctgacggcgctggagctgaggggcagtgcgggatgccccaggaaggctcctaggaagaggggacccacggtgacttcctaaggaagcgcggttcccagctcgactccgcgctctcctcgccggccgccgccgcccagcctgcgcccgccgtccccccagtgcctgggcacctgttggaggcagagccaggggtgctgcatgaggggccgcaggggcgatcgcatgaccatcaacatccaggagcacatggccatcaacgtgtgccccgggcccatccggcccatccgccagatctctgactacttcccccggggaccaggacctgaagggggcggcgggggcggcggggaggcccccgcccatctggtccccctggctctggccccccctgcagccctccttggggccaccacgcctgaggatggtgcggaggtggacagctatgactcggatgatgccaccgccctaggcacgctggagtttgaccttctctacgaccgggcctcctgcactctgcactgtagcatcctcagggccaagggcctcaagcccatggatttcaatggcctcgccgacccctacgtcaagctgcacttgctgcctggagcctgtaaggccaataagctaaaaacgaagactcagaggaacacactgaatcccgtgtggaatgaggacctgacttacagcgggatcacagatgacgacatcacgcacaaggtgctcaggatcgccgtctgtgatgaggacaagctgagtcacaatgagtttattggggagatccgcgtgcccctccgccgcctcaagccttcgcagaagaagcattttaacatctgcctcgagcgccaagtcccgctggcgtccccctcttccatgtcagcggcgctgaggggcatctcctgttatctgaaggagttggagcaggcggagcaggggcaggggctgctggaggagcgtggccgcatcctgctgagtctcagctacagctcgcggcgccggggactgctggtaggcatcttgcgctgcgcccatctggctgccatggacgtcaacggttactcggacccctacgtcaagacgtacctgaggcccgatgtggacaagaaatccaagcataagacgtgtgtgaagaagaagactctcaacccagaatttaacgaggagtttttctacgagatagagctctccactctggccaccaagaccctggaagtcaccgtctgggactatgacattggcaaatccaatgacttcattggtggcgtgtccctggggccaggtgcccgaggcgaggctcggaagcactggagtgactgcctgcagcagccggacgcagccctggagcgctggcacaccctgaccagtgagctgccccctgcggccggggctctgtcctcagcctgagtggacagcagtgtcccggcacaggcccatcgagccgggtccagtacccaaccttcgcacgagtgtgttgcacgtttacacagggtgggctgcccccaccctgcactacctatttttgtgagtctccgtgacccgggtctgtctgctcatgaggggctgcggagttctatattcacatatgcaaacctcctgcctgactcgctagtccctgcaaatatgcaaaccccccatcatctgcacacccgggcagtgctcagagcccggccccaggcccccgcgctcctcactcctgcctctccacgctgccccgtccctctcccccaacagggaggaggtcggattaggggaggttcagaggaggagaatgtctcaaaaaaaaaggacaaaaaacaaacccagagccactcctttaatacagaaacttcattgaaaaaacctagccctgtacagctgcccttttaaagaggtggccattgcagggtctctgcctccccagcaggtggcagatgctcccggccactcgtttaaataactgtcccctggagggggccggggtttgaaggcagggcccctgccaccctcctgggggacacccgtgcatgtttacgccttttctggttgtgtcagtggccggagcatggcagctgggcatcaataaacacctccgaggaaactggac

SEQ ID NO: 283966 - DNA, 2622 bp, Homo sapiens
ccctaggaaaggcgcagcggggcggactcccgggcctcctcccgcctcttccacaggttgcatccgcggctgcaggaaaacggatggctgggaatggccgtcgggggttggtcagaggaagtccctcggccctttccgaggcacatctcttggccatccacgcgtccttcgcagactccgctccctgcacctccgtttcctcttctgtggccggcggctcccccgtggccaccccatctcccatctctgccacctcccaacagccatttccactcctgcggccccatcccagctaaggagagcgcccttctgattggcaggtgggcctgtctgtcacgggcatgttccatcccacccaagcccaaggacactccagggtttccttagtttcacaacgaaggtgcgtgctcagcggactctgcagacccagtgccgcgacttcccctaaagccaggcgtgtatctgcgcgtgtgaggtgctctgccgcaaccctatgcagagagcaggtaacctatgcatgtggcacaaaattcaaaaaatacaaaaggatgtacgttgaaaagtagaggagcgcatgtgagccaagatccctaggcctgagccgtctaggtgtgtcccaggaactgcaggaaacggttggctcgactccgcgctctcctcgccggccgccgccgcccagcctgcgcccgccgtccccccagtgcctgggcacctgttggaggcagagccaggggtgctgcatgaggggccgcaggggcgatcgcatgaccatcaacatccaggagcacatggccatcaacgtgtgccccgggcccatccggcccatccgccagatctctgactacttcccccggggaccaggacctgaagggggcggcgggggcggcggggaggcccccgcccatctggtccccctggctctggccccccctgcagccctccttggggccaccacgcctgaggatggtgcggaggtggacagctatgactcggatgatgccaccgccctaggcacgctggagtttgaccttctctacgaccgggcctcctgcactctgcactgtagcatcctcagggccaagggcctcaagcccatggatttcaatggcctcgccgacccctacgtcaagctgcacttgctgcctggagcctgtaaggccaataagctaaaaacgaagactcagaggaacacactgaatcccgtgtggaatgaggacctgacttacagcgggatcacagatgacgacatcacgcacaaggtgctcaggatcgccgtctgtgatgaggacaagctgagtcacaatgagtttattggggagatccgcgtgcccctccgccgcctcaagccttcgcagaagaagcattttaacatctgcctcgagcgccaagtcccgctggcgtccccctcttccatgtcagcggcgctgaggggcatctcctgttatctgaaggagttggagcaggcggagcaggggcaggggctgctggaggagcgtggccgcatcctgctgagtctcagctacagctcgcggcgccggggactgctggtaggcatcttgcgctgcgcccatctggctgccatggacgtcaacggttactcggacccctacgtcaagacgtacctgaggcccgatgtggacaagaaatccaagcataagacgtgtgtgaagaagaagactctcaacccagaatttaacgaggagtttttctacgagatagagctctccactctggccaccaagaccctggaagtcaccgtctgggactatgacattggcaaatccaatgacttcattggtggcgtgtccctggggccaggtgcccgaggcgaggctcggaagcactggagtgactgcctgcagcagccggacgcagccctggagcgctggcacaccctgaccagtgagctgccccctgcggccggggctctgtcctcagcctgagtggacagcagtgtcccggcacaggcccatcgagccgggtccagtacccaaccttcgcacgagtgtgttgcacgtttacacagggtgggctgcccccaccctgcactacctatttttgtgagtctccgtgacccgggtctgtctgctcatgaggggctgcggagttctatattcacatatgcaaacctcctgcctgactcgctagtccctgcaaatatgcaaaccccccatcatctgcacacccgggcagtgctcagagcccggccccaggcccccgcgctcctcactcctgcctctccacgctgccccgtccctctcccccaacagggaggaggtcggattaggggaggttcagaggaggagaatgtctcaaaaaaaaaggacaaaaaacaaacccagagccactcctttaatacagaaacttcattgaaaaaacctagccctgtacagctgcccttttaaagaggtggccattgcagggtctctgcctccccagcaggtggcagatgctcccggccactcgtttaaataactgtcccctggagggggccggggtttgaaggcagggcccctgccaccctcctgggggacacccgtgcatgtttacgccttttctggttgtgtcagtggccggagcatggcagctgggcatcaataaacacctccgaggaaactggac

SEQ ID NO: 283967 - DNA, 2674 bp, Homo sapiens
ccctaggaaaggcgcagcggggcggactcccgggcctcctcccgcctcttccacaggttgcatccgcggctgcaggaaaacggatggctgggaatggccgtcgggggttggtcagaggaagtccctcggccctttccgaggcacatctcttggccatccacgcgtccttcgcagactccgctccctgcacctccgtttcctcttctgtggccggcggctcccccgtggccaccccatctcccatctctgccacctcccaacagccatttccactcctgcggccccatcccagctaaggagagcgcccttctgattggcaggtgggcctgtctgtcacgggcatgttccatcccacccaagcccaaggacactccagggtttccttagtttcacaacgaaggtgcgtgctcagcggactctgcagacccagtgccgcgacttcccctaaagccaggcgtgtatctgcgcgtgtgaggtgctctgccgcaaccctatgcagagagcaggtaacctatgcatgtggcacaaaattcaaaaaatacaaaaggatgtacgttgaaaaggtctcactctgttacccaggctggagtgcagtggagtgattatagcttactgcagccttgaccttctgggctcaagagatcctcccaccatcacgaggtcaggagatcgagaccatcttggctaagaagctcgactccgcgctctcctcgccggccgccgccgcccagcctgcgcccgccgtccccccagtgcctgggcacctgttggaggcagagccaggggtgctgcatgaggggccgcaggggcgatcgcatgaccatcaacatccaggagcacatggccatcaacgtgtgccccgggcccatccggcccatccgccagatctctgactacttcccccggggaccaggacctgaagggggcggcgggggcggcggggaggcccccgcccatctggtccccctggctctggccccccctgcagccctccttggggccaccacgcctgaggatggtgcggaggtggacagctatgactcggatgatgccaccgccctaggcacgctggagtttgaccttctctacgaccgggcctcctgcactctgcactgtagcatcctcagggccaagggcctcaagcccatggatttcaatggcctcgccgacccctacgtcaagctgcacttgctgcctggagcctgtaaggccaataagctaaaaacgaagactcagaggaacacactgaatcccgtgtggaatgaggacctgacttacagcgggatcacagatgacgacatcacgcacaaggtgctcaggatcgccgtctgtgatgaggacaagctgagtcacaatgagtttattggggagatccgcgtgcccctccgccgcctcaagccttcgcagaagaagcattttaacatctgcctcgagcgccaagtcccgctggcgtccccctcttccatgtcagcggcgctgaggggcatctcctgttatctgaaggagttggagcaggcggagcaggggcaggggctgctggaggagcgtggccgcatcctgctgagtctcagctacagctcgcggcgccggggactgctggtaggcatcttgcgctgcgcccatctggctgccatggacgtcaacggttactcggacccctacgtcaagacgtacctgaggcccgatgtggacaagaaatccaagcataagacgtgtgtgaagaagaagactctcaacccagaatttaacgaggagtttttctacgagatagagctctccactctggccaccaagaccctggaagtcaccgtctgggactatgacattggcaaatccaatgacttcattggtggcgtgtccctggggccaggtgcccgaggcgaggctcggaagcactggagtgactgcctgcagcagccggacgcagccctggagcgctggcacaccctgaccagtgagctgccccctgcggccggggctctgtcctcagcctgagtggacagcagtgtcccggcacaggcccatcgagccgggtccagtacccaaccttcgcacgagtgtgttgcacgtttacacagggtgggctgcccccaccctgcactacctatttttgtgagtctccgtgacccgggtctgtctgctcatgaggggctgcggagttctatattcacatatgcaaacctcctgcctgactcgctagtccctgcaaatatgcaaaccccccatcatctgcacacccgggcagtgctcagagcccggccccaggcccccgcgctcctcactcctgcctctccacgctgccccgtccctctcccccaacagggaggaggtcggattaggggaggttcagaggaggagaatgtctcaaaaaaaaaggacaaaaaacaaacccagagccactcctttaatacagaaacttcattgaaaaaacctagccctgtacagctgcccttttaaagaggtggccattgcagggtctctgcctccccagcaggtggcagatgctcccggccactcgtttaaataactgtcccctggagggggccggggtttgaaggcagggcccctgccaccctcctgggggacacccgtgcatgtttacgccttttctggttgtgtcagtggccggagcatggcagctgggcatcaataaacacctccgaggaaactggac

SEQ ID NO: 283968 - DNA, 2034 bp, Homo sapiens
tgagtcagtggtgggcagcgagggtgataagccccttcgtgtcttcgggatgctcgactccgcgctctcctcgccggccgccgccgcccagcctgcgcccgccgtccccccagtgcctgggcacctgttggaggcagagccaggggtgctgcatgaggggccgcaggggcgatcgcatgaccatcaacatccaggagcacatggccatcaacgtgtgccccgggcccatccggcccatccgccagatctctgactacttcccccggggaccaggacctgaagggggcggcgggggcggcggggaggcccccgcccatctggtccccctggctctggccccccctgcagccctccttggggccaccacgcctgaggatggtgcggaggtggacagctatgactcggatgatgccaccgccctaggcacgctggagtttgaccttctctacgaccgggcctcctgcactctgcactgtagcatcctcagggccaagggcctcaagcccatggatttcaatggcctcgccgacccctacgtcaagctgcacttgctgcctggagcctgtaaggccaataagctaaaaacgaagactcagaggaacacactgaatcccgtgtggaatgaggacctgacttacagcgggatcacagatgacgacatcacgcacaaggtgctcaggatcgccgtctgtgatgaggacaagctgagtcacaatgagtttattggggagatccgcgtgcccctccgccgcctcaagccttcgcagaagaagcattttaacatctgcctcgagcgccaagtcccgctggcgtccccctcttccatgtcagcggcgctgaggggcatctcctgttatctgaaggagttggagcaggcggagcaggggcaggggctgctggaggagcgtggccgcatcctgctgagtctcagctacagctcgcggcgccggggactgctggtaggcatcttgcgctgcgcccatctggctgccatggacgtcaacggttactcggacccctacgtcaagacgtacctgaggcccgatgtggacaagaaatccaagcataagacgtgtgtgaagaagaagactctcaacccagaatttaacgaggagtttttctacgagatagagctctccactctggccaccaagaccctggaagtcaccgtctgggactatgacattggcaaatccaatgacttcattggtggcgtgtccctggggccaggtgcccgaggcgaggctcggaagcactggagtgactgcctgcagcagccggacgcagccctggagcgctggcacaccctgaccagtgagctgccccctgcggccggggctctgtcctcagcctgagtggacagcagtgtcccggcacaggcccatcgagccgggtccagtacccaaccttcgcacgagtgtgttgcacgtttacacagggtgggctgcccccaccctgcactacctatttttgtgagtctccgtgacccgggtctgtctgctcatgaggggctgcggagttctatattcacatatgcaaacctcctgcctgactcgctagtccctgcaaatatgcaaaccccccatcatctgcacacccgggcagtgctcagagcccggccccaggcccccgcgctcctcactcctgcctctccacgctgccccgtccctctcccccaacagggaggaggtcggattaggggaggttcagaggaggagaatgtctcaaaaaaaaaggacaaaaaacaaacccagagccactcctttaatacagaaacttcattgaaaaaacctagccctgtacagctgcccttttaaagaggtggccattgcagggtctctgcctccccagcaggtggcagatgctcccggccactcgtttaaataactgtcccctggagggggccggggtttgaaggcagggcccctgccaccctcctgggggacacccgtgcatgtttacgccttttctggttgtgtcagtggccggagcatggcagctgggcatcaataaacacctccgaggaaactggac

SEQ ID NO: 283969 - DNA, 2077 bp, Homo sapiens
ctcctccctcagatcgtgaggctccccagcctggctcgggagaccccgagatccccggccggtgacagcaggcgaccccctgctcctgtcaacctctcgactccgcgctctcctcgccggccgccgccgcccagcctgcgcccgccgtccccccagtgcctgggcacctgttggaggcagagccaggggtgctgcatgaggggccgcaggggcgatcgcatgaccatcaacatccaggagcacatggccatcaacgtgtgccccgggcccatccggcccatccgccagatctctgactacttcccccggggaccaggacctgaagggggcggcgggggcggcggggaggcccccgcccatctggtccccctggctctggccccccctgcagccctccttggggccaccacgcctgaggatggtgcggaggtggacagctatgactcggatgatgccaccgccctaggcacgctggagtttgaccttctctacgaccgggcctcctgcactctgcactgtagcatcctcagggccaagggcctcaagcccatggatttcaatggcctcgccgacccctacgtcaagctgcacttgctgcctggagcctgtaaggccaataagctaaaaacgaagactcagaggaacacactgaatcccgtgtggaatgaggacctgacttacagcgggatcacagatgacgacatcacgcacaaggtgctcaggatcgccgtctgtgatgaggacaagctgagtcacaatgagtttattggggagatccgcgtgcccctccgccgcctcaagccttcgcagaagaagcattttaacatctgcctcgagcgccaagtcccgctggcgtccccctcttccatgtcagcggcgctgaggggcatctcctgttatctgaaggagttggagcaggcggagcaggggcaggggctgctggaggagcgtggccgcatcctgctgagtctcagctacagctcgcggcgccggggactgctggtaggcatcttgcgctgcgcccatctggctgccatggacgtcaacggttactcggacccctacgtcaagacgtacctgaggcccgatgtggacaagaaatccaagcataagacgtgtgtgaagaagaagactctcaacccagaatttaacgaggagtttttctacgagatagagctctccactctggccaccaagaccctggaagtcaccgtctgggactatgacattggcaaatccaatgacttcattggtggcgtgtccctggggccaggtgcccgaggcgaggctcggaagcactggagtgactgcctgcagcagccggacgcagccctggagcgctggcacaccctgaccagtgagctgccccctgcggccggggctctgtcctcagcctgagtggacagcagtgtcccggcacaggcccatcgagccgggtccagtacccaaccttcgcacgagtgtgttgcacgtttacacagggtgggctgcccccaccctgcactacctatttttgtgagtctccgtgacccgggtctgtctgctcatgaggggctgcggagttctatattcacatatgcaaacctcctgcctgactcgctagtccctgcaaatatgcaaaccccccatcatctgcacacccgggcagtgctcagagcccggccccaggcccccgcgctcctcactcctgcctctccacgctgccccgtccctctcccccaacagggaggaggtcggattaggggaggttcagaggaggagaatgtctcaaaaaaaaaggacaaaaaacaaacccagagccactcctttaatacagaaacttcattgaaaaaacctagccctgtacagctgcccttttaaagaggtggccattgcagggtctctgcctccccagcaggtggcagatgctcccggccactcgtttaaataactgtcccctggagggggccggggtttgaaggcagggcccctgccaccctcctgggggacacccgtgcatgtttacgccttttctggttgtgtcagtggccggagcatggcagctgggcatcaataaacacctccgaggaaactggac

SEQ ID NO: 283970 - DNA, 210 bp, Homo sapiens
tggcctttggtacggtccggaatttttagggatcctcgactccgcgctctcctcgccggccgccgccgcccagcctgcgcccgccgtccccccagtgcctgggcacctgttggaggcagaggcaggtgcagggggctgggcaggccgggggcgtgagggtgcggggaagcgtgccagcctgtgtgcgctacgggggtgttcggctctcct

SEQ ID NO: 283971 - DNA, 2931 bp, Homo sapiens
ccctaggaaaggcgcagcggggcggactcccgggcctcctcccgcctcttccacaggttgcatccgcggctgcaggaaaacggatggctgggaatggccgtcgggggttggtcagaggaagtccctcggccctttccgaggcacatctcttggccatccacgcgtccttcgcagactccgctccctgcacctccgtttcctcttctgtggccggcggctcccccgtggccaccccatctcccatctctgccacctcccaacagccatttccactcctgcggccccatcccagctaaggagagcgcccttctgattggcaggtgggcctgtctgtcacgggcatgttccatcccacccaagcccaaggacactccagggtttccttagtttcacaacgaaggtgcgtgctcagcggactctgcagacccagtgccgcgacttcccctaaagccaggcgtgtatctgcgcgtgtgaggtgctctgccgcaaccctatgcagagagcaggtaacctatgcatgtggcacaaaattcaaaaaatacaaaaggatgtacgttgaaaaggtctcactctgttacccaggctggagtgcagtggagtgattatagcttactgcagccttgaccttctgggctcaagagatcctcccaccatcacgaggtcaggagatcgagaccatcttggctaagaagagactgtgtctcactgtgttgcccaggctggcttcactcaagcgatcctctcgccgcagtccctggagtagctgggattacaggcacccgccaccactctcggccccatttctcttatttaaaaaaaaaaaaattgccgtgaaatacgcatatcgaaatgtaccatcttcaccatttttaagggtaagattaggtggtgttaggtatgttcagttgtcgtgcaaccagattgctgttttaaataacagcacttagagatgccgacttcgtgccaggcccagtttgggacattagggactcccagatgaatcagccgctccagtggaactccctgctggtgggggaggcactggcgaagcggtgctgagccgagtcctgacggcgctggagctgaggggcagtgcgggatgccccaggaaggctcctaggaagaggggacccacggtgacttcctaaggaagcgcggttcccagccaggggtgctgcatgaggggccgcaggggcgatcgcatgaccatcaacatccaggagcacatggccatcaacgtgtgccccgggcccatccggcccatccgccagatctctgactacttcccccggggaccaggacctgaagggggcggcgggggcggcggggaggcccccgcccatctggtccccctggctctggccccccctgcagccctccttggggccaccacgcctgaggatggtgcggaggtggacagctatgactcggatgatgccaccgccctaggcacgctggagtttgaccttctctacgaccgggcctcctgcactctgcactgtagcatcctcagggccaagggcctcaagcccatggatttcaatggcctcgccgacccctacgtcaagctgcacttgctgcctggagcctgtaaggccaataagctaaaaacgaagactcagaggaacacactgaatcccgtgtggaatgaggacctgacttacagcgggatcacagatgacgacatcacgcacaaggtgctcaggatcgccgtctgtgatgaggacaagctgagtcacaatgagtttattggggagatccgcgtgcccctccgccgcctcaagccttcgcagaagaagcattttaacatctgcctcgagcgccaagtcccgctggcgtccccctcttccatgtcagcggcgctgaggggcatctcctgttatctgaaggagttggagcaggcggagcaggggcaggggctgctggaggagcgtggccgcatcctgctgagtctcagctacagctcgcggcgccggggactgctggtaggcatcttgcgctgcgcccatctggctgccatggacgtcaacggttactcggacccctacgtcaagacgtacctgaggcccgatgtggacaagaaatccaagcataagacgtgtgtgaagaagaagactctcaacccagaatttaacgaggagtttttctacgagatagagctctccactctggccaccaagaccctggaagtcaccgtctgggactatgacattggcaaatccaatgacttcattggtggcgtgtccctggggccaggtgcccgaggcgaggctcggaagcactggagtgactgcctgcagcagccggacgcagccctggagcgctggcacaccctgaccagtgagctgccccctgcggccggggctctgtcctcagcctgagtggacagcagtgtcccggcacaggcccatcgagccgggtccagtacccaaccttcgcacgagtgtgttgcacgtttacacagggtgggctgcccccaccctgcactacctatttttgtgagtctccgtgacccgggtctgtctgctcatgaggggctgcggagttctatattcacatatgcaaacctcctgcctgactcgctagtccctgcaaatatgcaaaccccccatcatctgcacacccgggcagtgctcagagcccggccccaggcccccgcgctcctcactcctgcctctccacgctgccccgtccctctcccccaacagggaggaggtcggattaggggaggttcagaggaggagaatgtctcaaaaaaaaaggacaaaaaaaaaagagaaaaagaaaaaaaaccccgggggcttatatttgggggggggaaaaaaggggtttgacaatgggccttgtcccttgtttttcctgcccctttttgttcacgggggaaaacccggcgcccccaaagggggcgataaataaaagccgggaccggta

SEQ ID NO: 283972 - DNA, 3225 bp, Homo sapiens
ccctaggaaaggcgcagcggggcggactcccgggcctcctcccgcctcttccacaggttgcatccgcggctgcaggaaaacggatggctgggaatggccgtcgggggttggtcagaggaagtccctcggccctttccgaggcacatctcttggccatccacgcgtccttcgcagactccgctccctgcacctccgtttcctcttctgtggccggcggctcccccgtggccaccccatctcccatctctgccacctcccaacagccatttccactcctgcggccccatcccagctaaggagagcgcccttctgattggcaggtgggcctgtctgtcacgggcatgttccatcccacccaagcccaaggacactccagggtttccttagtttcacaacgaaggtgcgtgctcagcggactctgcagacccagtgccgcgacttcccctaaagccaggcgtgtatctgcgcgtgtgaggtgctctgccgcaaccctatgcagagagcaggtaacctatgcatgtggcacaaaattcaaaaaatacaaaaggatgtacgttgaaaaggtctcactctgttacccaggctggagtgcagtggagtgattatagcttactgcagccttgaccttctgggctcaagagatcctcccaccatcacgaggtcaggagatcgagaccatcttggctaagaagagactgtgtctcactgtgttgcccaggctggcttcactcaagcgatcctctcgccgcagtccctggagtagctgggattacaggcacccgccaccactctcggccccatttctcttatttaaaaaaaaaaaaattgccgtgaaatacgcatatcgaaatgtaccatcttcaccatttttaagggtaagattaggtggtgttaggtatgttcagttgtcgtgcaaccagattgctgttttaaataacagcacttagagatgccgacttcgtgccaggcccagtttgggacattagggactcccagatgaatcagccgctccagtggaactccctgctggtgggggaggcactggcgaagcggtgctgagccgagtcctgacggcgctggagctgaggggcagtgcgggatgccccaggaaggctcctaggaagaggggacccacggtgacttcctaaggaagcgcggttcccaggtagaggagcgcatgtgagccaagatccctaggcctgagccgtctaggtgtgtcccaggaactgcaggaaacggttggctcgactccgcgctctcctcgccggccgccgccgcccagcctgcgcccgccgtccccccagtgcctgggcacctgttggaggcagagccaggggtgctgcatgaggggccgcaggggcgatcgcatgaccatcaacatccaggagcacatggccatcaacgtgtgccccgggcccatccggcccatccgccagatctctgactacttcccccggggaccaggacctgaagggggcggcgggggcggcggggaggcccccgcccatctggtccccctggctctggccccccctgcagccctccttggggccaccacgcctgaggatggtgcggaggtggacagctatgactcggatgatgccaccgccctaggcacgctggagtttgaccttctctacgaccgggcctcctgcactctgcactgtagcatcctcagggccaagggcctcaagcccatggatttcaatggcctcgccgacccctacgtcaagctgcacttgctgcctggagcctgtaaggccaataagctaaaaacgaagactcagaggaacacactgaatcccgtgtggaatgaggacctgacttacagcgggatcacagatgacgacatcacgcacaaggtgctcaggatcgccgtctgtgatgaggacaagctgagtcacaatgagtttattggggagatccgcgtgcccctccgccgcctcaagccttcgcagaagaagcattttaacatctgcctcgagcgccaagtcccgctggcgtccccctcttccatgtcagcggcgctgaggggcatctcctgttatctgaaggagttggagcaggcggagcaggggcaggggctgctggaggagcgtggccgcatcctgctgagtctcagctacagctcgcggcgccggggactgctggtaggcatcttgcgctgcgcccatctggctgccatggacgtcaacggttactcggacccctacgtcaagacgtacctgaggcccgatgtggacaagaaatccaagcataagacgtgtgtgaagaagaagactctcaacccagaatttaacgaggagtttttctacgagatagagctctccactctggccaccaagaccctggaagtcaccgtctgggactatgacattggcaaatccaatgacttcattggtggcgtgtccctggggccaggtgcccgaggcgaggctcggaagcactggagtgactgcctgcagcagccggacgcagccctggagcgctggcacaccctgaccagtgagctgccccctgcggccggggctctgtcctcagcctgagtggacagcagtgtcccggcacaggcccatcgagccgggtccagtacccaaccttcgcacgagtgtgttgcacgtttacacagggtgggctgcccccaccctgcactacctatttttgtgagtctccgtgacccgggtctgtctgctcatgaggggctgcggagttctatattcacatatgcaaacctcctgcctgactcgctagtccctgcaaatatgcaaaccccccatcatctgcacacccgggcagtgctcagagcccggccccaggcccccgcgctcctcactcctgcctctccacgctgccccgtccctctcccccaacagggaggaggtcggattaggggaggttcagaggaggagaatgtctcaaaaaaaaaggacaaaaaacaaacccagagccactcctttaatacagaaacttcattgaaaaaacctagccctgtacagctgcccttttaaagaggtggccattgcagggtctctgcctccccagcaggtggcagatgctcccggccactcgtttaaataactgtcccctggagggggccggggtttgaaggcagggcccctgccaccctcctgggggacacccgtgcatgtttacgccttttctggttgtgtcagtggccggagcatggcagctgggcatcaataaacacctccgaggaaactggac

SEQ ID NO: 283973 - DNA, 2026 bp, Homo sapiens
tccccgcactttctcggcgctccctccctctcggctcgcacagcctcgactccgcgctctcctcgccggccgccgccgcccagcctgcgcccgccgtccccccagtgcctgggcacctgttggaggcagagccaggggtgctgcatgaggggccgcaggggcgatcgcatgaccatcaacatccaggagcacatggccatcaacgtgtgccccgggcccatccggcccatccgccagatctctgactacttcccccggggaccaggacctgaagggggcggcgggggcggcggggaggcccccgcccatctggtccccctggctctggccccccctgcagccctccttggggccaccacgcctgaggatggtgcggaggtggacagctatgactcggatgatgccaccgccctaggcacgctggagtttgaccttctctacgaccgggcctcctgcactctgcactgtagcatcctcagggccaagggcctcaagcccatggatttcaatggcctcgccgacccctacgtcaagctgcacttgctgcctggagcctgtaaggccaataagctaaaaacgaagactcagaggaacacactgaatcccgtgtggaatgaggacctgacttacagcgggatcacagatgacgacatcacgcacaaggtgctcaggatcgccgtctgtgatgaggacaagctgagtcacaatgagtttattggggagatccgcgtgcccctccgccgcctcaagccttcgcagaagaagcattttaacatctgcctcgagcgccaagtcccgctggcgtccccctcttccatgtcagcggcgctgaggggcatctcctgttatctgaaggagttggagcaggcggagcaggggcaggggctgctggaggagcgtggccgcatcctgctgagtctcagctacagctcgcggcgccggggactgctggtaggcatcttgcgctgcgcccatctggctgccatggacgtcaacggttactcggacccctacgtcaagacgtacctgaggcccgatgtggacaagaaatccaagcataagacgtgtgtgaagaagaagactctcaacccagaatttaacgaggagtttttctacgagatagagctctccactctggccaccaagaccctggaagtcaccgtctgggactatgacattggcaaatccaatgacttcattggtggcgtgtccctggggccaggtgcccgaggcgaggctcggaagcactggagtgactgcctgcagcagccggacgcagccctggagcgctggcacaccctgaccagtgagctgccccctgcggccggggctctgtcctcagcctgagtggacagcagtgtcccggcacaggcccatcgagccgggtccagtacccaaccttcgcacgagtgtgttgcacgtttacacagggtgggctgcccccaccctgcactacctatttttgtgagtctccgtgacccgggtctgtctgctcatgaggggctgcggagttctatattcacatatgcaaacctcctgcctgactcgctagtccctgcaaatatgcaaaccccccatcatctgcacacccgggcagtgctcagagcccggccccaggcccccgcgctcctcactcctgcctctccacgctgccccgtccctctcccccaacagggaggaggtcggattaggggaggttcagaggaggagaatgtctcaaaaaaaaaggacaaaaaacaaacccagagccactcctttaatacagaaacttcattgaaaaaacctagccctgtacagctgcccttttaaagaggtggccattgcagggtctctgcctccccagcaggtggcagatgctcccggccactcgtttaaataactgtcccctggagggggccggggtttgaaggcagggcccctgccaccctcctgggggacacccgtgcatgtttacgccttttctggttgtgtcagtggccggagcatggcagctgggcatcaataaacacctccgaggaaactggac

SEQ ID NO: 283974 - DNA, 3006 bp, Homo sapiens
ccctaggaaaggcgcagcggggcggactcccgggcctcctcccgcctcttccacaggttgcatccgcggctgcaggaaaacggatggctgggaatggccgtcgggggttggtcagaggaagtccctcggccctttccgaggcacatctcttggccatccacgcgtccttcgcagactccgctccctgcacctccgtttcctcttctgtggccggcggctcccccgtggccaccccatctcccatctctgccacctcccaacagccatttccactcctgcggccccatcccagctaaggagagcgcccttctgattggcaggtgggcctgtctgtcacgggcatgttccatcccacccaagcccaaggacactccagggtttccttagtttcacaacgaaggtgcgtgctcagcggactctgcagacccagtgccgcgacttcccctaaagccaggcgtgtatctgcgcgtgtgaggtgctctgccgcaaccctatgcagagagcaggtaacctatgcatgtggcacaaaattcaaaaaatacaaaaggatgtacgttgaaaaggtctcactctgttacccaggctggagtgcagtggagtgattatagcttactgcagccttgaccttctgggctcaagagatcctcccaccatcacgaggtcaggagatcgagaccatcttggctaagaagagactgtgtctcactgtgttgcccaggctggcttcactcaagcgatcctctcgccgcagtccctggagtagctgggattacaggcacccgccaccactctcggccccatttctcttatttaaaaaaaaaaaaattgccgtgaaatacgcatatcgaaatgtaccatcttcaccatttttaagggtaagattaggtggtgttaggtatgttcagttgtcgtgcaaccagattgctgttttaaataacagcacttagagatgccgacttcgtgccaggcccagtttgggacattagggactcccagatgaatcagccgctccagtggaactccctgctggtgggggaggcactggcgaagcggtgctgagccgagtcctgacggcgctggagctgaggggcagtgcgggatgccccaggaaggctcctaggaagaggggacccacggtgacttcctaaggaagcgcggttcccagctcgactccgcgctctcctcgccggccgccgccgcccagcctgcgcccgccgtccccccagtgcctgggcacctgttggaggcagaggaagggaggccagtgagggccccacagaccgaggaggccgtcgcctggccctcagccaggatggctagccctccttggggccaccacgcctgaggatggtgcggaggtggacagctatgactcggatgatgccaccgccctaggcacgctggagtttgaccttctctacgaccgggcctcctgcactctgcactgtagcatcctcagggccaagggcctcaagcccatggatttcaatggcctcgccgacccctacgtcaagctgcacttgctgcctggagcctgtaaggccaataagctaaaaacgaagactcagaggaacacactgaatcccgtgtggaatgaggacctgacttacagcgggatcacagatgacgacatcacgcacaaggtgctcaggatcgccgtctgtgatgaggacaagctgagtcacaatgagtttattggggagatccgcgtgcccctccgccgcctcaagccttcgcagaagaagcattttaacatctgcctcgagcgccaagtcccgctggcgtccccctcttccatgtcagcggcgctgaggggcatctcctgttatctgaaggagttggagcaggcggagcaggggcaggggctgctggaggagcgtggccgcatcctgctgagtctcagctacagctcgcggcgccggggactgctggtaggcatcttgcgctgcgcccatctggctgccatggacgtcaacggttactcggacccctacgtcaagacgtacctgaggcccgatgtggacaagaaatccaagcataagacgtgtgtgaagaagaagactctcaacccagaatttaacgaggagtttttctacgagatagagctctccactctggccaccaagaccctggaagtcaccgtctgggactatgacattggcaaatccaatgacttcattggtggcgtgtccctggggccaggtgcccgaggcgaggctcggaagcactggagtgactgcctgcagcagccggacgcagccctggagcgctggcacaccctgaccagtgagctgccccctgcggccggggctctgtcctcagcctgagtggacagcagtgtcccggcacaggcccatcgagccgggtccagtacccaaccttcgcacgagtgtgttgcacgtttacacagggtgggctgcccccaccctgcactacctatttttgtgagtctccgtgacccgggtctgtctgctcatgaggggctgcggagttctatattcacatatgcaaacctcctgcctgactcgctagtccctgcaaatatgcaaaccccccatcatctgcacacccgggcagtgctcagagcccggccccaggcccccgcgctcctcactcctgcctctccacgctgccccgtccctctcccccaacagggaggaggtcggattaggggaggttcagaggaggagaatgtctcaaaaaaaaaggacaaaaaacaaacccagagccactcctttaatacagaaacttcattgaaaaaacctagccctgtacagctgcccttttaaagaggtggccattgcagggtctctgcctccccagcaggtggcagatgctcccggccactcgtttaaataactgtcccctggagggggccggggtttgaaggcagggcccctgccaccctcctgggggacacccgtgcatgtttacgccttttctggttgtgtcagtggccggagcatggcagctgggcatcaataaacacctccgaggaaactggac

SEQ ID NO: 283975 - DNA, 555 bp, Homo sapiens
ttttaagagacagggtcttgccatcttgctcaggctggtcttgaactcctggcctcgtgatcctcctacctcagcctccggaatagctgggattacaggcataagctacagtgccagctctttattcctttagatggtttggatacaggatataacgaagatccaagtaacagaacaatcaccatacctgattgatttcatcaactactctgaatggacatctatttagctcctgaagtgccatcaagtataacatggtagaaacacttctttcacctccactttgatgatgaggagttaattcatgcagttgagtactacttcgaaatttgactctaattcgaattccatatttatcataatcttcctataaaacatttaaaaagtgatgaaaaatgagtttcctctggtaatgtcattctattatttgaaaatggattgaattaactgagtaagagtaaagaactcaaaatttagtgacactagtttaaatatgtaacaataaatatatatgtatttttaaaaataataaatattaagcaaacagttactatc

SEQ ID NO: 283976 - DNA, 155 bp, Homo sapiens
ctgctgcgccatcttggcggggggaggggtgggggtgcagcacccacgtgtggagacgtgggtcgtccatctctccgggggtcgtttccaggagctgcagccctccagcctggggtctggccaggattaaccctgcttcctcccacccccgcagc

SEQ ID NO: 283977 - DNA, 520 bp, Homo sapiens
agatggcattggcaggaagtgctctcattccagccactcgttgcatatactggttggtcagtgatatctgtagatcaaccactgcacacacagacattataaagataacccatcctctggcatactgaatgacacaaaggacaaaaattattttggcttgtaatagccaagacttattgtctcttcttctccccatatggctttgatttgtccaggttcttgatgaagacgtttcccacaccagattttctcaaagagggatccctctgagaccacatgatgcggattggctttcccttaatcacatcaaagttcatggtgtccaaagcccgctcagctgtaagagagaaacacatttcaataaggagagaaaacgtcagctcccacaggccaacagcctaagaacagattactccaggacttttcaagtgaggtattgcatcaaagttatcaagtcatttagtctgcaatccacctatggagacaagtgacaaaacctgtaaagcaaatgatctggaaa

SEQ ID NO: 283978 - DNA, 531 bp, Homo sapiens
agaaaaaggcaggactatcctgtgaggaccagccccagggctcctggcttagaccagggctattcctaccacatcacactgccttcatgaagaaacctgatggccatgtttttaaaatgttcatttctgtgcaactatgtaaatgcatagaaaaggtctggaaggatacaaaccaaactgttaacagtggttaatcctagatatgagattgttggagtgaaggggcaccctttgctttttaaatttatttattttggtctgttatacttaaaagaaaatttatccatgcactgacatttttgtatttctttttagtgatatctgtagatcaaccactgcacacacagacattataaagataacccatcctctggcatactgaatgacacaaaggacaaaaattattttggcttgtaatagccaagacttattgtctcttcttctccccatatggctttggtaagttccccctctctgcattctacagtaacaaccacatcaaagcaacaaggtctgttatgaagtttttct

SEQ ID NO: 283979 - DNA, 1847 bp, Homo sapiens
ttgtataaagcactctaatttttattttaatttaatgttggtctcaacccacaaaattgcttttataacccatgagtgaattgtgcctgcagtttggaaacactgccctggaaagggatctgcctgctcttctccagccccacttcccagaagaaaaaccaaaatgagagcccctgcgtcctggtgaaggtcagtggcgggcaggccaagcagggcctccagagctgctcgagggcctccaagggaggtgagctgcagagggacccaggagggtggaaggatgctggctggaagtcacagagggccaggttcaaatcctgcctccgcttttgattggctcccagaccttggatctatctgtgaattaacctttgagcctcggactcctcgtgcgttagcctgggtataatagtctctctctcgcagtgttgccgtatggattcagggtgatttaatgacctcaacagagctctggaacatttgcgtagctggcagggcaaggcgagggacagcccaacgaaggcaggtccttgaagtcctggttaacactggtttccaaaattcgagccggcctgcggtttttccagcacgcctgaaagctggggacactcatgcaccagtgttggaggctgtagcctttgaccaggcatgggaccaggaggtgaggccggctctcaggcatcaaccaaaggatccactgaatctcccttctccccctgccaacaaaggtacaagtagatgttgacaccccctcagacatggaaggagacccatttttttctttttctagttctggataaatggccttaaacaaaatatgcaaacaggctccttgcgtctcccaaaggcagcccaccacagaagccctgccacagcccaaggggttagatgctgccaggatctgtttccgccacagagcagctctgtgcagcacgttcctgccaaccaccctgagtgcttcagggcttccgaggccgtgacagtgagggcagcggcacttctgggtcaccgtgggacaggtctctgcctcaggacacggattgacaagctctctgagtgggccaggagctccttaatgtgagccaagcccagccctgccaccttggccccgttcacctcgaggatctcatcgcccacccccagcagccctgagtacagcttggccatgctcatgtcagccatctcctgcacgtagatccctgcagaggaaaacaggagaatttcacaatgacacccaaatcgaagaagtgcatctctggaatgctgaccatgttgatgaggtgctgtttgtgtggcacagggaggaggtgctcataccaggcacttctctgtgcgcatgcacacatacacacacccctcattattccatctcacaaccacaactggctttagacatagatacagtgcgcctcctccatggtctaactccattccactgtctctgcttttaaagtggaaatgctcctagtgcaaataacgcgttaaactgttgtcatttatttatacctgacagtgagtgagctaatctttttctgagatgagcttttcttgtagaattgggaggaaaatagtttttaaaaattaggaaccatacctactcagtgcctggcactatgatccagttgctgcctcaggtcacccaggcccagcgtaaaggccggggtggtgggaaggtatcatcggaagagcaaaagtggctgagccacatccaagcctggtttgctgcactctattgccaaagactgacactggcctcagtcttactcagatatggctcctcaattgggatggggaagcatctgagcaaaaaaccccaggaaaaataaaaattctagccacatatttca

SEQ ID NO: 283980 - DNA, 1923 bp, Homo sapiens
tgagagaagctttagctttgctttttagtaagttaagactgacacatggccatccactcccaaagagtcccagccctccaggcagcactgaggcccaggcagatggcccagccgcgctctgcagcttccctgctgcccacccacccacctgcccaccgacagcaccgccaggaggtctgggcagaaagcatgcagctgtgatggccaggcacctgccgcagccctgtctccaagctggacagaactaagatggaggctgccacaggtcaggttgcagcaactcttgcctccacctgggcagaggcagcggccggggtggcatggggctggtctggccggtcccactagctggatcctggctaccacagtagcacgtcctgaaattggtctttgttgttgttgttgttgttttcaactttatgtataaaaaaattttcctagaaatttttaatattctggctaccagataacatctcccagaattcccacaccccgaaggggcataaaactcctgccagaccacacgttctgattttggtttggcatatatggtcaatggctgtaaggctggtactccgggacactttgcccatttctggataaagggcaagggcagtgaatggagtagggaggaacgtggctgaaatagggaagggtcaaggccaatatggacatgtgctttctttggttccacagtgttggaggctgtagcctttgaccaggcatgggaccaggaggtgaggccggctctcaggcatcaaccaaaggatccactgaatctcccttctccccctgccaacaaaggtacaagtagatgttgacaccccctcagacatggaaggagacccatttttttctttttctagttctggataaatggccttaaacaaaatatgcaaacaggctccttgcgtctcccaaaggcagcccaccacagaagccctgccacagcccaaggggttagatgctgccaggatctgtttccgccacagagcagctctgtgcagcacgttcctgccaaccaccctgagtgcttcagggcttccgaggccgtgacagtgagggcagcggcacttctgggtcaccgtgggacaggtctctgcctcaggacacggattgacaagctctctgagtgggccaggagctccttaatgtgagccaagcccagccctgccaccttggccccgttcacctcgaggatctcatcgcccacccccagcagccctgagtacagcttggccatgctcatgtcagccatctcctgcacgtagatccctgcagaggaaaacaggagaatttcacaatgacacccaaatcgaagaagtgcatctctggaatgctgaccatgttgatgaggtgctgtttgtgtggcacagggaggaggtgctcataccaggcacttctctgtgcgcatgcacacatacacacacccctcattattccatctcacaaccacaactggctttagacatagatacagtgcgcctcctccatggtctaactccattccactgtctctgcttttaaagtggaaatgctcctagtgcaaataacgcgttaaactgttgtcatttatttatacctgacagtgagtgagctaatctttttctgagatgagcttttcttgtagaattgggaggaaaatagtttttaaaaattaggaaccatacctactcagtgcctggcactatgatccagttgctgcctcaggtcacccaggcccagcgtaaaggccggggtggtgggaaggtatcatcggaagagcaaaagtggctgagccacatccaagcctggtttgctgcactctattgccaaagactgacactggcctcagtcttactcagatatggctcctcaattgggatggggaagcatctgagcaaaaaaccccaggaaaaataaaaattctagccacatatttca

SEQ ID NO: 283981 - DNA, 1506 bp, Homo sapiens
acgcagagagacctgggaggggacagaggcagggcttgcgacggaagtggcctctctgcttctgcagggctggggaagatgctgcgtccagcgttaccgtggctgtaccttggcctctgcagcctcctggtgggggaggcagaggccccgagccccgtggatccgctggagcggagccggccgtacgcggtgctgcgagggcagaacctggtgttgatgggaaccattttcagcatcctgctggtgactgtcatccttatggcattttgtgtctacaagcccattcggcgtcggtgacagccagacaagttcttcaatgagtatttgggaataggataagttgtgttgcacacaggccagtggagaagttggaaccaaaactttcctacttggaaatgacctttggtctggacagttggtaaatgctaaatgaattagaagaaaacatgtactagacattattttttcctaacactgtagcgcaaataattggcccctgagtccgcttctcagtgtttctgactgtacttgttaaaagtaagacctgaaagctccaaaggtcagtgtaaagatggagtgttcatgagaaagaaaacatggtaaccttgtgagtgcctgtaagaaccacactgtaaagaactcatcattaatgcttgaaaatgttattaagaaggagacttaccatgcagacattccctatttaagaaccatttggttacagtgggttaagaatcacagatttttttttttaatctcacctgagttagcctagaatgcgctggttgcaaagtggtgtcagctgtggggatcttgggccctcgttcctcacctgcatcctgccctgcactcaggtgctccccctgaagtcagggtcacatcaggtagacctgttactatatgcacctttggcctggaatgctctgaagttggactggaaatgttactaggttggcctgttacaaaaaggaccccatcctgcttaaacacattgatctcccttgccctgcatttgagtctttctagcccacggtctgaaacttgaggcagctttccagatttggaatgtaaaaggctcagtgggcactctgttcatccctgggtggggagggcccagccaacagaagtgcatgtccactgtgcgggccagtgtgtgtttacacaaatttcatctcagctttgaaaatgctgctattagtttccactgttggtgaactggattttttcctcctattgaaatgatactttcatacttataaagctgtcgtcaatatttatttcaaggtgctagatttaattttgttattaaattgaaatgcttatcttgtgttcaagcacagcactgattttaacaacctgcatttaatgtgaagtaaccgaagtaggatactgtaactgtgtaaggattttgtttgtaatcttgtaacattgaaccattgaaatgttcagttctttgcttttgagcaaaacgtcaattaaaactaaagtaaaatcctatatattgtttta

SEQ ID NO: 283982 - DNA, 989 bp, Homo sapiens
acgcagagagacctgggaggggacagaggcagggcttgcgacggaagtggcctctctgcttctgcagggctggggaagatgctgcgtccagcgttaccgtggctgtaccttggcctctgcagcctcctggtgggggaggcagaggccccgagccccgtggatccgctggagcggagccggccgtacgcggtgctgcgagggcagaacctggatcaaactcttcattgaagtactcatcaggcgtgatggctgtggggttgtttgcagtagcacattccgtggtgaggtcctgctgagccagaactcaggagagtcagaaatgccaaatgatgttcacaagtgaaggcctgtggcactcagtgtctgaggtggacgtgttaaccagctaaagaccgggaagttctattcactaacttttttgcatggaacaagaaaatctatgaggatatcaccaaactacacaggaagtgtaatggatttcttcattttaaaatatttctctactctcctttacatttttatctcctgattataacaaagaaaaaaagaaagaaatatctgaaagtgcatgagacttggaagacttggagttgaagttctagctgtttccctgtctagctttgatagtggaaaggtaatttcatttttctgacccgcagggacatccactgtaccaagttcatatagttactgtgagcatcaagtaagaaaatatttgttaaggtgctctgttgcaatataaagtcctgaatcctttttaagttccatttctataaagaggcccctcgtttataatggataagagggaaagcacctgatttctataatcactacccctcctctaaaatccttatttattttcaaagagtcactcatctaattctcttccaaaagagtatctcaaattccagcttgggggtatctttggcctttacatagagtgggctgttcaggatccagtaaatgccatcccagacacagacaagttg

SEQ ID NO: 283983 - DNA, 1353 bp, Homo sapiens
agcgggaagatgctgcgtccagcgttaccgtacgcggtgctgcgagggcagaacctggtgttgatgggaaccattttcagcatcctgctggtgactgtcatccttatggcattttgtgtctacaagcccattcggcgtcggtgacagccagacaagttcttcaatgagtatttgggaataggataagttgtgttgcacacaggccagtggagaagttggaaccaaaactttcctacttggaaatgacctttggtctggacagttggtaaatgctaaatgaattagaagaaaacatgtactagacattattttttcctaacactgtagcgcaaataattggcccctgagtccgcttctcagtgtttctgactgtacttgttaaaagtaagacctgaaagctccaaaggtcagtgtaaagatggagtgttcatgagaaagaaaacatggtaaccttgtgagtgcctgtaagaaccacactgtaaagaactcatcattaatgcttgaaaatgttattaagaaggagacttaccatgcagacattccctatttaagaaccatttggttacagtgggttaagaatcacagatttttttttttaatctcacctgagttagcctagaatgcgctggttgcaaagtggtgtcagctgtggggatcttgggccctcgttcctcacctgcatcctgccctgcactcaggtgctccccctgaagtcagggtcacatcaggtagacctgttactatatgcacctttggcctggaatgctctgaagttggactggaaatgttactaggttggcctgttacaaaaaggaccccatcctgcttaaacacattgatctcccttgccctgcatttgagtctttctagcccacggtctgaaacttgaggcagctttccagatttggaatgtaaaaggctcagtgggcactctgttcatccctgggtggggagggcccagccaacagaagtgcatgtccactgtgcgggccagtgtgtgtttacacaaatttcatctcagctttgaaaatgctgctattagtttccactgttggtgaactggattttttcctcctattgaaatgatactttcatacttataaagctgtcgtcaatatttatttcaaggtgctagatttaattttgttattaaattgaaatgcttatcttgtgttcaagcacagcactgattttaacaacctgcatttaatgtgaagtaaccgaagtaggatactgtaactgtgtaaggattttgtttgtaatcttgtaacattgaaccattgaaatgttcagttctttgcttttgagcaaaacgtcaattaaaactaaagtaaaatcctatatattgtttta

SEQ ID NO: 283984 - DNA, 2035 bp, Homo sapiens
acgcagagagacctgggaggggacagaggcagggcttgcgacggaagtggcctctctgcttctgcagggctggggaagatgctgcgtccagcgttaccgtggctgtaccttggcctctgcagcctcctggtgggggaggcagaggccccgagccccgtggatccgctggagcggagccggccgtacgcggtgctgcgagggcagaacctggtgttgatgggaaccattttcagcatcctgctggtgactgtcatccttatggcattttgtgtctacaagcccattcggcgtcggtgacagccagacaagttcttcaatgagtatttgggaataggataagttgtgttgcacacaggccagtggagaagttggaaccaaaactttcctacttggaaatgacctttggtctggacagttggtaaatgctaaatgaattagaagaaaacatgtactagacattattttttcctaacactgtagcgcaaataattggcccctgagtccgcttctcagtgtttctgactgtacttgttaaaagtaagacctgaaagctccaaaggtcagtgtaaagatggagtgttcatgagaaagaaaacatggtaaccttgtgagtgcctgtaagaaccacactgtaaagaactcatcattaatgcttgaaaatgttattaagaaggagacttaccatgcagacattccctatttaagaaccatttggttacagtgggttaagaatcacagatttttttttttaatctcacctgagttagcctagaatgcgctggttgcaaagtggtgtcagctgtggggatcttgggccctcgttcctcacctgcatcctgccctgcactcaggtgctccccctgaagtcagggtcacatcaggtagacctgttactatatgcacctttggcctggaatgctctgaagttggactggaaatgttactaggttggcctgttacaaaaaggaccccatcctgcttaaacacattgatctcccttgccctgcatttgagtctttctagcccacggtctgaaacttgaggcagctttccagatttggaatgtaaaaggctcagtgggcactctgttcatccctgggtggggagggcccagccaacagaagtgcatgtccactgtgcgggccagtgtgtgtttacacaaatttcatctcagctttgaaaatgctgctattagtttccactgttggtgaactggattttttcctcctattgaaatgatactttcatacttataaagctgtcgtcaatatttatttcaaggtgctagatttaattttgttattaaattgaaatgcttatcttgtgttcaagcacagcactgattttaacaacctgcatttaatgtgaagtaaccgaagtaggatactgtaactgtgtaaggattttgtttgtaatcttgtaacattgaaccattgaaatgttcagttctttgcttttgagcaaaacgtcaattaaaactaaagtaaaatcctatatattgttttactccagcctgggcaacaagagcaaaactccgtctcaggaaaacaaacaaacaaaaaaaaaaaaccacttcctgctgatattgggccactcaagcttagcttttcagtttttaaataatccatagtcattgcacctcttgacctgaaagagtaatggttttcttcatagtgtccttgtggcttcaaagtattgatatctactttcccctaaaagcaaagcagctcctttacatcttcccagaaatacagcctcatttctggaacccatacatttctactggccactgcctttgttgtttttaatacccgcttatttagatataggaagagtttggaagccttatcatctggacttctaggaacagcctcacaaagcagttggcttcaagggatagcattgatgcagagctttgatgttggctgggcttcccttaccccacaagagccagttcccctccaggaggaccacagaggtgtcagaacagcccaacactggcttgcttttagttgccatttgaaacaagcagcat

SEQ ID NO: 283985 - DNA, 681 bp, Homo sapiens
acgcagagagacctgggaggggacagaggcagggcttgcgacggaagtggcctctctgcttctgcagggctggggaagatgctgcgtccagcgttaccgtggctgtaccttggcctctgcagcctcctggtgggggaggcagaggccccgagccccgtggatccgctggagcggagccggccgtacgcggtgctgcgagggcagaacctggatcaaactcttcattgaagtactcatcaggcgtgatggctgtggggttgtttgcagtagcacattccgtggtgaggtcctgctgagccagaactcaggagagtcagaaatgccaaatgatgttcacaagtgaaggcctgtggcactcagtgtctgaggtggacgtgttaaccagctaaagaccgggaagttctattcactaacttttttgcatggaacaagaaaatctatgaggatatcaccaaactacacaggaagtgtaatggatttcttcattttaaaatatttctctactctcctttacatttttatctcctgattataacaaagaaaaaaagaaagaaatatctgaaagtgcatgagacttggaagacttggagttgaagttctagctgtttccctgtctagctttgatagtggaaaggtaatttcatttttctcttgttggagcttgggatcctctagatcacc

SEQ ID NO: 283986 - DNA, 457 bp, Homo sapiens
ctattagtttccactgttggtgaactggattttttcctcctattgaaatgatactttcatacttataaagctgtcgtcaatatttatttcaaggtgctagatttaattttgttattaaattgaaatgcttatcttgtgttcaagcacagcactgattttaacaacctgcatttaatgtgaagtaaccgaagtaggatactgtaactgtgtaaggattttgtttgtaatcttgtaacattgaaccattgaaatgttcagttctttgcttttgagcaaaacgtcaattaaaactaaagtaaaatcctatatattgttttactccaccagttatttcccaagtgtttgaaatgcaggtgtgtgtctgaatttgatctaatcacttaaagaagctctgtgaagtgaaatttctttttttgagacggagtttggttcctgttgcccaggctagagtgcaatg

SEQ ID NO: 283987 - DNA, 1620 bp, Homo sapiens
acgcagagagacctgggaggggacagaggcagggcttgcgacggaagtggcctctctgcttctgcagggctggggaagatgctgcgtccagcgttaccgtggctgtaccttggcctctgcagcctcctggtgggggaggcagaggccccgagccccgtggatccgctggagcggagccggccgtacgcggtgctgcgagggcagaacctggagtccctgtcgcccaggctggagtgcaatggtgcgatctcggctcgctgcaacctccgcgtctggggttcaagcgattctcctgcctcagccccctgagtagctgggattacagtgttgatgggaaccattttcagcatcctgctggtgactgtcatccttatggcattttgtgtctacaagcccattcggcgtcggtgacagccagacaagttcttcaatgagtatttgggaataggataagttgtgttgcacacaggccagtggagaagttggaaccaaaactttcctacttggaaatgacctttggtctggacagttggtaaatgctaaatgaattagaagaaaacatgtactagacattattttttcctaacactgtagcgcaaataattggcccctgagtccgcttctcagtgtttctgactgtacttgttaaaagtaagacctgaaagctccaaaggtcagtgtaaagatggagtgttcatgagaaagaaaacatggtaaccttgtgagtgcctgtaagaaccacactgtaaagaactcatcattaatgcttgaaaatgttattaagaaggagacttaccatgcagacattccctatttaagaaccatttggttacagtgggttaagaatcacagatttttttttttaatctcacctgagttagcctagaatgcgctggttgcaaagtggtgtcagctgtggggatcttgggccctcgttcctcacctgcatcctgccctgcactcaggtgctccccctgaagtcagggtcacatcaggtagacctgttactatatgcacctttggcctggaatgctctgaagttggactggaaatgttactaggttggcctgttacaaaaaggaccccatcctgcttaaacacattgatctcccttgccctgcatttgagtctttctagcccacggtctgaaacttgaggcagctttccagatttggaatgtaaaaggctcagtgggcactctgttcatccctgggtggggagggcccagccaacagaagtgcatgtccactgtgcgggccagtgtgtgtttacacaaatttcatctcagctttgaaaatgctgctattagtttccactgttggtgaactggattttttcctcctattgaaatgatactttcatacttataaagctgtcgtcaatatttatttcaaggtgctagatttaattttgttattaaattgaaatgcttatcttgtgttcaagcacagcactgattttaacaacctgcatttaatgtgaagtaaccgaagtaggatactgtaactgtgtaaggattttgtttgtaatcttgtaacattgaaccattgaaatgttcagttctttgcttttgagcaaaacgtcaattaaaactaaagtaaaatcctatatattgtttta

SEQ ID NO: 283988 - DNA, 654 bp, Homo sapiens
acgcagagagacctgggaggggacagaggcagggcttgcgacggaagtggcctctctgcttctgcagggctggggaagatgctgcgtccagcgttaccgtggctgtaccttggcctctgcagcctcctggtgggggaggcagaggccccgagccccgtggatccgctggagcggagccggccgtacgcggtgctgcgagggcagaacctggtgttgatgggaaccattttcagcatcctgctggtgactgtcatccttatggcattttgtgtctacaagcccattcggcgtcggtgacagccagacaagtttttcatctcagctttgaaaatgctgctattagtttccactgttggtgaactggattttttcctcctattgaaatgatactttcatacttataaagctgtcgtcaatatttatttcaaggtgctagatttaattttgttattaaattgaaatgcttatcttgtgttcaagcacagcactgattttaacaacctgcatttaatgtgaagtaaccgaagtaggatactgtaactgtgtaaggattttgtttgtaatcttgtaacattgaaccattgaaatgttcagttctttgcttttgagcaaaacgtcaattaaaactaaagtaaaatcctatatattgtttta

SEQ ID NO: 283989 - DNA, 2237 bp, Homo sapiens
ggtcattcgtctccgcccggggtctctgtaaggacggcggagagaggcgacctccgcccaataccaggcgcagccttgccgtctcctcggggctcaccaagcagccaccagcaaagaagccggtttcaaaggcccagcacgacagggagaggaaaacggagcatatgcaaccatacacagtcaccagagtccagcctcccgcaaccagtcgctacagccaggcgcctgcgcccagaagcgcttctcgcgccgaccgtttgtatttggaattgtgggttcctgcccgccacgcaccaccgcaagaccttcaaagctgggagcttctctgtgctccaggattcctcgctgccgattccacaccgcgttcaagactcctgtgaagagcgactccgctgagagcctcctcaatggccagtccacttctaacttgcagctgagaagtttttctgatcttgatggtcagagtggctcgtgctacgaagtgagaaacaaggaatctatagcgaatcgtaaacaacagaaataaaaatgcgtctccgttaagagtcggagcctaacgtcacttccggcaacaataggaaacgtcaaaattgggatagtcggcagttctggcccctgcagctggaggtaccctgagttctgagggtcgtagtgctgtttctggtattctcatcgcggtcacctctaccggtgtggacaagtaaagtttgaatcagcttctccatggcctgggcaccagttcccggctgagccattttccttttggctaaaagtccccgcccagaggccaattcgtcgcggcggcggtggagatcgcaggtcgctcaggcttgcagatgggtcaagggttgtggagagtggtcagaaaccagcagctgcaacaagaaggctacagtgagcaaggctacctcaccagagagcagagcaggagaatggctgcgagcaacatttctaacaccaatcatcgtaaacaagtccaaggaggcattgacatatatcatcttttgaaggcaaggaaatcgaaagaacaggaaggattcattaatttggaaatgttgcctcctgagctaagctttaccatcttgtcctacctgaatgcaactgacctttgcttggcttcatgtgtttggcaggaccttgcgaatgatgaacttctctggcaagggttgtgcaaatccacttggggtcactgttccatatacaataagaacccacctttaggattttcttttagaaaattgtatatgcagctggatgaaggcagcctcacctttaatgccaacccagatgagggagtgaactactttatgtccaagggtatcctggatgattcgccaaaggaaatagcaaagtttatcttctgtacaagaacactaaattggaaaaaactgagaatctatcttgatgaaaggagagatgtcttggatgaccttgtaacattgcataattttagaaatcagttcttgccaaatgcactgagagaattttttcgtcatatccatgcccctgaagagcgtggagagtatcttgaaactcttataacaaagttctcacatagattctgtgcttgcaaccctgatttaatgcgagaacttggccttagtcctgatgctgtctatgtactgtgctactctttgattctactttccattgacctcactagccctcatgtgaagaataaaatgtcaaaaagggaatttattcgaaatacccgtcgcgctgctcaaaatattagtgaagattttgtagggcatctttatgacaatatctaccttattggccatgtggctgcataaaaagcacaattgctaggacttcagtttttacttcagactaaagctacccaaggacttagcagatatgggggttacatcagtgctggtcattgtagcctgagtatacaatcaagcttcagtgtgcaacctttttttcttttgccattttctattttagtaatttccttggggaactaaataattttgcagaatttttcctaattttgtttatcacgttttgcacaaagcagagccactgtctaacacagctgttaacgaatgataaactgacattatactctaaaagatggtgtatttgtgcattagatttgcctgaaaaactttatccatttccattctttatacaaataccatgtaatgtgtacatatttaactaaagagatttatagtcataattattttattgtaaagattttaactaaagtttttccttttctctca

SEQ ID NO: 283990 - DNA, 2553 bp, Homo sapiens
ggtcattcgtctccgcccggggtctctgtaaggacggcggagagaggcgacctccgcccaataccaggcgcagccttgccgtctcctcggggctcaccaagcagccaccagcaaagaagccggtttcaaaggcccagcacgacagggagaggaaaacggagcatatgcaaccatacacagtcaccagagtccagcctcccgcaaccagtcgctacagccaggcgcctgcgcccagaagcgcttctcgcgccgaccgtttgtatttggaattgtgggttcctgcccgccacgcaccaccgcaagaccttcaaagctgggagcttctctgtgctccaggattcctcgctgccgattccacaccgcgttcaagactcctgtgaagagcgactccgctgagagcctcctcaatggccagtccacttctaacttgcagctgagaagtttttctgatcttgatggtcagagtggctcgtgctacgaagtgagaaacaaggaatctatagcgaatcgtaaacaacagaaataaaaatgcgtctccgttaagagtcggagcctaacgtcacttccggcaacaataggaaacgtcaaaattgggatagtcggcagttctggcccctgcagctggaggtaccctgagttctgagggtcgtagtgctgtttctggtattctcatcgcggtcacctctaccggtgtggacaagtaaagtttgaatcagcttctccatggcctgggcaccagttcccggctgagccattttccttttggctaaaagtccccgcccagaggccaattcgtcgcggcggcggtggagatcgcaggtcgctcaggcttgcagatgggtcaagggttgtggagagtggtcagaaaccagcagctgcaacaagaaggctacagtgagcaaggctacctcaccagagagcagagcaggagaatggctgcgagcaacatttctaacaccaatcatcgtaaacaagtccaaggaggcattgacatatatcatcttttgaaggcaaggaaatcgaaagaacaggaaggattcattaatttggaaatgttgcctcctgagctaagctttaccatcttgtcctacctgaatgcaactgacctttgcttggcttcatgtgtttggcaggaccttgcgaatgatgaacttctctggcaagggttgtgcaaatccacttggggtcactgttccatatacaataagaacccacctttaggattttcttttagaaaattgtatatgcagctggatgaaggcagcctcacctttaatgccaacccagatgagggagtgaactactttatgtccaagggtatcctggatgattcgccaaaggaaatagcaaagtttatcttctgtacaagaacactaaattggaaaaaactgagaatctatcttgatgaaaggagagatgtcttggatgaccttgtaacattgcataattttagaaatcagttcttgccaaatgcactgagagaattttttcgtcatatccatgcccctgaagagcgtggagagtatcttgaaactcttataacaaagttctcacatagattctgtgcttgcaaccctgatttaatgcgagaacttggccttagtcctgatgctgtctatgtactgtgctactctttgattctactttccattgacctcactagccctcatgtgaagaataaaatgtcaaaaagggaatttattcgaaatacccgtcgcgctgctcaaaatattagtgaagattttgtagggcatctttatgacaatatctaccttattggccatgtggctgcataaaaagcacaattgctaggacttcagtttttacttcagactaaagctacccaaggacttagcagatatgggggttacatcagtgctggtcattgtagcctgagtatacaatcaagcttcagtgtgcaacctttttttcttttgccattttctattttagtaatttccttggggaactaaataattttgcagaatttttcctaattttgtttatcacgttttgcacaaagcagagccactgtctaacacagctgttaacgaatgataaactgacattatactctaaaagatggtgtatttgtgcattagatttgcctgaaaaactttatccatttccattctttatacaaataccatgtaatgtgtacatatttaactaaagagatttatagtcataattattttattgtaaagattttaactaaagtttttccttttctctcaaactgagttctgaaatttatttgattctgatctgaaactattgtcttcgtaaaagttagatctgacttcagacagaaaccaataccagcttccttttcctttaaactttgaagagtgttgatttgttactatattactatgcaaaactggcagttatttttataatataaatttataatttgattttttattttaaaaactgggttaatcaagtctcggtaagtcctttaaaccatttaggatttttaaaacatcaaaatttatgatttacattcataggaataaaataaaatattattagaactctgtaaatgtt

SEQ ID NO: 283991 - DNA, 2356 bp, Homo sapiens
ggtcattcgtctccgcccggggtctctgtaaggacggcggagagaggcgacctccgcccaataccaggcgcagccttgccgtctcctcggggctcaccaagcagccaccagcaaagaagccggtttcaaaggcccagcacgacagggagaggaaaacggagcatatgcaaccatacacagtcaccagagtccagcctcccgcaaccagtcgctacagccaggcgcctgcgcccagaagcgcttctcgcgccgaccgtttgtatttggaattgtgggttcctgcccgccacgcaccaccgcaagaccttcaaagctgggagcttctctgtgctccaggattcctcgctgccgattccacaccgcgttcaagactcctgtgaagagcgactccgctgagagcctcctcaatggccagtccacttctaacttgcagctgagaagtttttctgatcttgatggtcagagtggctcgtgctacgaagtgagaaacaaggaatctatagcgaatcgtaaacaacagaaataaaaatgcgtctccgttaagagtcggagcctaacgtcacttccggcaacaataggaaacgtcaaaattgggatagtcggcagttctggcccctgcagctggaggtaccctgagttctgagggtcgtagtgctgtttctggtattctcatcgcggtcacctctaccggtgtggacaagtaaagtttgaatcagcttctccatggcctgggcaccagttcccggctgagccattttccttttggctaaaagtccccgcccagaggccaattcgtcgcggcggcggtggagatcgcaggtcgctcaggcttgcagatgggtcaagggttgtggagagtggtcagaaaccagcagctgcaacaagaaggctacagtgagcaaggctacctcaccagagagcagagcaggagaatggctgcgagcaacatttctaacaccaatcatcgtaaacaagtccaaggaggcattgacatatatcatcttttgaaggcaaggaaatcgaaagaacaggaaggattcattaatttggaaatgttgcctcctgagctaagctttaccatcttgtcctacctgaatgcaactgacctttgcttggcttcatgtgtttggcaggaccttgcgaatgatgaacttctctggcaagggttgtgcaaatccacttggggtcactgttccatatacaataagaacccacctttaggattttcttttagaaaattgtatatgcagctggatgaaggcagcctcacctttaatgccaacccagatgagccacagggaacaagattctccaaaggacaccgttcatgtcacggatatgggtaaccaagctccacagcagctgctggcagtggctcatggggtgggggagaacatctgcacagtttgtgggagtgaactactttatgtccaagggtatcctggatgattcgccaaaggaaatagcaaagtttatcttctgtacaagaacactaaattggaaaaaactgagaatctatcttgatgaaaggagagatgtcttggatgaccttgtaacattgcataattttagaaatcagttcttgccaaatgcactgagagaattttttcgtcatatccatgcccctgaagagcgtggagagtatcttgaaactcttataacaaagttctcacatagattctgtgcttgcaaccctgatttaatgcgagaacttggccttagtcctgatgctgtctatgtactgtgctactctttgattctactttccattgacctcactagccctcatgtgaagaataaaatgtcaaaaagggaatttattcgaaatacccgtcgcgctgctcaaaatattagtgaagattttgtagggcatctttatgacaatatctaccttattggccatgtggctgcataaaaagcacaattgctaggacttcagtttttacttcagactaaagctacccaaggacttagcagatatgggggttacatcagtgctggtcattgtagcctgagtatacaatcaagcttcagtgtgcaacctttttttcttttgccattttctattttagtaatttccttggggaactaaataattttgcagaatttttcctaattttgtttatcacgttttgcacaaagcagagccactgtctaacacagctgttaacgaatgataaactgacattatactctaaaagatggtgtatttgtgcattagatttgcctgaaaaactttatccatttccattctttatacaaataccatgtaatgtgtacatatttaactaaagagatttatagtcataattattttattgtaaagattttaactaaagtttttccttttctctca

SEQ ID NO: 283992 - DNA, 2181 bp, Homo sapiens
ggtcattcgtctccgcccggggtctctgtaaggacggcggagagaggcgacctccgcccaataccaggcgcagccttgccgtctcctcggggctcaccaagcagccaccagcaaagaagccggtttcaaaggcccagcacgacagggagaggaaaacggagcatatgcaaccatacacagtcaccagagtccagcctcccgcaaccagtcgctacagccaggcgcctgcgcccagaagcgcttctcgcgccgaccgtttgtatttggaattgtgggttcctgcccgccacgcaccaccgcaagaccttcaaagctgggagcttctctgtgctccaggattcctcgctgccgattccacaccgcgttcaagactcctgtgaagagcgactccgctgagagcctcctcaatggccagtccacttctaacttgcagctgagaagtttttctgatcttgatggtcagagtggctcgtgctacgaagtgagaaacaaggaatctatagcgaatcgtaaacaacagaaataaaaatgcgtctccgttaagagtcggagcctaacgtcacttccggcaacaataggaaacgtcaaaattgggatagtcggcagttctggcccctgcagctggaggtaccctgagttctgagggtcgtagtgctgtttctggtattctcatcgcggtcacctctaccggtgtggacaagtaaagtttgaatcagcttctccatggcctgggcaccagttcccggctgagccattttccttttggctaaaagtccccgcccagaggccaattcgtcgcggcggcggtggagatcgcaggtcgctcaggcttgcagatgggtcaagggttgtggagagtggtcagaaaccagcagctgcaacaagaaggctacagtgagcaaggctacctcaccagagagcagagcaggagaatggctgcgagcaacatttctaacaccaatcatcgtaaacaagtccaaggaggcattgacatatatcatcttttgaaggcaaggaaatcgaaagaacaggaaggattcattaatttggaaatgttgcctcctgagctaagctttaccatcttgtcctacctgaatgcaactgacctttgcttggcttcatgtgtttggcaggaccttgcgaatgatgaacttctctggcaagggttgtgcaaatccacttggggtcactgttccatatacaataagaacccacctttaggattttcttttagaaaattgtatatgcagctggatgaaggcagcctcacggagtgaactactttatgtccaagggtatcctggatgattcgccaaaggaaatagcaaagtttattaaattggaaaaaactgagaatctatcttgatgaaaggagagatgtcttggatgaccttgtaacattgcataattttagaaatcatgagagaattttttcgtcatatccatgcccctgaagagcgtggagagtatcttgaaactcttataacaaagttctcacatagattctgtgcttgcaaccctgatttaatgcgagaacttggccttagtcctgatgctgtctatgtactgtgctactctttgattctactttccattgacctcactagccctcatgtgaagaataaaatgtcaaaaagggaatttattcgaaatacccgtcgcgctgctcaaaatattagtgaagattttgtagggcatctttatgacaatatctaccttattggccatgtggctgcataaaaagcacaattgctaggacttcagtttttacttcagactaaagctacccaaggacttagcagatatgggggttacatcagtgctggtcattgtagcctgagtatacaatcaagcttcagtgtgcaacctttttttcttttgccattttctattttagtaatttccttggggaactaaataattttgcagaatttttcctaattttgtttatcacgttttgcacaaagcagagccactgtctaacacagctgttaacgaatgataaactgacattatactctaaaagatggtgtatttgtgcattagatttgcctgaaaaactttatccatttccattctttatacaaataccatgtaatgtgtacatatttaactaaagagatttatagtcataattattttattgtaaagattttaactaaagtttttccttttctctca

SEQ ID NO: 283993 - DNA, 2500 bp, Homo sapiens
ggtcattcgtctccgcccggggtctctgtaaggacggcggagagaggcgacctccgcccaataccaggcgcagccttgccgtctcctcggggctcaccaagcagccaccagcaaagaagccggtttcaaaggcccagcacgacagggagaggaaaacggagcatatgcaaccatacacagtcaccagagtccagcctcccgcaaccagtcgctacagccaggcgcctgcgcccagaagcgcttctcgcgccgaccgtttgtatttggaattgtgggttcctgcccgccacgcaccaccgcaagaccttcaaagctgggagcttctctgtgctccaggattcctcgctgccgattccacaccgcgttcaagactcctgtgaagagcgactccgctgagagcctcctcaatggccagtccacttctaacttgcagctgagaagtttttctgatcttgatggtcagagtggctcgtgctacgaagtgagaaacaaggaatctatagcgaatcgtaaacaacagaaataaaaatgcgtctccgttaagagtcggagcctaacgtcacttccggcaacaataggaaacgtcaaaattgggatagtcggcagttctggcccctgcagctggaggtaccctgagttctgagggtcgtagtgctgtttctggtattctcatcgcggtcacctctaccggtgtggacaagtaaagtttgaatcagcttctccatggcctgggcaccagttcccggctgagccattttccttttggctaaaagtccccgcccagaggccaattcgtcgcggcggcggtggagatcgcaggtcgctcaggcttgcagatgggtcaagggttgtggagagtggtcagaaaccagcagctgcaacaagaaggctacagtgagcaaggctacctcaccagagagcagagcaggagaatggctgcgagcaacatttctaacaccaatcatcgtaaacaagtccaaggaggcattgacatatatcatcttttgaaggcaaggaaatcgaaagaacaggaaggattcattaatttggaaatgttgcctcctgagctaagctttaccatcttgtcctacctgaatgcaactgacctttgcttggcttcatgtgtttggcaggaccttgcgaatgatgaacttctctggcaagggttgtgcaaatccacttggggtcactgttccatatacaataagaacccacctttaggattttcttttagaaaattgtatatgcagctggatgaaggcagcctcacctttaatgccaacccagatgagggagtgaactactttatgtccaagggtatcctggatgattcgccaaaggaaatagcaaagtttatcttctgtacaagaacactaaattggaaaaaactgagaatctatcttgatgaaaggagagatgtcttggatgaccttgtaacattgcataattttagaaatcagttcttgccaaatgcactgagagaattttttcgtcatatccatgcccctgaagagcgtggagagtatcttgaaactcttataacaaagttctcacatagattctgtgcttgcaaccctgatttaatgcgagaacttggccttagtcctgatgctgtctatgtactgtgctactctttgattctactttccattgacctcactagccctcatgtgaagaataaaatgtcaaaaagggaatttattcgaaatacccgtcgcgctgctcaaaatattagtgaagattttgtagggcatctttatgacaatatctaccttattggccatgtggctgcatagacttagcagatatgggggttacatcagtgctggtcattgtagcctgagtatacaatcaagcttcagtgtgcaacctttttttcttttgccattttctattttagtaatttccttggggaactaaataattttgcagaatttttcctaattttgtttatcacgttttgcacaaagcagagccactgtctaacacagctgttaacgaatgataaactgacattatactctaaaagatggtgtatttgtgcattagatttgcctgaaaaactttatccatttccattctttatacaaataccatgtaatgtgtacatatttaactaaagagatttatagtcataattattttattgtaaagattttaactaaagtttttccttttctctcaaactgagttctgaaatttatttgattctgatctgaaactattgtcttcgtaaaagttagatctgacttcagacagaaaccaataccagcttccttttcctttaaactttgaagagtgttgatttgttactatattactatgcaaaactggcagttatttttataatataaatttataatttgattttttattttaaaaactgggttaatcaagtctcggtaagtcctttaaaccatttaggatttttaaaacatcaaaatttatgatttacattcataggaataaaataaaatattattagaactctgtaaatgtt

SEQ ID NO: 283994 - DNA, 2114 bp, Homo sapiens
ggtcattcgtctccgcccggggtctctgtaaggacggcggagagaggcgacctccgcccaataccaggcgcagccttgccgtctcctcggggctcaccaagcagccaccagcaaagaagccggtttcaaaggcccagcacgacagggagaggaaaacggagcatatgcaaccatacacagtcaccagagtccagcctcccgcaaccagtcgctacagccaggcgcctgcgcccagaagcgcttctcgcgccgaccgtttgtatttggaattgtgggttcctgcccgccacgcaccaccgcaagaccttcaaagctgggagcttctctgtgctccaggattcctcgctgccgattccacaccgcgttcaagactcctgtgaagagcgactccgctgagagcctcctcaatggccagtccacttctaacttgcagctgagaagtttttctgatcttgatggtcagagtggctcgtgctacgaagtgagaaacaaggaatctatagcgaatcgtaaacaacagaaataaaaatgcgtctccgttaagagtcggagcctaacgtcacttccggcaacaataggaaacgtcaaaattgggatagtcggcagttctggcccctgcagctggaggtaccctgagttctgagggtcgtagtgctgtttctggtattctcatcgcggtcacctctaccggtgtggacaagtaaagtttgaatcagcttctccatggcctgggcaccagttcccggctgagccattttccttttggctaaaagtccccgcccagaggccaattcgtcgcggcggcggtggagatcgcaggtcgctcaggcttgcagatgggtcaagggttgtggagagtggtcagaaaccagcagctgcaacaagaaggctacagtgagcaaggctacctcaccagagagcagagcaggagaatggctgcgagcaacatttctaacaccaatcatcgtaaacaagtccaaggaggcattgacatatatcatcttttgaaggaccttgcgaatgatgaacttctctggcaagggttgtgcaaatccacttggggtcactgttccatatacaataagaacccacctttaggattttcttttagaaaattgtatatgcagctggatgaaggcagcctcacctttaatgccaacccagatgagggagtgaactactttatgtccaagggtatcctggatgattcgccaaaggaaatagcaaagtttatcttctgtacaagaacactaaattggaaaaaactgagaatctatcttgatgaaaggagagatgtcttggatgaccttgtaacattgcataattttagaaatcagttcttgccaaatgcactgagagaattttttcgtcatatccatgcccctgaagagcgtggagagtatcttgaaactcttataacaaagttctcacatagattctgtgcttgcaaccctgatttaatgcgagaacttggccttagtcctgatgctgtctatgtactgtgctactctttgattctactttccattgacctcactagccctcatgtgaagaataaaatgtcaaaaagggaatttattcgaaatacccgtcgcgctgctcaaaatattagtgaagattttgtagggcatctttatgacaatatctaccttattggccatgtggctgcataaaaagcacaattgctaggacttcagtttttacttcagactaaagctacccaaggacttagcagatatgggggttacatcagtgctggtcattgtagcctgagtatacaatcaagcttcagtgtgcaacctttttttcttttgccattttctattttagtaatttccttggggaactaaataattttgcagaatttttcctaattttgtttatcacgttttgcacaaagcagagccactgtctaacacagctgttaacgaatgataaactgacattatactctaaaagatggtgtatttgtgcattagatttgcctgaaaaactttatccatttccattctttatacaaataccatgtaatgtgtacatatttaactaaagagatttatagtcataattattttattgtaaagattttaactaaagtttttccttttctctca

SEQ ID NO: 283995 - DNA, 1407 bp, Homo sapiens
ggtcattcgtctccgcccggggtctctgtaaggacggcggagagaggcgacctccgcccaataccaggcgcagccttgccgtctcctcggggctcaccaagcagccaccagcaaagaagccggtttcaaaggcccagcacgacagggagaggaaaacggagcatatgcaaccatacacagtcaccagagtccagcctcccgcaaccagtcgctacagccaggcgcctgcgcccagaagcgcttctcgcgccgaccgtttgtatttggaattgtgggttcctgcccgccacgcaccaccgcaagaccttcaaagctgggagcttctctgtgctccaggattcctcgctgccgattccacaccgcgttcaagactcctgtgaagagcgactccgctgagagcctcctcaatggccagtccacttctaacttgcagctgagaagtttttctgatcttgatggtcagagtggctcgtgctacgaagtgagaaacaaggaatctatagcgaatcgtaaacaacagaaataaaaatgcgtctccgttaagagtcggagcctaacgtcacttccggcaacaataggaaacgtcaaaattgggatagtcggcagttctggcccctgcagctggaggtaccctgagttctgagggtcgtagtgctgtttctggtattctcatcgcggtcacctctaccggtgtggacaagtaaagtttgaatcagcttctccatggcctgggcaccagttcccggctgagccattttccttttggctaaaagtccccatgctgtctatgtactgtgctactctttgattctactttccattgacctcactagccctcatgtgaagaataaaatgtcaaaaagggaatttattcgaaatacccgtcgcgctgctcaaaatattagtgaagattttgtagggcatctttatgacaatatctaccttattggccatgtggctgcataaaaagcacaattgctaggacttcagtttttacttcagactaaagctacccaaggacttagcagatatgggggttacatcagtgctggtcattgtagcctgagtatacaatcaagcttcagtgtgcaacctttttttcttttgccattttctattttagtaatttccttggggaactaaataattttgcagaatttttcctaattttgtttatcacgttttgcacaaagcagagccactgtctaacacagctgttaacgaatgataaactgacattatactctaaaagatggtgtatttgtgcattagatttgcctgaaaaactttatccatttccattctttatacaaataccatgtaatgtgtacatatttaactaaagagatttatagtcataattattttattgtaaagattttaactaaagtttttccttttctctca

SEQ ID NO: 283996 - DNA, 2193 bp, Homo sapiens
ttcttcattcttgttacttctatgccttctctatagtgcagtcttttgtctctttgatcctgatgaactgataatttactacttattacatttagattcccaatcctttattcatgtgtatcttgaatttcagcaagatatgaaaatgcagactccaggggtacattttgtaatgatacaagccttctgaggaaattttctgacaggagcttttaatcctgctgtggtctgttttaccctttccaatacggttttcctctgtgcttgcgaaaaatatcaaaaaagaccaattggcacattctgaatgtgttttctgaataagtatataagtagagagggaggccattttgcaaatgcggataatgctgacatgtcgtacttctaaataaattataatttgatttaaaaaggttgcctgcatgtacatttgccattttacaaagagcaaccgtactcctacctccacccaagttggtaacaaccttatcttacaaacaacccttaatattttaaaagctgcagaaaaaacaaatacatgaataaatgaataaacaaaaaacacatagggaaagggtatgagctcttgctgcaaggagtagatgaaagactgataaatgaagctgaggtccccccagtgcttccctttcaatagtttatgctaaaaatatttgttttttaaaactctgcgctttcttcatttttattggaacgcaatttgtgaaccacaactgagtctgtatgcaggatctccagaacgcaaatcagaaaaaaatttgagattttattcagatttttctattagattgagccactaatgttcggtaaggggcacttgatggttaaaaaacacaactggcatgataaaactacactaaataatatctactttatttgaacagtcatatcaagaatggccctaaatttaatcaaggactaaatttaatgaaagactctgacattaaagactctggattgtttgaaggtattttgcctgcaggtgagactggttttgagggcacagaaacgtagcctgaatgaaccattcagaactcatcatgcatccaactgaacacgtttcatgcttactcaatttttttttttttaaatgcaacaggctcagttttctcacattggtgcatctcttcatgctagaactgcttatgtctacagagtccctgaagaagcaaaaatcctttttttagcattaaacatagcatatggagttcttcctcagctcttggcctatcgttgtatctacaaaccagagttcttcataaaaacaaaggcagaagaaaaagtggaataaaaatattacttcatgttcctcctttctaaattactaacttttgttatactggtactgatattttgtcccatttcactctcttctcatacgtgagtacttaagaatatgtacattcttgctctgcactgtatgtgtgagctatatggtattgtgtaaattttttttgaaggaaaatggaaattcttgagaaacagtttgtttaaagaaatatattcaaaatcatttgtgaataaacttgatcatccatctcaatattgtttgacatataaaataattataagtgtaaaaaattacaatttagtgccaacagtagtgagcatgaaatgaaactattcaaaagagaatatggcctgtgcatattaaaaaattcaaaacagtgaatgcagactggaggagtaacttttgcaaataagatgaatatgcttcattattaaactcaatataaaaggcaaatcatcagaatatttttaaatgttgtttgaaaaatgttttcccaaggaaagtttattatttgctgctgtttcaagaaaattacttttactaaatttttttgtgtgaatttaaacagctaaatagggatcagtaactttatctctatccttaatgaacatttgttttattggtggctggaaatatttctattgtatttctgtgtatatttttaataaaattatttttggcctcttataaagacaaatcttattaaatttgaaacatttcatatatacacataaaacgcttttaaagaaaatttgtgagttgtatattccaattcaaaatgccatctacattccccttatgtttcagtgtgagcaatgaagaggtcttttgatgaattaaatttcattaattaaaaaatacattcaaatattcaaaattaaaaagga

SEQ ID NO: 283997 - DNA, 1123 bp, Homo sapiens
tacaccatccccatgccaataacctccctggaggtctggctcaggctcagttttctcacattggtgcatctcttcatgctagaactgcttatgtctacagagtccctgaagaagcaaaaatcctttttttagcattaaacatagcatatggagttcttcctcagctcttggcctatcgttgtatctacaaaccagagttcttcataaaaacaaaggcagaagaaaaagtggaataaaaatattacttcatgttcctcctttctaaattactaacttttgttatactggtactgatattttgtcccatttcactctcttctcatacgtgagtacttaagaatatgtacattcttgctctgcactgtatgtgtgagctatatggtattgtgtaaattttttttgaaggaaaatggaaattcttgagaaacagtttgtttaaagaaatatattcaaaatcatttgtgaataaacttgatcatccatctcaatattgtttgacatataaaataattataagtgtaaaaaattacaatttagtgccaacagtagtgagcatgaaatgaaactattcaaaagagaatatggcctgtgcatattaaaaaattcaaaacagtgaatgcagactggaggagtaacttttgcaaataagatgaatatgcttcattattaaactcaatataaaaggcaaatcatcagaatatttttaaatgttgtttgaaaaatgttttcccaaggaaagtttattatttgctgctgtttcaagaaaattacttttactaaatttttttgtgtgaatttaaacagctaaatagggatcagtaactttatctctatccttaatgaacatttgttttattggtggctggaaatatttctattgtatttctgtgtatatttttaataaaattatttttggcctcttataaagacaaatcttattaaatttgaaacatttcatatatacacataaaacgcttttaaagaaaatttgtgagttgtatattccaattcaaaatgccatctacattccccttatgtttcagtgtgagcaatgaagaggtcttttgatgaattaaatttcattaattaaaaaatacattcaaatattcaaaattaaaaagga

SEQ ID NO: 283998 - DNA, 487 bp, Homo sapiens
tacaccatccccatgccaataacctccctggaggtctggctcaggctcagttttctcacattggtgcatctcttcatgctagaactgcttatgtctacagagtccctgaagaagcaaaaatcctttttttagcattaaacatagcatatggagttcttcctcagctcttggcctatcgttgtatctacaaaccagagttcttcataaaaacaaaggcagaagaaaaagtggaataaaaatattacttcatgttcctcctttctaaattactaacttttgttatactggtactgatattttgtcccatttcactctcttctcatacgtgagtacttaagaatatgtacattcttgctctgcactgtatgtgtgagctatatggtattgtgtaaattttttttgaaggaaaatggaaattcttgagaaacagtttgtttaaagaaatatattcaaaatcatttgtgaataaacttgatcatccatctca

SEQ ID NO: 283999 - DNA, 2109 bp, Homo sapiens
cggctgaggcgcctcgaagggcaagcgccaagggggcgcgggcgccgccggaggggggggcggggcgcccagcgggatgcggtgaagggcgagcggcgcggcggctgcgatgagtgcctctgcggccaccggggtcttcgtgctgtccctctcggccatcccggtcacctatgtcttcaaccacctggcggcccagcatgattcctggactattgtaggggttgctgccctcatcctgttcctggtagcactgctggctcgtgtcctcgtcaaaagaaaaccaccccgggacccactgttctatgtgtatgcagtttttggatttaccagcgtggtgaacctcatcataggactggagcaagatggaatcattgacgggttcatgacacactacttgagagagggtgaaccgtatctgaacaccgcatatgggcacatgatctgctactgggatggctctgctcattatctgatgtacctggtgatggtggcagccatagcatgggaggaaacttatagaaccattggcctatattgggttggatctattattatgagtgttgttgtttttgtgccaggaaacattgtagggaagtatggaacacgaatttgccctgcttttttcttaagcataccatatacttgtcttcctgtctgggctggtttcagaatctataatcagccatcagaaaattataattacccctcaaaggttattcaagaagcccaagcgaaagacctgctgagaagaccatttgatttaatgttggttgtgtgtctcctcctggcaactggattttgcctgttcagaggtttgattgctttggattgcccatctgagctctgccgattatatacgcaatttcaagagccctatctaaaggatcctgctgcttatcctaaaattcagatgctggcatatatgttctattctgttccttactttgtgactgcactgtatggcttagtggttcctggatgttcctggatgcctgacatcacattgatacatgctggaggtctggctcaggctcagttttctcacattggtgcatctcttcatgctagaactgcttatgtctacagagtccctgaagaagcaaaaatcctttttttagcattaaacatagcatatggagttcttcctcagctcttggcctatcgttgtatctacaaaccagagttcttcataaaaacaaaggcagaagaaaaagtggaataaaaatattacttcatgttcctcctttctaaattactaacttttgttatactggtactgatattttgtcccatttcactctcttctcatacgtgagtacttaagaatatgtacattcttgctctgcactgtatgtgtgagctatatggtattgtgtaaattttttttgaaggaaaatggaaattcttgagaaacagtttgtttaaagaaatatattcaaaatcatttgtgaataaacttgatcatccatctcaatattgtttgacatataaaataattataagtgtaaaaaattacaatttagtgccaacagtagtgagcatgaaatgaaactattcaaaagagaatatggcctgtgcatattaaaaaattcaaaacagtgaatgcagactggaggagtaacttttgcaaataagatgaatatgcttcattattaaactcaatataaaaggcaaatcatcagaatatttttaaatgttgtttgaaaaatgttttcccaaggaaagtttattatttgctgctgtttcaagaaaattacttttactaaatttttttgtgtgaatttaaacagctaaatagggatcagtaactttatctctatccttaatgaacatttgttttattggtggctggaaatatttctattgtatttctgtgtatatttttaataaaattatttttggcctcttataaagacaaatcttattaaatttgaaacatttcatatatacacataaaacgcttttaaagaaaatttgtgagttgtatattccaattcaaaatgccatctacattccccttatgtttcagtgtgagcaatgaagaggtcttttgatgaattaaatttcattaattaaaaaatacattcaaatattcaaaattaaaaagga

SEQ ID NO: 284000 - DNA, 2223 bp, Homo sapiens
cggctgaggcgcctcgaagggcaagcgccaagggggcgcgggcgccgccggaggggggggcggggcgcccagcgggatgcggtgaagggcgagcggcgcggcggctgcgatgagtgcctctgcggccaccggggtcttcgtgctgtccctctcggccatcccggtcacctatgtcttcaaccacctggcggcccagcatgagtgagtgagccggcgcggcgggggtcgcgccgaggggcggcgggagttggctcgccgcgacgggagcctcgcaacttttccgagggggctgggaccgtccgccgcgggacagagttcctggactattgtaggggttgctgccctcatcctgttcctggtagcactgctggctcgtgtcctcgtcaaaagaaaaccaccccgggacccactgttctatgtgtatgcagtttttggatttaccagcgtggtgaacctcatcataggactggagcaagatggaatcattgacgggttcatgacacactacttgagagagggtgaaccgtatctgaacaccgcatatgggcacatgatctgctactgggatggctctgctcattatctgatgtacctggtgatggtggcagccatagcatgggaggaaacttatagaaccattggcctatattgggttggatctattattatgagtgttgttgtttttgtgccaggaaacattgtagggaagtatggaacacgaatttgccctgcttttttcttaagcataccatatacttgtcttcctgtctgggctggtttcagaatctataatcagccatcagaaaattataattacccctcaaaggttattcaagaagcccaagcgaaagacctgctgagaagaccatttgatttaatgttggttgtgtgtctcctcctggcaactggattttgcctgttcagaggtttgattgctttggattgcccatctgagctctgccgattatatacgcaatttcaagagccctatctaaaggatcctgctgcttatcctaaaattcagatgctggcatatatgttctattctgttccttactttgtgactgcactgtatggcttagtggttcctggatgttcctggatgcctgacatcacattgatacatgctggaggtctggctcaggctcagttttctcacattggtgcatctcttcatgctagaactgcttatgtctacagagtccctgaagaagcaaaaatcctttttttagcattaaacatagcatatggagttcttcctcagctcttggcctatcgttgtatctacaaaccagagttcttcataaaaacaaaggcagaagaaaaagtggaataaaaatattacttcatgttcctcctttctaaattactaacttttgttatactggtactgatattttgtcccatttcactctcttctcatacgtgagtacttaagaatatgtacattcttgctctgcactgtatgtgtgagctatatggtattgtgtaaattttttttgaaggaaaatggaaattcttgagaaacagtttgtttaaagaaatatattcaaaatcatttgtgaataaacttgatcatccatctcaatattgtttgacatataaaataattataagtgtaaaaaattacaatttagtgccaacagtagtgagcatgaaatgaaactattcaaaagagaatatggcctgtgcatattaaaaaattcaaaacagtgaatgcagactggaggagtaacttttgcaaataagatgaatatgcttcattattaaactcaatataaaaggcaaatcatcagaatatttttaaatgttgtttgaaaaatgttttcccaaggaaagtttattatttgctgctgtttcaagaaaattacttttactaaatttttttgtgtgaatttaaacagctaaatagggatcagtaactttatctctatccttaatgaacatttgttttattggtggctggaaatatttctattgtatttctgtgtatatttttaataaaattatttttggcctcttataaagacaaatcttattaaatttgaaacatttcatatatacacataaaacgcttttaaagaaaatttgtgagttgtatattccaattcaaaatgccatctacattccccttatgtttcagtgtgagcaatgaagaggtcttttgatgaattaaatttcattaattaaaaaatacattcaaatattcaaaattaaaaagga

SEQ ID NO: 284001 - DNA, 1706 bp, Homo sapiens
cggctgaggcgcctcgaagggcaagcgccaagggggcgcgggcgccgccggaggggggggcggggcgcccagcgggatgcggtgaagggcgagcggcgcggcggctgcgatgagtgcctctgcggccaccggggtcttcgtgctgtccctctcggccatcccggtcacctatgtcttcaaccacctggcggcccagcatgattcctggactattgtaggggttgctgccctcatcctgttcctggtagcactgctggctcgtgtcctcgtcaaaagaaaaccaccccgggacccactgttctatgtgtatgcagtttttggatttaccagcgtggtgaacctcatcataggactggagcaagatggaatcattgacgggttcatgacacactacttgagagagggtgaaccgtatctgaacaccgcatatgggcacatgatctgctactgggatggctctgctcattatctgatgtacctggtgatggtggcagccatagcatgggaatgctggcatatatgttctattctgttccttactttgtgactgcactgtatggcttagtggttcctggatgttcctggatgcctgacatcacattgatacatgctggaggtctggctcaggctcagttttctcacattggtgcatctcttcatgctagaactgcttatgtctacagagtccctgaagaagcaaaaatcctttttttagcattaaacatagcatatggagttcttcctcagctcttggcctatcgttgtatctacaaaccagagttcttcataaaaacaaaggcagaagaaaaagtggaataaaaatattacttcatgttcctcctttctaaattactaacttttgttatactggtactgatattttgtcccatttcactctcttctcatacgtgagtacttaagaatatgtacattcttgctctgcactgtatgtgtgagctatatggtattgtgtaaattttttttgaaggaaaatggaaattcttgagaaacagtttgtttaaagaaatatattcaaaatcatttgtgaataaacttgatcatccatctcaatattgtttgacatataaaataattataagtgtaaaaaattacaatttagtgccaacagtagtgagcatgaaatgaaactattcaaaagagaatatggcctgtgcatattaaaaaattcaaaacagtgaatgcagactggaggagtaacttttgcaaataagatgaatatgcttcattattaaactcaatataaaaggcaaatcatcagaatatttttaaatgttgtttgaaaaatgttttcccaaggaaagtttattatttgctgctgtttcaagaaaattacttttactaaatttttttgtgtgaatttaaacagctaaatagggatcagtaactttatctctatccttaatgaacatttgttttattggtggctggaaatatttctattgtatttctgtgtatatttttaataaaattatttttggcctcttataaagacaaatcttattaaatttgaaacatttcatatatacacataaaacgcttttaaagaaaatttgtgagttgtatattccaattcaaaatgccatctacattccccttatgtttcagtgtgagcaatgaagaggtcttttgatgaattaaatttcattaattaaaaaatacattcaaatattcaaaattaaaaagga

SEQ ID NO: 284002 - DNA, 1365 bp, Homo sapiens
cggctgaggcgcctcgaagggcaagcgccaagggggcgcgggcgccgccggaggggggggcggggcgcccagcgggatgcggtgaagggcgagcggcgcggcggctgcgatgagtgcctctgcggccaccggggtcttcgtgctgtccctctcggccatcccggtcacctatgtcttcaaccacctggcggcccagcatgattcctggactattgtaggggttgctgccctcatcctgttcctggtagcactgctggctcgtgtcctcgtcaaaagaaaaccaccccgggacccactgttctatgtgtatgcagtttttggatttaccagcgtggtgaacctcatcataggactggagcaagatggaatcattgacgggttcatgacacactacttgagagagggtgaaccgtatctgaacaccgcatatgggcacatgatctgctactgggatggctctgctcattatctgatgtacctggtgatggtggcagccatagcatgggaggaaacttatagaaccattggcctatattgggttggatctattattatgagtgttgttgtttttgtgccaggaaacattgtagggaagtatggaacacgaatttgccctgcttttttcttaagcataccatatacttgtcttcctgtctgggctggtttcagaatctataatcagccatcagaaaattataattacccctcaaaggttattcaagaagcccaagcgaaagacctgctgagaagaccatttgatttaatgttggttgtgtgtctcctcctggcaactggattttgcctgttcagaggtttgattgctttggattgcccatctgagctctgccgattatatacgcaatttcaagagccctatctaaaggatcctgctgcttatcctaaaattcagatgctggcatatatgttctattctgttccttactttgtgactgcactgtatggcttagtggttcctggatgttcctggatgcctgacatcacattgatacatgctggaggtctggctcagccagctgccatgctgtgagctgcctcatggtgagatccatggggcaaggcatcagaggaggcctctgggaaacaactcatgaggaattgaggcctccagtccaacaaccgtgaggagttgaatcctgccaggaacaatttgagtgatcttagaagaggatccatccccagttgagccttaagatgatctgagttcctgctgacacctggactgcattttggtatctcagttccttttgcaagagacccagagccagaggatttagcaagttgcacctgaatggactgttgatgagtcttgaaaagatgagataataaatgagaaattatgtcaaa

SEQ ID NO: 284003 - DNA, 1473 bp, Homo sapiens
cggctgaggcgcctcgaagggcaagcgccaagggggcgcgggcgccgccggaggggggggcggggcgcccagcgggatgcggtgaagggcgagcggcgcggcggctgcgatgagtgcctctgcggccaccggggtcttcgtgctgtccctctcggccatcccggtcacctatgtcttcaaccacctggcggcccagcatgattcctggactattgtaggggttgctgccctcatcctgttcctggtagcactgctggctcgtgtcctcgtcaaaagaaaaccaccccgggacccactgttctatgtgtatgcagtttttggatttaccagcgtggtgaacctcatcataggactggagcaagatggaatcattgacgggttcatgacacactacttgagagagggtgaaccgtatctgaacaccgcatatgggcacatgatctgctactgggatggctctgctcattatctgatgtacctggtgatggtggcagccatagcatgggaggaaacttatagaaccattggcctatattgggttggatctattattatgagtgttgttgtttttgtgccaggaaacattgtagggaagtatggaacacgaatttgccctgcttttttcttaagcataccatatacttgtcttcctgtctgggctggtttcagaatctataatcagccatcagaaaattataattacccctcaaaggttattcaagaagcccaagcgaaagacctgctgagaagaccatttgatttaatgttggttgtgtgtctcctcctggcaactggattttgcctgttcagaggtttgattgctttggattgcccatctgagctctgccgattatatacgcaatttcaagagccctatctaaaggatcctgctgcttatcctaaaattcagatgctggcatatatgttctattctgttccttactttgtgactgcactgtatggcttagtggttcctggatgttcctggatgcctgacatcacattgatacatgctggaggtctggctcaggctcagttttctcacattggtgcatctcttcatgctagaactgcttatgtctacagagtccctgaagaagcaaaaatcctttttttagcattaaacatagcatatggagttcttcctcagctcttggcctatcgttgtatctacaaaccagagttcttcataaaaacaaaggcagaagaaaaagtggaataaaaatattacttcatgttcctcctttctaaattactaacttttgttatactggtactgatattttgtcccatttcactctcttctcatacgtgagtacttaagaatatgtacattcttgctctgcactgtatgtgtgagctatatggtattgtgtaaattttttttgaaggaaaatggaaattcttgagaaacagtttgtttaaagaaatatattcaaaatcatttgtgaataaacttgatcatccatctca

SEQ ID NO: 284004 - DNA, 1987 bp, Homo sapiens
cggctgaggcgcctcgaagggcaagcgccaagggggcgcgggcgccgccggaggggggggcggggcgcccagcgggatgcggtgaagggcgagcggcgcggcggctgcgatgagtgcctctgcggccaccggggtcttcgtgctgtccctctcggccatcccggtcacctatgtcttcaaccacctggcggcccagcatgattcctggactattgtaggggttgctgccctcatcctgttcctggtagcactgctggctcgtgtcctcgtcaaaagaaaaccaccccgggacccactgttctatgtgtatgcagtttttggatttaccagcgtggtgaacctcatcataggactggagcaagatggaatcattgacgggttcatgacacactacttgagagagggtgaaccgtatctgaacaccgcatatgggcacatgatctgctactgggatggctctgctcattatctgatgtacctggtgatggtggcagccatagcatgggaggaaacttatagaaccattggcctatattgggttggatctattattatgagtgttgttgtttttgtgccaggaaacattgtaggttattcaagaagcccaagcgaaagacctgctgagaagaccatttgatttaatgttggttgtgtgtctcctcctggcaactggattttgcctgttcagaggtttgattgctttggattgcccatctgagctctgccgattatatacgcaatttcaagagccctatctaaaggatcctgctgcttatcctaaaattcagatgctggcatatatgttctattctgttccttactttgtgactgcactgtatggcttagtggttcctggatgttcctggatgcctgacatcacattgatacatgctggaggtctggctcaggctcagttttctcacattggtgcatctcttcatgctagaactgcttatgtctacagagtccctgaagaagcaaaaatcctttttttagcattaaacatagcatatggagttcttcctcagctcttggcctatcgttgtatctacaaaccagagttcttcataaaaacaaaggcagaagaaaaagtggaataaaaatattacttcatgttcctcctttctaaattactaacttttgttatactggtactgatattttgtcccatttcactctcttctcatacgtgagtacttaagaatatgtacattcttgctctgcactgtatgtgtgagctatatggtattgtgtaaattttttttgaaggaaaatggaaattcttgagaaacagtttgtttaaagaaatatattcaaaatcatttgtgaataaacttgatcatccatctcaatattgtttgacatataaaataattataagtgtaaaaaattacaatttagtgccaacagtagtgagcatgaaatgaaactattcaaaagagaatatggcctgtgcatattaaaaaattcaaaacagtgaatgcagactggaggagtaacttttgcaaataagatgaatatgcttcattattaaactcaatataaaaggcaaatcatcagaatatttttaaatgttgtttgaaaaatgttttcccaaggaaagtttattatttgctgctgtttcaagaaaattacttttactaaatttttttgtgtgaatttaaacagctaaatagggatcagtaactttatctctatccttaatgaacatttgttttattggtggctggaaatatttctattgtatttctgtgtatatttttaataaaattatttttggcctcttataaagacaaatcttattaaatttgaaacatttcatatatacacataaaacgcttttaaagaaaatttgtgagttgtatattccaattcaaaatgccatctacattccccttatgtttcagtgtgagcaatgaagaggtcttttgatgaattaaatttcattaattaaaaaatacattcaaatattcaaaattaaaaagga

SEQ ID NO: 284005 - DNA, 1789 bp, Homo sapiens
cggctgaggcgcctcgaagggcaagcgccaagggggcgcgggcgccgccggaggggggggcggggcgcccagcgggatgcggtgaagggcgagcggcgcggcggctgcgatgagtgcctctgcggccaccggggtcttcgtgctgtccctctcggccatcccggtcacctatgtcttcaaccacctggcggcccagcatgattcctggactattgtaggggttgctgccctcatcctgttcctggtagcactgctggctcgtgtcctcgtcaaaagaaaaccaccccgggacccactgttctatgtgtatgcagtttttggatttaccagcgtggtgaacctcatcataggactggagcaagatggaatcattgacgggttcatgacacactacttgagagagggtgaaccgtatctgaacaccgcatatgggcacatgatctgctactgggatggctctgctcattatctgatgtacctggtgatggtggcagccatagcatgggaggaaacttatagaaccattggcctatattgggttggatctattattatgagtgttgttgtttttgtgccaggaaacattgtagatgctggcatatatgttctattctgttccttactttgtgactgcactgtatggcttagtggttcctggatgttcctggatgcctgacatcacattgatacatgctggaggtctggctcaggctcagttttctcacattggtgcatctcttcatgctagaactgcttatgtctacagagtccctgaagaagcaaaaatcctttttttagcattaaacatagcatatggagttcttcctcagctcttggcctatcgttgtatctacaaaccagagttcttcataaaaacaaaggcagaagaaaaagtggaataaaaatattacttcatgttcctcctttctaaattactaacttttgttatactggtactgatattttgtcccatttcactctcttctcatacgtgagtacttaagaatatgtacattcttgctctgcactgtatgtgtgagctatatggtattgtgtaaattttttttgaaggaaaatggaaattcttgagaaacagtttgtttaaagaaatatattcaaaatcatttgtgaataaacttgatcatccatctcaatattgtttgacatataaaataattataagtgtaaaaaattacaatttagtgccaacagtagtgagcatgaaatgaaactattcaaaagagaatatggcctgtgcatattaaaaaattcaaaacagtgaatgcagactggaggagtaacttttgcaaataagatgaatatgcttcattattaaactcaatataaaaggcaaatcatcagaatatttttaaatgttgtttgaaaaatgttttcccaaggaaagtttattatttgctgctgtttcaagaaaattacttttactaaatttttttgtgtgaatttaaacagctaaatagggatcagtaactttatctctatccttaatgaacatttgttttattggtggctggaaatatttctattgtatttctgtgtatatttttaataaaattatttttggcctcttataaagacaaatcttattaaatttgaaacatttcatatatacacataaaacgcttttaaagaaaatttgtgagttgtatattccaattcaaaatgccatctacattccccttatgtttcagtgtgagcaatgaagaggtcttttgatgaattaaatttcattaattaaaaaatacattcaaatattcaaaattaaaaagga

SEQ ID NO: 284006 - DNA, 399 bp, Homo sapiens
tccaggcaccaatgtgtttattttgatagtgaccacctccctgttctggtcgttgcagttcctggactattgtaggggttgctgccctcatcctgttcctggtagcactgctggctcgtgtcctcgtcaaaagaaaaccaccccgggacccactgttctatggtacgtctccacaaagggaaatcttttgtatctgattaataacacaatactttcagcctcagtcacatattcctccttggttgtgaatactctgagccctttggtaacagtggctgcaagtgtaggggtgtttcaggacaatctggccctcgcctctggctattgcctctcaggcagtggactccaccctctcccaggtggcatcccggtggagagttactgccaggccaggcaggg

SEQ ID NO: 284007 - DNA, 397 bp, Homo sapiens
gtgtggcttctgggcaggctccgacctctgcgtgcccttggtctggaagccagcccgggagcaagcggaaaagccgtggaaacacacccggattgaaatgcccctggcccgcctgacccgaccctaggagaagcagccgagttacccgacatcgtggtcagcaggagctgggtcggtggctggatgctgcagcagcagggactcagcgcctgggagggctcctggggcagggagagaagcagagatgcaacatttttaaaatttcacaaagcatccggctgcacccaggtccctggaacaggagacaaacagaattaatgttttataccttcgggtataggtttgagttttttccccctcatgccaagtatttaaaacctctagaaacccaaaaatt

SEQ ID NO: 284008 - DNA, 441 bp, Homo sapiens
gcgtttctccgaggcgcactgaggctccggggcgagtccgcgcagcgcgagctggggaaagccgtccggggctcccgatgaccctgcactccgccgggaggccgcccttcggaaaagccgtggaaacacacccggattgaaatgcccctggcccgcctgacccgaccctaggagaagcagccgagttacccgacatcgtggtcagcaggagctgggtcggtggctggatgctgcagcagcagggactcagcgcctgggagggctcctggggcagggagagaagcagagatgcaacatttttaaaatttcacaaagcatccggctgcacccaggtccctggaacaggagacaaacagaattaatgttttataccttcgggtataggtttgagttttttccccctcatgccaagtatttaaaacctctagaaacccaaaaatt

SEQ ID NO: 284009 - DNA, 3632 bp, Homo sapiens
gatgcacagatttatttaaactttagttctaaatatataggactttaaaaaatattttctgaaagtgatatccatttttgaggtgcaagcagttgggtccattttggagattccgccttaagccattcagcttcaaaatggcggggagctcttgctacagagggttaccccgttctgcttccttcccattctgttaaaccttgtacatgctccttcccacagatcactattatcttcaaagcccaccatgagtgtacagatcagaaagtctaccaagctgtgacagatgacctgccggccgcctttgtggatggcaccaccagtggtggggacagcgatgccaagagcctgcgtatcgtggaaagggagagtggccactatgtggagatgcacgcccgctatatagggaccacagtgtttgtgcggcaggtgggtcgctacctgacccttgccatccgtatgcctgaagacctggccatgtcctacgaggagagccaggacctgcagctgtgcgtgaacggctgccccctgagtgaacgcatcgatgacgggcagggccaggtgtctgccatcctgggacacagcctgcctcgcacctccttggtgcaggcctggcctggctacacactggagactgccaacactcaatgccatgagaagatgccagtgaaggacatctatttccagtcctgtgtcttcgacctgctcaccactggtgatgccaactttactgccgcagcccacagtgccttggaggatgtggaggccctgcacccaaggaaggaacgctggcacattttccccagcagtggcaatgggactccccgtggaggcagtgatttgtctgtcagtctaggactcacctgcttgatccttatcgtgtttttgtaggggttgtcttttgttttggttttttattttttgtctataacaaaattttaaaatatatattgtcataatatattgagtaaaagagtatatatgtatataccatgtatatgacaggatgtttgtcctgggacacccaccagattgtacatactgtgtttggctgttttcacatatgttggatgtagtgttctttgattgtatcaattttgttttgcagttctgtgaaatgttttataatgtccctgcccagggacctgttagaaagcactttattttttatatattaaatatttatgtgtgtgcttggttgatatgtatagtacatatacacagacatccatatgcagcgtttcctttgaaggtgaccagttgtttgtagctattcttggctgtaccttcctgccctttcccattgctactgatttgccacggtgtgcagcttttactcgccaccttccggtggagctgcctcgttcctttgaactatgccctcacccttctgccctcacttgatttgaaagggtcgttaactctcccttacaggtgctttgactcttaaacgctgatcttaagaagctctcttcatctaagagctgttactttttcagaagggggggtattattggtattctgattactctcaattctaattgttatatatttgagcccatacagtgtattaggttgaaccatagaaactgctattctcgtaggtcaaaagggtctagtgatggaagttttgtagataagtaccaggcatctcagtaactcctagactttttctcatcccatgccccgttttaaattgtcagttttccctctgactcttctgtgttaaaacatgaaactataaatttagtaattatcatgccttgctctttttaatctatatgactgatgcaagcccctcttcttaaccgtttcttggctttgagcccagaaacacagctctccctgtctccaactccagtaagccctcctcagcctcaccttacgaatccaaagaactggggtttgttaggttctttctctaatgtagaggcccagatcccatcacaaagtttttcattcttccttgtccaccatgatcttcatcacagtctttgatatgtctgcatgcaaagtggaacagagttgggcggcaatgacagaagagcttccttggcctgactcggtgtgcggccacttcggcactgcttaatccagatattcttgttaactaagcattgtgcttcccaggtggtctgaagtcaggtactctctctctcaacacctgtagttgaatatgatttggtcagttgctcgttgtaacttggagaaattcctataaagtaagatctccttgcctcttccatccattgttggcacccccttgcaaaaggaaaagaacagcaaaagtcaggagcagtaatctgagaaagttaactccaggataggtaggtttctattgttatagctagatgtaaatctttagttccaagaagtgatagagtttctgctttaataatttgttgataagtttacataaacagaaataaaagatactatctttaccgtagtagttcaggccaagattatgcttagttttagttctccaggtagttacttttgccatgtcctattgatcagtgacactgccagaggcccataccggcaagaggaagaggacgtcattttgtaaagtttaacttcttagcgaactgatgtgccacccagtcacagagtggagttgtgaattcatgtagaggtggcaaacctctaccttgtgttgatgagagaataatcttgggcagtctgggaaaataaggaaggcatctccttcttactcatggagattcaactatagagagttgaaacctaaacccgccttccttttatagaagctggactagagacggactgaccatcagctctgaactgtggctttttttgttcacctatgatgccatgtaccaaattcagaagctatcgttaataatttgttttataattgagtagtacaagcgaggaaaaaatacggaggataaccactatttttgtgcaaataatatgaaagtgaagtaaaagcaatagaagaaatttctataggatctgggtttagagtgtgtatcattaataaatatacctttgctcttttcagggaaaataacaaccacccttactgatagttgggaaaagaagattgggttattttgccatatcatttagctggaagtgacatttaaaagcaccctgcatcactagtaatagtgtattttgctattctgcccttgtaatcggtgtccctgtaaaacaatccccacagattactttcagaaatagatgtatttctctacgtaagggccaggtttattttctccttttttgagatttctagaaaaaatgctgcttgcacatgttggttcttgaaaccttagctagaagaatttcaggtcataccaacatgtggataggctatagctgttcagaggtctcctgggggagcttaaaacgggggaaacactggttttcacagatgctccacatggctgtctttaaaagactcaaaacttttttttgtcctctttgttatgcttggaagctcccccccccccaacagtgtgtcgagtctttgcaaagaaacctttagatgtggttcatagatatatgaatacgtatctgtgtaaaacagtgagtgtgcagtgtgtaaatactttaaattattatgctagaaaaataaagttacataccttgctgtggaa

SEQ ID NO: 284010 - DNA, 4462 bp, Homo sapiens
gccttaggtgtctctttaaaccctctctcccctctttatttccaaatctttatctttggctttcttaagctgtaaaggcacactggcaccttaggtggtcaggtaagatcgctggattccttatttcggcgaaagtccagcggaccattcccgccactgtacccattttagaaacacttggaagacccttaaggatcatttacggagagaaaggtcctgcgtgttccgaagttcaggggccccctgatcccgctgagccccctccaggagcgaaagggttaagaatgataaggaagaagaggaagcgaagcgcgccccccggcccatgccgcagccacgggcccagacccgccacggcgcccgcgccgccgccctcgccggagcccacgagacctgcatggacgggcatgggcttgagagcagcaccttccagcgccgccgctgccgccgccgaggttgagcagcgccgccgccccgggctctgccccccgccgctggagctgctgctgctgctgctgttcagcctcgggctgctccacgcaggtgactgccaacagccagcccaatgtcgaatccagaaatgcaccacggacttcgtgtccctgacttctcacctgaactctgccgttgacggctttgactctgagttttgcaaggccttgcgtgcctatgctggctgcacccagcgaacttcaaaagcctgccgtggcaacctggtataccattctgccgtgttgggtatcagtgacctcatgagccagaggaattgttccaaggatggacccacatcctctaccaaccccgaagtgacccatgatccttgcaactatcacagccacgctggagccagggaacacaggagaggggaccagaaccctcccagttaccttttttgtggcttgtttggagatcctcacctcagaactttcaaggataacttccaaacatgcaaagtagaaggggcctggccactcatagataataattatctttcagttcaagtgacaaacgtacctgtggtccctggatccagtgctactgctacaaataagatcactattatcttcaaagcccaccatgagtgtacagatcagaaagtctaccaagctgtgacagatgacctgccggccgcctttgtggatggcaccaccagtggtggggacagcgatgccaagagcctgcgtatcgtggaaagggagagtggccactatgtggagatgcacgcccgctatatagggaccacagtgtttgtgcggcaggtgggtcgctacctgacccttgccatccgtatgcctgaagacctggccatgtcctacgaggagagccaggacctgcagctgtgcgtgaacggctgccccctgagtgaacgcatcgatgacgggcagggccaggtgtctgccatcctgggacacagcctgcctcgcacctccttggtgcaggcctggcctggctacacactggagactgccaacactcaatgccatgagaagatgccagtgaaggacatctatttccagtcctgtgtcttcgacctgctcaccactggtgatgccaactttactgccgcagcccacagtgccttggaggatgtggaggccctgcacccaaggaaggaacgctggcacattttccccagcagtggcaatgggactccccgtggaggcagtgatttgtctgtcagtctaggactcacctgcttgatccttatcgtgtttttgtaggggttgtcttttgttttggttttttattttttgtctataacaaaattttaaaatatatattgtcataatatattgagtaaaagagtatatatgtatataccatgtatatgacaggatgtttgtcctgggacacccaccagattgtacatactgtgtttggctgttttcacatatgttggatgtagtgttctttgattgtatcaattttgttttgcagttctgtgaaatgttttataatgtccctgcccagggacctgttagaaagcactttattttttatatattaaatatttatgtgtgtgcttggttgatatgtatagtacatatacacagacatccatatgcagcgtttcctttgaaggtgaccagttgtttgtagctattcttggctgtaccttcctgccctttcccattgctactgatttgccacggtgtgcagcttttactcgccaccttccggtggagctgcctcgttcctttgaactatgccctcacccttctgccctcacttgatttgaaagggtcgttaactctcccttacaggtgctttgactcttaaacgctgatcttaagaagctctcttcatctaagagctgttactttttcagaagggggggtattattggtattctgattactctcaattctaattgttatatatttgagcccatacagtgtattaggttgaaccatagaaactgctattctcgtaggtcaaaagggtctagtgatggaagttttgtagataagtaccaggcatctcagtaactcctagactttttctcatcccatgccccgttttaaattgtcagttttccctctgactcttctgtgttaaaacatgaaactataaatttagtaattatcatgccttgctctttttaatctatatgactgatgcaagcccctcttcttaaccgtttcttggctttgagcccagaaacacagctctccctgtctccaactccagtaagccctcctcagcctcaccttacgaatccaaagaactggggtttgttaggttctttctctaatgtagaggcccagatcccatcacaaagtttttcattcttccttgtccaccatgatcttcatcacagtctttgatatgtctgcatgcaaagtggaacagagttgggcggcaatgacagaagagcttccttggcctgactcggtgtgcggccacttcggcactgcttaatccagatattcttgttaactaagcattgtgcttcccaggtggtctgaagtcaggtactctctctctcaacacctgtagttgaatatgatttggtcagttgctcgttgtaacttggagaaattcctataaagtaagatctccttgcctcttccatccattgttggcacccccttgcaaaaggaaaagaacagcaaaagtcaggagcagtaatctgagaaagttaactccaggataggtaggtttctattgttatagctagatgtaaatctttagttccaagaagtgatagagtttctgctttaataatttgttgataagtttacataaacagaaataaaagatactatctttaccgtagtagttcaggccaagattatgcttagttttagttctccaggtagttacttttgccatgtcctattgatcagtgacactgccagaggcccataccggcaagaggaagaggacgtcattttgtaaagtttaacttcttagcgaactgatgtgccacccagtcacagagtggagttgtgaattcatgtagaggtggcaaacctctaccttgtgttgatgagagaataatcttgggcagtctgggaaaataaggaaggcatctccttcttactcatggagattcaactatagagagttgaaacctaaacccgccttccttttatagaagctggactagagacggactgaccatcagctctgaactgtggctttttttgttcacctatgatgccatgtaccaaattcagaagctatcgttaataatttgttttataattgagtagtacaagcgaggaaaaaatacggaggataaccactatttttgtgcaaataatatgaaagtgaagtaaaagcaatagaagaaatttctataggatctgggtttagagtgtgtatcattaataaatatacctttgctcttttcagggaaaataacaaccacccttactgatagttgggaaaagaagattgggttattttgccatatcatttagctggaagtgacatttaaaagcaccctgcatcactagtaatagtgtattttgctattctgcccttgtaatcggtgtccctgtaaaacaatccccacagattactttcagaaatagatgtatttctctacgtaagggccaggtttattttctccttttttgagatttctagaaaaaatgctgcttgcacatgttggttcttgaaaccttagctagaagaatttcaggtcataccaacatgtggataggctatagctgttcagaggtctcctgggggagcttaaaacgggggaaacactggttttcacagatgctccacatggctgtctttaaaagactcaaaacttttttttgtcctctttgttatgcttggaagctcccccccccccaacagtgtgtcgagtctttgcaaagaaacctttagatgtggttcatagatatatgaatacgtatctgtgtaaaacagtgagtgtgcagtgtgtaaatactttaaattattatgctagaaaaataaagttacataccttgctgtggaa

SEQ ID NO: 284011 - DNA, 4563 bp, Homo sapiens
gagaaagctgcctggaggaagctgctggggtgcggggggctgagggatttggctccccgccctctcccctagatggcggagaaatcgggctagctggaagggcgcagctcctctcccagagctcattctggagtcggagaactgggagagcggcccccgaggcggagcctccctcccgccccgagtcgcgctgccccccacctgggggagaggggcgggcgccgcgctgccttccctccgcgcctcggccgcgtggcttgcggcttattttcccagctggcaagcgtcgcgctgcagacaagggaatgcctgtggtcctgcgtgttccgaagttcaggggccccctgatcccgctgagccccctccaggagcgaaagggttaagaatgataaggaagaagaggaagcgaagcgcgccccccggcccatgccgcagccacgggcccagacccgccacggcgcccgcgccgccgccctcgccggagcccacgagacctgcatggacgggcatgggcttgagagcagcaccttccagcgccgccgctgccgccgccgaggttgagcagcgccgccgccccgggctctgccccccgccgctggagctgctgctgctgctgctgttcagcctcgggctgctccacgcaggtgactgccaacagccagcccaatgtcgaatccagaaatgcaccacggacttcgtgtccctgacttctcacctgaactctgccgttgacggctttgactctgagttttgcaaggccttgcgtgcctatgctggctgcacccagcgaacttcaaaagcctgccgtggcaacctggtataccattctgccgtgttgggtatcagtgacctcatgagccagaggaattgttccaaggatggacccacatcctctaccaaccccgaagtgacccatgatccttgcaactatcacagccacgctggagccagggaacacaggagaggggaccagaaccctcccagttaccttttttgtggcttgtttggagatcctcacctcagaactttcaaggataacttccaaacatgcaaagtagaaggggcctggccactcatagataataattatctttcagttcaagtgacaaacgtacctgtggtccctggatccagtgctactgctacaaataagatcactattatcttcaaagcccaccatgagtgtacagatcagaaagtctaccaagctgtgacagatgacctgccggccgcctttgtggatggcaccaccagtggtggggacagcgatgccaagagcctgcgtatcgtggaaagggagagtggccactatgtggagatgcacgcccgctatatagggaccacagtgtttgtgcggcaggtgggtcgctacctgacccttgccatccgtatgcctgaagacctggccatgtcctacgaggagagccaggacctgcagctgtgcgtgaacggctgccccctgagtgaacgcatcgatgacgggcagggccaggtgtctgccatcctgggacacagcctgcctcgcacctccttggtgcaggcctggcctggctacacactggagactgccaacactcaatgccatgagaagatgccagtgaaggacatctatttccagtcctgtgtcttcgacctgctcaccactggtgatgccaactttactgccgcagcccacagtgccttggaggatgtggaggccctgcacccaaggaaggaacgctggcacattttccccagcagtggcaatgggactccccgtggaggcagtgatttgtctgtcagtctaggactcacctgcttgatccttatcgtgtttttgtaggggttgtcttttgttttggttttttattttttgtctataacaaaattttaaaatatatattgtcataatatattgagtaaaagagtatatatgtatataccatgtatatgacaggatgtttgtcctgggacacccaccagattgtacatactgtgtttggctgttttcacatatgttggatgtagtgttctttgattgtatcaattttgttttgcagttctgtgaaatgttttataatgtccctgcccagggacctgttagaaagcactttattttttatatattaaatatttatgtgtgtgcttggttgatatgtatagtacatatacacagacatccatatgcagcgtttcctttgaaggtgaccagttgtttgtagctattcttggctgtaccttcctgccctttcccattgctactgatttgccacggtgtgcagcttttactcgccaccttccggtggagctgcctcgttcctttgaactatgccctcacccttctgccctcacttgatttgaaagggtcgttaactctcccttacaggtgctttgactcttaaacgctgatcttaagaagctctcttcatctaagagctgttactttttcagaagggggggtattattggtattctgattactctcaattctaattgttatatatttgagcccatacagtgtattaggttgaaccatagaaactgctattctcgtaggtcaaaagggtctagtgatggaagttttgtagataagtaccaggcatctcagtaactcctagactttttctcatcccatgccccgttttaaattgtcagttttccctctgactcttctgtgttaaaacatgaaactataaatttagtaattatcatgccttgctctttttaatctatatgactgatgcaagcccctcttcttaaccgtttcttggctttgagcccagaaacacagctctccctgtctccaactccagtaagccctcctcagcctcaccttacgaatccaaagaactggggtttgttaggttctttctctaatgtagaggcccagatcccatcacaaagtttttcattcttccttgtccaccatgatcttcatcacagtctttgatatgtctgcatgcaaagtggaacagagttgggcggcaatgacagaagagcttccttggcctgactcggtgtgcggccacttcggcactgcttaatccagatattcttgttaactaagcattgtgcttcccaggtggtctgaagtcaggtactctctctctcaacacctgtagttgaatatgatttggtcagttgctcgttgtaacttggagaaattcctataaagtaagatctccttgcctcttccatccattgttggcacccccttgcaaaaggaaaagaacagcaaaagtcaggagcagtaatctgagaaagttaactccaggataggtaggtttctattgttatagctagatgtaaatctttagttccaagaagtgatagagtttctgctttaataatttgttgataagtttacataaacagaaataaaagatactatctttaccgtagtagttcaggccaagattatgcttagttttagttctccaggtagttacttttgccatgtcctattgatcagtgacactgccagaggcccataccggcaagaggaagaggacgtcattttgtaaagtttaacttcttagcgaactgatgtgccacccagtcacagagtggagttgtgaattcatgtagaggtggcaaacctctaccttgtgttgatgagagaataatcttgggcagtctgggaaaataaggaaggcatctccttcttactcatggagattcaactatagagagttgaaacctaaacccgccttccttttatagaagctggactagagacggactgaccatcagctctgaactgtggctttttttgttcacctatgatgccatgtaccaaattcagaagctatcgttaataatttgttttataattgagtagtacaagcgaggaaaaaatacggaggataaccactatttttgtgcaaataatatgaaagtgaagtaaaagcaatagaagaaatttctataggatctgggtttagagtgtgtatcattaataaatatacctttgctcttttcagggaaaataacaaccacccttactgatagttgggaaaagaagattgggttattttgccatatcatttagctggaagtgacatttaaaagcaccctgcatcactagtaatagtgtattttgctattctgcccttgtaatcggtgtccctgtaaaacaatccccacagattactttcagaaatagatgtatttctctacgtaagggccaggtttattttctccttttttgagatttctagaaaaaatgctgcttgcacatgttggttcttgaaaccttagctagaagaatttcaggtcataccaacatgtggataggctatagctgttcagaggtctcctgggggagcttaaaacgggggaaacactggttttcacagatgctccacatggctgtctttaaaagactcaaaacttttttttgtcctctttgttatgcttggaagctcccccccccccaacagtgtgtcgagtctttgcaaagaaacctttagatgtggttcatagatatatgaatacgtatctgtgtaaaacagtgagtgtgcagtgtgtaaatactttaaattattatgctagaaaaataaagttacataccttgctgtggaa

SEQ ID NO: 284012 - DNA, 4433 bp, Homo sapiens
ccgggccgccggtgggtggtcgctagggctgggccagcctcttggaggtccacgcccgccgagcccacgctggctggggccggggtgccggcgcgctcgggactcgtctcagcagtcgctcacggtctttgtgtcttctcttccgcccctttccctgcctgccgcctccggccgccacgatgcccctgcgccccgctgctgccgccgcggactggctgcgccggctgcgcgctgcttgctgcggcggtggtggcgccccatctgctacacgggcctgaagaaggaagaagaggaagcgaagcgcgccccccggcccatgccgcagccacgggcccagacccgccctcgccggagcccacgagacctgcatggacgggcatgggcttgagagcagcaccttccagcgccgccgctgccgccgccgaggttgagcagcgccgccgccccgggctctgccccccgccgctggagctgctgctgctgctgctgttcagcctcgggctgctccacgcaggtgactgccaacagccagcccaatgtcgaatccagaaatgcaccacggacttcgtgtccctgacttctcacctgaactctgccgttgacggctttgactctgagttttgcaaggccttgcgtgcctatgctggctgcacccagcgaacttcaaaagcctgccgtggcaacctggtataccattctgccgtgttgggtatcagtgacctcatgagccagaggaattgttccaaggatggacccacatcctctaccaaccccgaagtgacccatgatccttgcaactatcacagccacgctggagccagggaacacaggagaggggaccagaaccctcccagttaccttttttgtggcttgtttggagatcctcacctcagaactttcaaggataacttccaaacatgcaaagtagaaggggcctggccactcatagataataattatctttcagttcaagtgacaaacgtacctgtggtccctggatccagtgctactgctacaaataagatcactattatcttcaaagcccaccatgagtgtacagatcagaaagtctaccaagctgtgacagatgacctgccggccgcctttgtggatggcaccaccagtggtggggacagcgatgccaagagcctgcgtatcgtggaaagggagagtggccactatgtggagatgcacgcccgctatatagggaccacagtgtttgtgcggcaggtgggtcgctacctgacccttgccatccgtatgcctgaagacctggccatgtcctacgaggagagccaggacctgcagctgtgcgtgaacggctgccccctgagtgaacgcatcgatgacgggcagggccaggtgtctgccatcctgggacacagcctgcctcgcacctccttggtgcaggcctggcctggctacacactggagactgccaacactcaatgccatgagaagatgccagtgaaggacatctatttccagtcctgtgtcttcgacctgctcaccactggtgatgccaactttactgccgcagcccacagtgccttggaggatgtggaggccctgcacccaaggaaggaacgctggcacattttccccagcagtggcaatgggactccccgtggaggcagtgatttgtctgtcagtctaggactcacctgcttgatccttatcgtgtttttgtaggggttgtcttttgttttggttttttattttttgtctataacaaaattttaaaatatatattgtcataatatattgagtaaaagagtatatatgtatataccatgtatatgacaggatgtttgtcctgggacacccaccagattgtacatactgtgtttggctgttttcacatatgttggatgtagtgttctttgattgtatcaattttgttttgcagttctgtgaaatgttttataatgtccctgcccagggacctgttagaaagcactttattttttatatattaaatatttatgtgtgtgcttggttgatatgtatagtacatatacacagacatccatatgcagcgtttcctttgaaggtgaccagttgtttgtagctattcttggctgtaccttcctgccctttcccattgctactgatttgccacggtgtgcagcttttactcgccaccttccggtggagctgcctcgttcctttgaactatgccctcacccttctgccctcacttgatttgaaagggtcgttaactctcccttacaggtgctttgactcttaaacgctgatcttaagaagctctcttcatctaagagctgttactttttcagaagggggggtattattggtattctgattactctcaattctaattgttatatatttgagcccatacagtgtattaggttgaaccatagaaactgctattctcgtaggtcaaaagggtctagtgatggaagttttgtagataagtaccaggcatctcagtaactcctagactttttctcatcccatgccccgttttaaattgtcagttttccctctgactcttctgtgttaaaacatgaaactataaatttagtaattatcatgccttgctctttttaatctatatgactgatgcaagcccctcttcttaaccgtttcttggctttgagcccagaaacacagctctccctgtctccaactccagtaagccctcctcagcctcaccttacgaatccaaagaactggggtttgttaggttctttctctaatgtagaggcccagatcccatcacaaagtttttcattcttccttgtccaccatgatcttcatcacagtctttgatatgtctgcatgcaaagtggaacagagttgggcggcaatgacagaagagcttccttggcctgactcggtgtgcggccacttcggcactgcttaatccagatattcttgttaactaagcattgtgcttcccaggtggtctgaagtcaggtactctctctctcaacacctgtagttgaatatgatttggtcagttgctcgttgtaacttggagaaattcctataaagtaagatctccttgcctcttccatccattgttggcacccccttgcaaaaggaaaagaacagcaaaagtcaggagcagtaatctgagaaagttaactccaggataggtaggtttctattgttatagctagatgtaaatctttagttccaagaagtgatagagtttctgctttaataatttgttgataagtttacataaacagaaataaaagatactatctttaccgtagtagttcaggccaagattatgcttagttttagttctccaggtagttacttttgccatgtcctattgatcagtgacactgccagaggcccataccggcaagaggaagaggacgtcattttgtaaagtttaacttcttagcgaactgatgtgccacccagtcacagagtggagttgtgaattcatgtagaggtggcaaacctctaccttgtgttgatgagagaataatcttgggcagtctgggaaaataaggaaggcatctccttcttactcatggagattcaactatagagagttgaaacctaaacccgccttccttttatagaagctggactagagacggactgaccatcagctctgaactgtggctttttttgttcacctatgatgccatgtaccaaattcagaagctatcgttaataatttgttttataattgagtagtacaagcgaggaaaaaatacggaggataaccactatttttgtgcaaataatatgaaagtgaagtaaaagcaatagaagaaatttctataggatctgggtttagagtgtgtatcattaataaatatacctttgctcttttcagggaaaataacaaccacccttactgatagttgggaaaagaagattgggttattttgccatatcatttagctggaagtgacatttaaaagcaccctgcatcactagtaatagtgtattttgctattctgcccttgtaatcggtgtccctgtaaaacaatccccacagattactttcagaaatagatgtatttctctacgtaagggccaggtttattttctccttttttgagatttctagaaaaaatgctgcttgcacatgttggttcttgaaaccttagctagaagaatttcaggtcataccaacatgtggataggctatagctgttcagaggtctcctgggggagcttaaaacgggggaaacactggttttcacagatgctccacatggctgtctttaaaagactcaaaacttttttttgtcctctttgttatgcttggaagctcccccccccccaacagtgtgtcgagtctttgcaaagaaacctttagatgtggttcatagatatatgaatacgtatctgtgtaaaacagtgagtgtgcagtgtgtaaatactttaaattattatgctagaaaaataaagttacataccttgctgtggaa

SEQ ID NO: 284013 - DNA, 2308 bp, Homo sapiens
gagaaagctgcctggaggaagctgctggggtgcggggggctgagggatttggctccccgccctctcccctagatggcggagaaatcgggctagctggaagggcgcagctcctctcccagagctcattctggagtcggagaactgggagagcggcccccgaggcggagcctccctcccgccccgagtcgcgctgccccccacctgggggagaggggcgggcgccgcgctgccttccctccgcgcctcggccgcgtggcttgcggcttattttcccagctggcaagcgtcgcgctgcagacaagggaatgcctgtggtgagttgtttattttgttgaagtttgcggtgggcccgggggacgtggggggcgagcggcaggcagcggccgggactgttttgtttaggtctccatccacctgtgtggtataaatctgccagcctcaaggcggcgggggaccggagtgagaaagctctgacgctcccaaaagccccttttcgcaacttacagatctaggaccacatttgattctccacgcctggaaccggctagatcctagtttacgctcaccccgccctccagcctcccatcaacgcttcccgcacccgctgtgtgcagggctggcgctccgcagagcaaacagcgcccacgacccagggacagctggccaccgaagtccctccccggcgcccttccccgttccttgaggataggggagctgaggttttcatgtgaagggcgcccatgaaattcgtgggaacttgttctggcgtcttctggagtggagttctttcaggggtttcgggtctgcccgggactacaaaatgggatcctgggttggctggagtttcccagactaggctggagagaggtcggctgttggctcgcgggagagcccagaggaaccccttgggcgatggcagtcaagaccggcggctgcgtttgcctggaagaaaagcctaaatacattagcgagctggtaaagcttttaaggccttcttgggagcgagtggctggctaatgagaggttaattttgtttcgaagggaaggctgcactggtttcctgagataaatggacaggaagcgcattacctccgcgcgctggcaagcggctcccaaatgctttttgcacctgccgttttgagcggtgagagcagcggcggagcccgcagggattgcgggggcccgttgtctacgagcgggtgatgagccccccgcaagccccgggctctctccctccgcgagtgcattgctcacgccaagctttgggactcttctctcacacccaggtcctgcgtgttccgaagttcaggggccccctgatcccgctgagccccctccaggagcgaaagggttaagaatgataaggaagaagaggaagcgaagcgcgccccccggcccatgccgcagccacgggcccagacccgccacggcgcccgcgccgccgccctcgccggagcccacgagacctgcatggacgggcatgggcttgagagcagcaccttccagcgccgccgctgccgccgccgaggttgagcagcgccgccgccccgggctctgccccccgccgctggagctgctgctgctgctgctgttcagcctcgggctgctccacgcaggtgactgccaacagccagcccaatgtcgaatccagaaatgcaccacggacttcgtgtccctgacttctcacctgaactctgccgttgacggctttgactctgagttttgcaaggccttgcgtgcctatgctggctgcacccagcgaacttcaaaagcctgccgtggcaacctggtataccattctgccgtgttgggtatcagtgacctcatgagccagaggaattgttccaaggatggacccacatcctctaccaaccccgaagtgacccatgatccttgcaactatcacagccacgctggagccagggaacacaggagaggggaccagaaccctcccagttaccttttttgtggcttgtttggagatcctcacctcagaactttcaaggataacttccaaacatgcaaagtagaaggggcctggccactcatagataataattatctttcagttcaagtgacaaacgtacctgtggtccctggatccagtgctactgctacaaataaggttatgtcatggctccctgacggtgaaatatgtgtgaaatccaaccaacacccagcaggatacactaacaaacattctacaaagccagaatggatgccctcaccctccttggaatgatgttaaaccaattgagtaaactggtcctgccaactgcaatgtaataaagtaggcctatcaaacttc

SEQ ID NO: 284014 - DNA, 1738 bp, Homo sapiens
gagaaagctgcctggaggaagctgctggggtgcggggggctgagggatttggctccccgccctctcccctagatggcggagaaatcgggctagctggaagggcgcagctcctctcccagagctcattctggagtcggagaactgggagagcggcccccgaggcggagcctccctcccgccccgagtcgcgctgccccccacctgggggagaggggcgggcgccgcgctgccttccctccgcgcctcggccgcgtggcttgcggcttattttcccagctggcaagcgtcgcgctgcagacaagggaatgcctgtggtgagttgtttattttgttgaagtttgcggtgggcccgggggacgtggggggcgagcggcaggcagcggccgggactgttttgtttaggtctccatccacctgtgtggtataaatctgccagcctcaaggcggcgggggaccggagtgagaaagctctgacgctcccaaaagccccttttcgcaacttacagatctaggaccacatttgattctccacgcctggaaccggctagatcctagtttacgctcaccccgccctccagcctcccatcaacgcttcccgcacccgctgtgtgcagggctggcgctccgcagagcaaacagcgcccacgacccagggacagctggccaccgaagtccctccccggcgcccttccccgttccttgaggataggggagctgaggttttcatgtgaagggcgcccatgaaattcgtgggaacttgttctggcgtcttctggagtggagttctttcaggggtttcgggtctgcccgggactacaaaatgggatcctgggttggctggagtttcccagactaggctggagagaggtcggctgttggctcgcgggagagcccagaggaaccccttgggcgatggcagtcaagaccggcggctgcgtttgcctggaagaaaagcctaaatacattagcgagctggtaaagcttttaaggccttcttgggagcgagtggctggctaatgagaggttaattttgtttcgaagggaaggctgcactggtttcctgagataaatggacaggaagcgcattacctccgcgcgctggcaagcggctcccaaatgctttttgcacctgccgttttgagcggtgagagcagcggcggagcccgcagggattgcgggggcccgttgtctacgagcgggtgatgagccccccgcaagccccgggctctctccctccgcgagtgcattgctcacgccaagctttgggactcttctctcacacccaggtcctgcgtgttccgaagttcaggggccccctgatcccgctgagccccctccaggagcgaaagggttaagaatgatgtaagtacaggcacttgatttctcaagtcgcccgcttggccctcttccaagttgtactttccttattttctctcctttcctttccttactgttctaacgctttttaataaactttcactcttgctctgaaaaaaaaaatgatgtaagtacaaaccacgagctgcttgacgctgagctgttggactccgggctatttcagccgctgctttgggtacacagtggccggggagcagccggggagcccttactctagaaaggattgcacaaatcgcaagcttaggtgatctgttaagcagtcagagattctcctgttagatttctggaaatggagacatattaactggagaacagttaaaaacatcacgtataggctcag
